United States Patent Application Publication US 2025/0018062 A1 - sequence listing, part 8

SEQ ID NO: 11760 - DNA, 1257 bp, synthetic construct
  misc_feature 1..1257: note = source = /note="Description of Artificial Sequence: Synthetic coding sequence"
  source 1..1257: mol_type = other DNA
atgtccttcattcccgtcgccgaagattcggattttcctatacacaaccttccatacggtgtttttagcacgagaggtgatcctaggcccagaataggcgtcgccatcggcgatcagattcttgaccttagcattatcaaacaccttttcaccggtcctgtgctgtcgaaacatcaggatgtgttcaaccaacctactttgaactcgtttatgggtctgggacaggctgcctggaaggaggccagagttttcttgcagaacctgctttccgtctctcaagcaagactgcgtgacgataccgaactgcgcaaatgtgcctttatctcgcaggcatcggcaactatgcacctcccagcaactataggcgactacaccgacttttactcctccagacagcatgcaactaacgtgggaatcatgtttagagacaaggagaacgcacttatgccaaattggcttcatctgccggtgggataccatggtcgcgcgtcgtccgtggtcgtctcgggaactccaattagacgtcccatgggtcaaatgaagccagacgattccaaacctccagtgtacggtgcatgcaaacttctggatatggaactggagatggcattcttcgtcggaccggggaatcggttgggcgaacctatacccatttcaaaggcacatgagcatatcttcgggatggtgctgatgaacgactggtcagcacgtgacatccagaagtgggagtacgtgcctctgggaccttttttgggtaagtcgttcggaaccactgtgtccccatgggtggtcccaatggacgcactgatgcccttcgcggtcccaaatcctaagcaagaccctaggcccctgccatatttgtgtcatgatgaaccatacacgttcgacatcaatctttcggtgaacctcaagggggaaggaatgagccaagcggcaactatttgtaagagcaacttcaaatacatgtactggactatgctgcaacaacttacccatcattcagtgaatggttgcaacctgcggccaggtgatttgctcgctagcggaactattagcggtccagaaccagagaattttggttcgatgctggaactttcgtggaagggtaccaaacctatcgatcttggtaacgggcagactagaaagttcctgcttgacggcgacgaggtgatcattactggttactgtcagggtgatggttaccggattggatttggacagtgtgctggaaaggtccttccggcccttctgccttcc

SEQ ID NO: 11761 - DNA, 1257 bp, synthetic construct
  misc_feature 1..1257: note = source = /note="Description of Artificial Sequence: Synthetic coding sequence"
  source 1..1257: mol_type = other DNA
atgagcttcattccagtcgctgaggactccgatttcccgatccacaacctcccatacggagtcttttcgactcgaggagatccgcgaccccgtatcggagtggcgatcggagatcagatactggatttgagcataatcaagcacctctttaccggcccggttctttccaagcatcaagacgtgttcaatcaacccaccctgaattctttcatgggtcttggccaagcggcatggaaagaggctagagtctttctgcaaaacctcttgtcagtgtcccaggcgcgcctccgcgacgataccgaattgcggaagtgcgcatttatctcgcaggcatcagcaaccatgcatcttcctgccaccatcggagactacactgacttctactcgtcgcggcagcacgccactaacgtcggaattatgttccgggacaaagagaacgctttgatgccaaactggcttcacttgccagtgggataccacggacgcgcgagctcagtcgtggtgtcaggcaccccaatcaggcgcccgatgggacaaatgaagcctgacgactcgaaaccccctgtctacggtgcctgtaaactgctggatatggagctggaaatggcctttttcgtcgggccgggaaaccggctgggcgaaccaatccccatcagtaaggcacatgagcacatctttggaatggtactgatgaatgactggtcagcccgggatattcagaaatgggagtacgtcccgctcggacctttcctcggaaagtccttcggcactacggtgtcgccctgggtggtgcccatggacgccctcatgccgttcgcggttcctaacccaaaacaggacccacggccgctgccatatctgtgtcatgacgaaccttacacgttcgacatcaatctctcagtgaatctgaagggtgaaggcatgtcacaagccgccactatctgcaagtcgaactttaagtatatgtactggaccatgctgcaacagctcacccaccattccgtgaacgggtgcaacctgcgcccgggagatcttctggcgagtggaacgatctcgggcccggaaccagagaattttggatccatgctcgaactgagctggaaggggactaagccgatcgatctcgggaacggacagactcgcaagttcctgctggacggtgatgaagtgattatcactggctactgccagggggacggataccgtattggattcgggcagtgcgctggaaaggtcctgcctgcgttgctgccgtcg

SEQ ID NO: 11762 - DNA, 1257 bp, synthetic construct
  misc_feature 1..1257: note = source = /note="Description of Artificial Sequence: Synthetic coding sequence"
  source 1..1257: mol_type = other DNA
atgtcattcatccccgtggcagaggatagcgactttcctatccataatttgccttacggtgtattctccacccggggggatcctagacccaggatcggagttgccatcggggatcagattctggacctgagcatcatcaagcaccttttcaccggcccagtcctcagcaaacaccaagacgtctttaatcagccaacgctcaattctttcatgggcctcggccaagcggcctggaaggaggcacgagtctttttgcagaacctgctgtcagtgagccaggcacggctgagagacgataccgaactgaggaagtgcgctttcatcagccaggcctctgccaccatgcacctccctgcaacaatcggtgactacaccgacttttattcaagccgccagcatgccacgaatgtcggaatcatgttccgcgataaggagaacgcactcatgcccaattggctccatcttccagttggctatcacgggagagctagctcggtagtagtgtccggcacccctattagacgacccatggggcagatgaaacctgacgactctaagcctccagtctacggtgcgtgtaagttgttggatatggagctggagatggcattctttgtcggccccggtaataggttaggagaacctatacctatctccaaggcccacgaacacattttcgggatggtgctaatgaacgactggtctgccagggacattcagaaatgggaatacgttccactgggcccgttcctgggaaagtcattcggaactactgtttcgccctgggtcgtgcccatggatgcacttatgccattcgctgtccccaacccaaagcaagatcctagaccattgccatatctgtgtcacgatgagccctacacgtttgacatcaacctttccgtgaatctgaaaggcgaaggtatgtcccaggctgcaaccatatgcaagtcaaactttaagtatatgtactggaccatgctccagcagctgacccaccatagtgttaacggttgcaacctccgccccggtgatctgttagccagtggaaccatatccgggcctgagcccgaaaacttcggcagcatgttggagctgtcttggaagggaacaaagccaatagacctgggtaatggtcagactagaaaatttttattggatggagacgaggtgatcatcactggatattgccagggagacggataccgaattggttttgggcagtgtgcagggaaggtgctgcctgcactgcttcccagt

SEQ ID NO: 11763 - DNA, 1257 bp, synthetic construct
  misc_feature 1..1257: note = source = /note="Description of Artificial Sequence: Synthetic coding sequence"
  source 1..1257: mol_type = other DNA
atgtcctttatcccggtcgctgaggactcggactttccaattcataatctgccttacggtgtgttctcaaccaggggcgatcctcgccctcggattggagtggctatcggggaccagattctggatctgtcgatcattaagcacctttttaccggcccagtgctctcgaaacatcaggatgtctttaatcagccaactctcaactcgtttatgggactcggacaggctgcatggaaggaagcccgcgtgtttctgcagaacctgctctcagtatcccaagctagactgcgggacgatactgaactgcgcaagtgtgccttcatttcccaggcatcggcaaccatgcacctgcctgccaccatcggggattacactgacttttactcatcgaggcaacatgctactaacgtgggaatcatgttcagagataaggaaaacgctcttatgcccaactggctgcatcttcccgttggatatcatggtagagcaagcagcgtggtggtcagtggaactccaatccgccgtccaatgggacagatgaaaccagacgattcgaagccccccgtctacggagcatgcaagctgctggatatggaactggagatggcattctttgtgggtccaggaaacagattgggagaaccgattcccatctccaaggcccatgaacacatattcggcatggtgctgatgaacgattggtccgcaagagatatccagaagtgggaatacgtcccgcttgggccgtttctcgggaaatcctttggtacgaccgtgagcccctgggtggtgccaatggacgcgctcatgccttttgcggtgcctaaccctaaacaagatcctcggcctcttccctacctgtgtcatgacgagccctacaccttcgacataaacctgtccgtgaatcttaagggtgagggaatgtcccaagcggcaaccatctgtaagtcgaactttaagtatatgtactggactatgctgcaacaactcactcaccatagcgtcaacggatgtaacctccgtccaggtgatctccttgcatccggcaccatcagcggacctgagcctgagaacttcgggtcgatgcttgagctgtcctggaagggaaccaagccaatcgatcttgggaatggacagacccgcaaattcctcctggatggcgatgaagtgataatcacgggatactgccaaggtgacggataccgaataggatttggacaatgtgcaggaaaggtccttcccgcactgttgccatcg

SEQ ID NO: 11764 - DNA, 1257 bp, synthetic construct
  misc_feature 1..1257: note = source = /note="Description of Artificial Sequence: Synthetic coding sequence"
  source 1..1257: mol_type = other DNA
atgtcttttataccggtggccgaggatagtgatttcccgattcataatcttccgtatggagtattctcaacgcgtggggatcctcgaccacgcattggtgtcgctatcggagatcaaatcctggacctttctattattaagcatctgtttactgggccggtcctttctaaacatcaggatgtttttaaccaaccgacacttaactcatttatgggccttggtcaagcggcctggaaggaagcgagagtttttttacaaaatcttttatcagtgtcccaagctcgtttgcgagacgatacagaattaagaaaatgcgcttttattagccaagcttcagcgacgatgcacttacctgcgacaattggggattataccgatttttatagttcgagacagcatgcgacaaacgtgggtattatgttccgtgacaaagaaaatgcgctgatgccgaattggttacatttgccagttggttaccacgggcgtgcgtcatctgtggttgtgagtggcacacccatccgccgtcctatgggccaaatgaagcccgacgatagtaaaccgcctgtgtatggggcgtgcaagcttttggatatggagttagaaatggccttctttgttggacctggaaaccggttaggcgaacctatccctatttctaaagcacatgaacatattttcggcatggtgttaatgaatgattggtctgctagagacattcagaaatgggaatacgtccctctagggccttttttaggtaaaagcttcggcacaactgtctcaccttgggtcgtaccaatggatgcgctgatgccttttgcggtcccgaatccgaagcaggatcctcgacccctgccgtacttatgtcatgatgagccgtatacatttgatattaatttatccgttaatcttaaaggcgaaggaatgtcacaggcagctacgatttgcaaaagtaactttaagtatatgtattggacgatgctgcagcaattgactcatcattcagtgaatggctgcaacttgagaccgggcgatctgctggcgtcaggcacgataagcggccccgagcctgaaaattttggatcaatgctggagttaagctggaaaggcacgaaaccaattgatcttggtaatgggcagacccgaaaatttttgcttgacggcgatgaagtgataatcacgggatattgtcaaggagatggatacagaattggatttggccagtgtgcgggcaaagttcttcctgcattacttccgtcc

SEQ ID NO: 11765 - DNA, 1257 bp, synthetic construct
  misc_feature 1..1257: note = source = /note="Description of Artificial Sequence: Synthetic coding sequence"
  source 1..1257: mol_type = other DNA
atgtcatttatcccggtggccgaagatagtgattttcctatacacaacttgccctacggggtgttctctaccaggggcgacccgaggccacggattggcgtggctataggggaccaaattctggatctctctattattaagcatctctttacgggacctgtgctctccaagcaccaagacgttttcaaccagcccacattgaacagtttcatgggattgggccaggcagcatggaaagaggcccgcgtatttttgcagaaccttctgagtgtctcacaggcacgactgcgggacgatacagagcttcggaagtgcgccttcatctctcaggcctccgccacgatgcacctgccggccacaataggagattacacagatttctacagcagccgacagcacgctacaaatgtgggaattatgttccgcgataaggagaatgcgctgatgcccaattggctccacctgcccgtgggataccatgggagggcaagttccgtggtggtgagcgggacacctattcggaggccaatggggcaaatgaagcccgacgattcaaaacctccagtgtacggggcctgtaagctgctagatatggaacttgaaatggccttctttgtgggacctggcaaccgactgggcgagccaattcctatcagcaaagcccatgagcacatcttcggaatggtattgatgaatgattggtcagccagggacattcagaaatgggaatatgtacctctcggtcccttcctcggcaaatcattcgggacgaccgtgtctccttgggtagtgcccatggatgccctgatgccgtttgccgttcctaaccccaagcaggacccacgtccactcccttacctgtgtcacgacgagccttatacttttgacatcaacttgagcgtcaacctcaagggcgagggaatgtcccaagcagccactatttgcaagtcaaacttcaaatacatgtattggacgatgctgcaacaactcacgcaccatagcgtcaatggctgtaatcttcggccaggcgacctgttggcttccgggaccatctctggccctgagccagaaaatttcggctctatgctcgaactcagctggaagggcacgaagcctattgatcttgggaacggccagaccagaaagttcctcctggatggtgacgaagtgattatcacgggttactgccagggtgacgggtatcgtattggattcggtcagtgtgctgggaaagtgttacccgccctcctgccatcc

SEQ ID NO: 11766 - DNA, 1257 bp, synthetic construct
  misc_feature 1..1257: note = source = /note="Description of Artificial Sequence: Synthetic coding sequence"
  source 1..1257: mol_type = other DNA
atgtctttcattcccgttgccgaggattctgactttcctatacacaatctgccctacggagtgttttctacccgcggcgacccaaggcctagaatcggagtcgccattggtgaccagattcttgatctgtccataatcaagcacctgttcacaggaccagtgctgtctaaacatcaagatgttttcaaccagcctacgctgaacagtttcatgggcttggggcaggccgcctggaaagaagccagggtgtttttgcagaacctcctcagcgtgtctcaggccagactgagagatgacaccgagctgcggaaatgcgccttcatctcacaggcgagcgccactatgcacctgcccgcaacgataggggattatacggacttctattccagtcggcaacacgctaccaacgtagggattatgttcagagataaagagaacgcactcatgcccaactggctgcatctccccgtcggctaccacggccgggcttcttccgtggtggtttcaggtacacctatcaggcgcccgatgggacagatgaaacccgatgactccaagccccccgtgtatggagcctgcaagctgcttgacatggaacttgaaatggcattcttcgtggggccaggcaaccgactgggtgagccgatacccatcagcaaggcccacgaacatatcttcggcatggtgctcatgaacgattggtctgccagagacatacagaaatgggagtacgtaccactgggcccctttctggggaagtcattcggaacgactgtgagcccttgggtcgtgcccatggacgctctcatgccttttgccgtccctaacccaaagcaggaccctcggcctctgccctacctgtgtcatgacgagccctataccttcgatatcaacctctccgtgaatctgaaaggtgaggggatgtcccaggctgctactatttgcaagtccaactttaaatacatgtactggacaatgctccagcagctgacacaccacagcgtgaatggctgcaatctgaggcctggggacctcctcgcctccggaactatttctggccctgagcccgagaactttgggtctatgctcgagctgtcctggaagggtacaaaaccaattgacctgggaaacggacagaccagaaaatttctgctcgacggcgacgaggttattatcaccggttactgccagggcgatgggtaccgaattggctttggccagtgcgccggcaaggtgctccctgcactgctgcccagc

SEQ ID NO: 11767 - DNA, 1257 bp, synthetic construct
  misc_feature 1..1257: note = source = /note="Description of Artificial Sequence: Synthetic coding sequence"
  source 1..1257: mol_type = other DNA
atgtctttcatccctgtggcggaagactcagattttcctatccacaacctcccctacggggttttcagtacacggggagatccacgcccccgaattggcgtcgcgatcggcgatcaaattttggatctgtcgataattaagcacctgtttactggtccggtgctgagcaaacaccaggatgtgttcaatcagcccacactgaactcgttcatgggtctcggacaggcggcgtggaaggaggcaagagtcttcctccagaatctgctcagcgtgtcccaggccagactgcgtgacgacactgagcttcgcaagtgcgctttcattagccaggcgtcagccactatgcacctgcccgcaaccatcggggactacactgacttttatagtagcagacagcatgctacaaacgtgggaataatgtttagagataaggagaacgctttaatgcctaactggctacatcttcccgtgggatatcacggacgtgccagttccgtcgttgtgtctggcactcccatcagacgacctatgggacagatgaaacccgacgatagcaaaccgcctgtgtacggcgcctgtaaactgctggacatggaattggaaatggccttcttcgtgggcccgggaaaccgccttggcgagcccatccccatttcaaaggcacacgaacatatctttggaatggtgctgatgaacgattggtctgcacgcgatattcaaaagtgggagtatgtgccactggggcctttccttggtaagtccttcggtaccaccgtctcgccgtgggtggtgccaatggacgcactgatgcctttcgccgtcccgaaccccaagcaggacccgcgacctcttccgtatctgtgtcacgatgaaccttacacttttgatataaatctctcagttaatcttaagggcgagggtatgagtcaggctgcaaccatctgcaaatcgaacttcaagtatatgtactggaccatgctacaacagcttacacaccacagcgtgaacgggtgcaacttacgtccaggcgatcttctggccagcggcactatttcgggtcctgagccagagaacttcggaagtatgctggagttgagctggaagggaaccaaacctatcgacttggggaatgggcagacacgaaaattcttactagacggggatgaagtcatcatcacggggtactgtcagggtgatgggtaccgcattgggttcggccagtgcgcgggaaaggtgctgcccgcactgctcccgagc

SEQ ID NO: 11768 - DNA, 1257 bp, synthetic construct
  misc_feature 1..1257: note = source = /note="Description of Artificial Sequence: Synthetic coding sequence"
  source 1..1257: mol_type = other DNA
atgagttttatccctgtggctgaagattcggacttccctattcataatctaccatacggagtcttttccacacgaggagacccacgccctcgtatcggagtggccataggcgatcagatactagacctgtcaattattaagcatctattcacaggtcccgtcttatctaaacatcaggatgtctttaatcagccaacacttaattccttcatggggctcggacaagccgcctggaaggaggcccgggtcttcctgcagaacttgctttctgtaagtcaggctcgtttgcgagacgacacggaacttagaaagtgtgccttcatttcacaggcaagcgccactatgcatctcccagccactattggcgactacactgacttctattcaagccgccaacacgccaccaatgtcggtattatgtttagagacaaagagaatgcccttatgcccaactggctccatctgccagttggatatcacgggagagcctcctctgtggtggtcagtggcactcccataaggaggcccatggggcagatgaaaccggatgacagtaaacctcccgtatacggcgcctgtaagctgctggatatggagctcgagatggctttcttcgtcggcccaggaaatcgactcggcgagcctatccccatcagcaaagctcacgaacacatatttggtatggtcctcatgaacgattggtccgcgcgagacattcagaagtgggaatacgtcccattgggtcccttcctcggcaagtcctttggcaccaccgtgagcccttgggtggttccaatggacgcgttgatgccattcgccgtgcctaacccaaaacaggatcctaggcccttgccctacctctgtcatgacgagccatacacatttgacatcaacttatcagtcaacctgaagggcgaaggtatgagccaagccgcaactatctgtaagtcaaacttcaagtatatgtactggacaatgctgcagcagctgacccaccattctgtgaatgggtgcaatctgaggcctggagacctattagcatcgggtacaatatccgggcctgaacccgagaacttcggtagcatgctcgaactcagctggaagggcacaaagcctattgatctgggaaatggacagacgcggaagttcctgctcgatggagatgaggttattattacgggttactgtcagggggacggataccgaattggcttcggtcagtgcgccggcaaagtgctgccggctctcctcccatcc

SEQ ID NO: 11769 - DNA, 1257 bp, synthetic construct
  misc_feature 1..1257: note = source = /note="Description of Artificial Sequence: Synthetic coding sequence"
  source 1..1257: mol_type = other DNA
atgtcatttatccccgtcgcggaggattcagatttcccgattcacaatctgccgtacggagtattctcgactcgcggcgatccccgtcctcgcattggcgtcgcgatcggtgatcagatcctggacctgtccatcatcaagcacctcttcacgggacccgttctgtcaaaacatcaggatgtgttcaaccaaccgactctcaactcgttcatgggtctgggacaggcggcttggaaggaggctagagtgttcctccagaacctcctgtccgtgtcacaggcaagactcagggatgacaccgaactgcggaaatgtgcgttcatctcgcaggcatcggccactatgcacctgccagccaccattggagactacacggacttttacagcagccgccagcatgccaccaacgtggggatcatgttcagggacaaggagaacgccctgatgcctaattggttgcacctccctgtggggtaccacggacgggctagcagcgtggtggtgtccgggactccaatacgccgccctatgggccagatgaaaccagacgattctaaacctccggtctacggcgcctgcaagctcctggacatggaattggaaatggcgttcttcgtgggaccgggtaacagacttggcgaaccgatcccgatctcgaaggcccacgagcatatcttcggaatggtgctcatgaacgactggtcggcgcgggatatccagaagtgggagtacgtgccactcggtccctttctgggaaaatcattcggaactaccgtctccccgtgggtcgtcccaatggacgctctcatgccattcgccgtgcctaacccgaagcaggacccgcgcccgctgccgtacctctgccacgacgagccgtataccttcgatatcaacctgagtgtgaacttgaagggtgagggaatgtcccaagcagccactatctgtaagtctaattttaaatacatgtactggaccatgctgcaacaactgacccatcattcggtgaatggatgcaatcttcgacctggggaccttctggccagcggcaccatctcgggcccagaaccagaaaattttgggtccatgctggaactgagctggaagggaaccaagccaattgacctgggcaacggacaaactcggaagtttctgttggacggcgacgaagtcatcatcactggatactgccaaggcgatggataccggatcggattcggacagtgcgcaggaaaggtgcttcccgcactcctgccgtcc

SEQ ID NO: 11770 - DNA, 1257 bp, synthetic construct
  misc_feature 1..1257: note = source = /note="Description of Artificial Sequence: Synthetic coding sequence"
  source 1..1257: mol_type = other DNA
atgtcgttcatccctgtggctgaggactccgacttccctatccacaacctgccctacggagtgttttcaactcgcggagatccaagacctagaatcggcgtggccatcggtgatcaaatcctcgacttgagcatcatcaagcatctgtttactggccctgtgctgtcgaaacaccaggacgtctttaaccagcctactctgaactccttcatgggcctcgggcaggcggcctggaaggaagcgcgcgtctttctgcagaatctcctctcggtgagccaagcgagactccgcgacgacaccgagttgcggaagtgcgcctttatctcgcaagcctccgccactatgcatctccccgcaactatcggcgactacactgacttctactcatccaggcagcacgcgaccaacgtgggtatcatgttccgggacaaagaaaacgcactgatgccgaactggctccatctgccggtcggataccacgggcgagcgtcgtcagtggtggtgtccggcaccccgatccgccgcccgatgggacagatgaagcccgacgactccaagccgccggtctacggagcgtgcaagctcctggatatggagctggaaatggcgtttttcgtgggaccaggcaaccggctgggagaaccgatcccaatctcaaaggcacacgaacacatttttggaatggtgctcatgaatgactggagcgcccgtgacatccaaaagtgggaatacgtgccactgggccctttcctgggaaagagctttggaaccactgtgtcgccatgggtcgtgcctatggatgcgcttatgccatttgccgtgccgaacccgaagcaggatccgcgccccttgccttacctgtgccatgatgagccgtacacgttcgacattaatcttagcgttaatctgaaaggagagggaatgagccaagccgcgaccatctgcaaatccaatttcaagtatatgtattggaccatgctgcagcaactgactcaccactcggtcaatggatgtaacttgcgtccgggggatctcctcgcctcaggaaccatctctggcccggagccagaaaacttcggatcgatgttggaactgagctggaagggcacgaaacccatcgacctggggaacgggcaaaccagaaagttcctgctggacggagatgaggtgattatcacgggttactgccaaggagacggctacaggatcggattcggccaatgtgccggaaaggtgctgccggctcttctgccatcg

SEQ ID NO: 11771 - DNA, 1257 bp, synthetic construct
  misc_feature 1..1257: note = source = /note="Description of Artificial Sequence: Synthetic coding sequence"
  source 1..1257: mol_type = other DNA
atgagcttcatcccagtcgcggaagattcggacttcccaattcacaacctgccatacggtgtgttttcaactcgcggcgatcctaggcctcggatcggcgtggccattggggaccaaatcctggatttgtccattatcaagcatctctttactggcccggtgttgtccaagcaccaggatgtgttcaaccaaccaaccctgaacagctttatgggcctgggacaggcagcgtggaaagaagcccgggtctttctccagaacctcctctccgtctcgcaagcgagactgagagacgacacggaacttagaaaatgcgctttcatctcccaggcttccgcgactatgcacctgcctgccaccatcggagactacaccgatttctacagcagccggcaacacgccaccaacgtggggatcatgttccgggataaggaaaatgcactgatgccgaactggctgcacctgccggtcggataccatggaagagcctctagcgtggtggtttcgggtactccaatcaggcgccctatgggccagatgaagccggatgactcaaagccgccggtgtacggagcctgcaagctgcttgatatggagctcgaaatggccttcttcgtgggaccgggaaacagactgggtgagccaatccccatcagcaaagcgcatgaacacatattcggaatggtgctcatgaacgactggtcggcccgcgacatccaaaagtgggaatacgtgccactgggaccattccttggaaagagctttggaaccaccgtctcgccgtgggttgtccccatggacgcactgatgccattcgccgtgccgaatcctaagcaagacccccgcccgctgccgtacctgtgccatgatgagccatacaccttcgacatcaatctgtcggtgaatctcaagggggaaggaatgagccaggctgctaccatctgtaaatcgaatttcaagtatatgtattggactatgttgcagcagcttactcatcactcggtgaacggatgtaatctccgcccaggggacctgctggcctctgggaccatttcaggaccggaaccggaaaacttcggctccatgctggaactctcgtggaaggggaccaagccgattgatctcggaaatgggcagacgagaaaattcctgctggacggtgacgaagtgatcatcaccggctactgccaaggtgacggatacaggatcggattcgggcaatgcgccggaaaggtcctgccagccctgctgccgtcc

SEQ ID NO: 11772 - DNA, 1257 bp, synthetic construct
  misc_feature 1..1257: note = source = /note="Description of Artificial Sequence: Synthetic coding sequence"
  source 1..1257: mol_type = other DNA
atgtcgtttataccagtggcagaagattctgacttccctatccataatcttccttacggtgttttctcaacccgcggggatcctcgccctcggattggtgtggcgatcggtgaccaaatcctggatctgtcgattatcaagcatcttttcactggaccagtgctctccaaacaccaggacgtctttaaccagcccactctgaatagcttcatgggtttgggtcaagcagcatggaaggaggcaagagtctttctccaaaacctgctttcagtctcgcaagccagattgcgcgacgatactgaacttagaaaatgtgccttcatatcccaggcaagcgccactatgcatcttccggcaactattggtgactacacggatttctactcctcccggcaacatgccaccaacgtggggattatgttccgagataaggagaatgcgctgatgcccaattggcttcatcttcctgtcggataccacggaagagcttcgtccgtggttgtctccggaacccctattagaaggccaatgggacagatgaaaccagacgacagcaagcctcccgtgtacggagcatgtaagctcctcgatatggagcttgagatggcgttttttgtgggaccgggaaatagactgggagaacccatccctatttcgaaggcacacgaacacatcttcggcatggtgctgatgaacgactggtctgcgagagatatccagaaatgggagtatgtgcctcttgggccgtttctcggaaaatcgtttggtaccactgtctcaccttgggtcgtgcctatggacgcactcatgccattcgcagtgccaaaccctaagcaagacccgcggcccctgccctacctttgccacgacgaaccatacacctttgacatcaatctgtcagtgaatctgaaaggggaaggcatgtcccaagctgcaaccatttgtaaatcaaactttaagtatatgtactggaccatgctccagcagctgactcatcattcagtcaacggttgtaacctgcgtccaggggatctgctggcatccgggacgatcagcggcccagaaccggagaactttggctcaatgcttgagctttcttggaaaggaaccaaaccaatcgacctgggtaacggccaaactagaaagtttctgctggacggagatgaagtcatcattactgggtactgtcagggcgacggttaccgaatcgggtttggacaatgcgcaggtaaggtgttgcctgcactgctcccttcg

SEQ ID NO: 11773 - DNA, 1257 bp, synthetic construct
  misc_feature 1..1257: note = source = /note="Description of Artificial Sequence: Synthetic coding sequence"
  source 1..1257: mol_type = other DNA
atgtccttcattcctgtagcagaggacagtgacttccctatacataacttgccatatggagttttctccacgagaggagatcctcggccccggatcggggtcgctattggcgatcagatcctggatctctctatcatcaaacacctgttcacggggcctgtactgtcaaaacaccaagacgtgttcaaccagccgacattgaatagctttatgggccttgggcaggctgcttggaaagaagctcgcgtgttcctgcaaaacctcctatcagtttcccaggcccgtctaagggatgacacagaacttaggaagtgtgcattcattagccaagcgtccgcaaccatgcatcttcccgccactataggagactacacagacttctatagtagcaggcagcacgccaccaacgtgggcattatgttccgagacaaagagaacgctctaatgccgaattggcttcaccttccagttggctatcacggacgagcttcaagcgtggtcgtttctggaactcctattcgccgaccaatgggacaaatgaagcccgatgactcaaagccacccgtgtacggtgcgtgtaagctgctagatatggaactcgagatggccttcttcgtggggcctggtaatcggctgggcgaacccatacccatttcgaaggctcacgaacacatctttggcatggtgctgatgaacgactggtcagcacgggatattcagaagtgggagtatgtgccactaggtccatttctgggcaaatctttcgggactacagtgagcccatgggtcgtcccgatggacgctctcatgccatttgctgtgcctaatcctaaacaggaccctcgtcccttgccctacctttgccatgatgagccatataccttcgatatcaatttgagcgtgaatctcaagggggaaggaatgtcccaagccgctacgatttgcaagtccaatttcaaatatatgtactggacgatgcttcagcaactcacccaccactcagtgaatgggtgtaacttgcgacccggcgatctcctggccagcggcactatttccggacctgagcctgagaatttcgggtcaatgctcgagttatcttggaagggcaccaagccaattgatcttgggaatggtcagactagaaagtttcttttggatggggacgaagtgatcattactggctactgtcaaggcgatggttaccgaattgggttcggccagtgtgcagggaaggtcctccctgctctgctcccatcc

SEQ ID NO: 11774 - DNA, 1257 bp, synthetic construct; identical to SEQ ID NO: 11762
  misc_feature 1..1257: note = source = /note="Description of Artificial Sequence: Synthetic coding sequence"
  source 1..1257: mol_type = other DNA

SEQ ID NO: 11775 - DNA, 1257 bp, synthetic construct
  misc_feature 1..1257: note = source = /note="Description of Artificial Sequence: Synthetic coding sequence"
  source 1..1257: mol_type = other DNA
atgagcttcattccagtggcagaggactctgattttcctatccataatcttccctacggggtgttctccactcggggtgatcctaggcctaggataggggtcgccattggggatcagattctggatctgagtatcattaagcaccttttcactggacctgtgctctcgaagcaccaggacgttttcaaccaacctaccctgaactccttcatggggctgggacaggccgcttggaaggaggccagagtttttttacaaaatctgttgtccgtctcacaggcaagactgagagatgataccgaactgcgcaagtgtgcgttcatttcccaagcatctgccaccatgcatcttccagctactatcggcgactacacagacttttactcaagtcgacagcacgcaactaacgtaggtatcatgtttcgagataaggaaaatgcgctgatgcccaactggctgcacctccccgtggggtaccatggcagagcctcatcagttgtggtctccggaacgcccatcaggcggcctatgggtcagatgaagcctgatgattccaagcctcctgtatacggtgcctgtaagttgttagacatggagcttgagatggccttctttgtgggtcccggaaatcgcctcggcgaaccaattcccatctccaaggcccatgagcacatttttggcatggtcctcatgaacgactggtccgcccgcgatattcagaagtgggagtatgtcccacttggaccgttcctgggcaagtcatttggcacgacagtgtctccttgggtggtgcccatggacgccctcatgccctttgccgtgcccaatcccaagcaagacccccggccactgccatacctgtgtcacgacgagccctatacgtttgacattaatctctccgtcaatctgaagggggagggaatgagccaggccgcaaccatttgtaagtccaactttaagtacatgtattggacaatgctgcagcagctgactcaccattcggtgaatggatgcaacctcagacctggcgacctcctagcatcaggaacgatttctggtccagagcctgaaaatttcggctcgatgctcgagcttagctggaaagggacgaagccaatcgatctgggcaatgggcagacgcgaaagtttttgcttgatggggacgaggtgatcatcaccggatactgtcagggggacggctatcgcattggtttcggtcagtgtgcggggaaagtccttcctgccctgctgccttct

SEQ ID NO: 11776 - DNA, 1257 bp, synthetic construct
  misc_feature 1..1257: note = source = /note="Description of Artificial Sequence: Synthetic coding sequence"
  source 1..1257: mol_type = other DNA
atgtcatttatcccggttgctgaggactcggatttcccgattcacaacttgccgtacggcgtgttcagcaccagaggtgaccctcgcccacgtatcggtgtggcgattggcgatcaaattctggatttgagcatcattaagcacctgtttacggggccagtgctcagcaagcaccaggacgtttttaaccagccgaccttgaactcttttatgggcctgggccaagcggcgtggaaggaagctcgcgttttcctacagaacttgctgtcagtgagccaggctcgtctgcgcgatgacaccgaactgaggaaatgtgcattcatttcccaggctagcgcgacgatgcatctccctgcaactatcggtgactacaccgatttctattcaagccgccagcacgccacgaatgtgggcatcatgtttcgcgataaggaaaatgcactgatgccgaactggctgcacctacctgtcggctatcatggcagggcgagcagcgtggttgtcagcggtacgccgatcagacgccctatgggtcagatgaagcctgatgactcaaagccgcctgtttacggcgcatgcaaattactagatatggagttggagatggcgttttttgtcggaccgggtaatcgcttgggggaaccaatccccatcagcaaagctcacgaacacatcttcggtatggtactgatgaacgactggagcgccagagacattcaaaaatgggagtacgtccctctgggtccattcctgggcaaatccttcggtaccactgttagcccatgggtcgtccccatggatgctctgatgcctttcgccgtcccgaaccctaagcaagatccgcgcccgctgccatacctgtgtcatgacgagccgtatacgtttgacataaacctgtccgttaatctgaaaggagaaggtatgtctcaggcagcgaccatttgcaaatccaactttaagtacatgtattggaccatgctccagcagctgacccaccactccgtgaatggatgtaacctcaggcctggggacttgctcgcatctggcaccattagcggtccggagccggaaaactttgggtctatgctggagttgagctggaaggggaccaagccgatcgatctgggaaacgggcagaccaggaagttcctgctggacggagatgaagtgatcataaccgggtactgccaaggcgacggctatagaatcggtttcggtcagtgcgcgggcaaagtgttgccggccctgttgccgagc

SEQ ID NO: 11777 - DNA, 1257 bp, synthetic construct
  misc_feature 1..1257: note = source = /note="Description of Artificial Sequence: Synthetic coding sequence"
  source 1..1257: mol_type = other DNA
atgagttttatcccagttgcagaggattcggattttcccatccataatctgccatacggcgtgtttagtaccagaggcgaccccagaccccggatcggcgtcgctattggagaccaaatactggatctttctatcatcaagcatctcttcactggcccggtactctctaagcaccaggacgtgtttaaccagcccacgttaaattcattcatgggtctgggtcaggccgcttggaaggaagcccgggtgtttctccagaatctgctgtccgtctctcaggccaggctgagggatgataccgaactgcggaagtgcgcctttataagccaggccagcgccactatgcatctgccagcgacaattggcgactataccgatttctactccagcagacagcacgccacaaatgtcggtataatgtttagggataaggaaaacgccttaatgcccaattggctacacttgccagtcgggtaccatggcagagcctcatctgtggtggttagcggtacacccatccggagacctatgggtcagatgaaacctgacgattcaaaacctcctgtgtacggcgcttgcaagctattggacatggagctggagatggcattcttcgttgggccgggtaacagactgggagagccaatccccatctccaaggcacatgagcatattttcggaatggtcctgatgaacgattggagcgcaagggacattcagaagtgggaatacgtgccacttggaccctttttggggaagagctttggaaccacagttagcccgtgggtggtgcctatggacgccctcatgccctttgcagtccctaaccctaagcaagatccccggcctctgccgtacctgtgtcacgatgagccatatacttttgatattaacctgtcggtgaacttaaaaggcgagggaatgtcccaagcggccaccatctgtaaatctaacttcaagtacatgtactggacaatgctccagcagcttacacatcactccgtgaatggatgcaacctacgacccggagacctgttggccagtggcaccattagcggccccgagccggagaattttggttcaatgctggaactgtcttggaaaggcacaaagccgatcgacctcggcaacgggcagacacggaagttcttgcttgacggggacgaggtcatcataaccgggtattgccagggggacggctaccggatcgggtttggccagtgcgctgggaaggtcctcccagctctcctccccagc

SEQ ID NO: 11778 - DNA, 1257 bp, synthetic construct
  misc_feature 1..1257: note = source = /note="Description of Artificial Sequence: Synthetic coding sequence"
  source 1..1257: mol_type = other DNA
atgagcttcatcccagtggccgaggactccgatttccccattcacaacctgccatacggagtgttcagcactagaggagatccacgcccaaggatcggagtcgcaatcggggaccagatcctggacctgtcaattatcaaacacctgtttaccggacctgtgttgtcgaagcatcaggacgtgttcaatcaaccaactcttaattccttcatgggactcggtcaggctgcctggaaagaggctcgggtgtttctgcagaacctgctgtcggtttcccaggctcgcctgcgggacgacaccgagctgcgcaaatgcgccttcatctcacaggcctccgccaccatgcacctccctgcaaccatcggcgattacacggacttttactcaagccggcaacatgccactaatgtgggcattatgttcagggacaaagagaacgctctgatgccgaattggcttcacctcccggtggggtaccacggcagggcatcctcggtcgtggtgagtgggaccccaatcaggaggcccatggggcaaatgaaaccggatgactcgaagcctccggtgtatggagcgtgcaaactgctcgatatggaactggagatggcattcttcgtggggccgggaaaccgcctcggtgagccaatcccaatctcgaaagctcatgaacacatcttcggaatggtcctcatgaacgactggtcggcgagagacattcaaaagtgggaatacgtgccactgggcccttttctgggcaagagcttcggcactactgtgtccccatgggtggtccccatggatgccctgatgccattcgccgttcctaatccgaagcaggatcctcgcccgctgccgtacctctgccacgacgagccttacaccttcgatatcaatctctcggtgaacctgaaaggggagggaatgtcacaggccgcgactatctgcaaatcgaacttcaaatacatgtactggaccatgctccagcagctgactcaccactcagtgaacggatgcaacctgcgacccggagatcttctggcgtccgggaccatttcgggtccggagccggaaaactttggatcgatgctcgagctgagctggaagggaaccaaacctatcgacctgggaaacggacagactagaaaattcttgctcgacggggatgaagttatcattactggatactgccaaggagacggataccggatcggattcggccagtgcgccggcaaggtcctccccgccttgctcccgtcg

SEQ ID NO: 11779 - DNA, 1257 bp, synthetic construct
  misc_feature 1..1257: note = source = /note="Description of Artificial Sequence: Synthetic coding sequence"
  source 1..1257: mol_type = other DNA
atgtcgtttatacctgtcgccgaggactctgattttcctattcacaatctgccgtatggcgtctttagcactcgtggagatccccggccacggatcggggtggctattggggatcagatcttggatttgtcgatcattaaacacctgtttaccggtcccgtgctttccaaacaccaggacgtgttcaaccaacctactctgaactcatttatggggctcggacaggcagcatggaaggaagcaagggtgtttctccagaacctcctgtccgtgtcccaagcacgtctgagagacgatactgaactgcgaaaatgcgcattcatctcacaagcatcggcaactatgcatctccctgcaaccattggggattacaccgacttctactcgtcccggcaacatgcgacgaatgtgggcattatgtttagagataaggagaatgctttgatgccaaattggttgcatctgcctgttggctaccacggtcgggcctccagcgtggtcgtgtcaggtacccctattagacgtccaatgggacagatgaagcctgacgattccaagccgcctgtctacggggcgtgcaaacttctcgacatggaattggaaatggcctttttcgtcgggccaggcaaccggttgggtgaacctataccaatcagcaaggcacatgagcacatatttggtatggtccttatgaacgattggtccgcaagagacattcaaaagtgggagtacgtgcctcttggaccttttcttggaaagagcttcgggaccaccgtgtcgccttgggtggtgcctatggatgccctcatgccgttcgccgtgccgaacccgaagcaagacccaagaccactgccctacctgtgtcatgatgaaccttatacgtttgacattaatctttctgtcaatcttaaaggagaaggaatgtctcaggctgcgaccatctgtaagagcaactttaagtatatgtactggacgatgctgcaacaactgacccatcattccgtgaatggatgcaaccttcgacccggtgatctgcttgcgtcgggaaccatttcaggaccagaacccgagaacttcggctccatgctggagttgtcgtggaagggaactaaacctattgatctcggaaacggtcaaacgaggaagtttctccttgacggggatgaagttatcattactggatactgtcaaggtgatgggtacaggataggattcggtcagtgtgctggtaaggtcctgcccgcacttctccctagc

SEQ ID NO: 11780 - DNA, 1257 bp, synthetic construct
  misc_feature 1..1257: note = source = /note="Description of Artificial Sequence: Synthetic coding sequence"
  source 1..1257: mol_type = other DNA
atgagcttcattcctgttgcggaggatagcgatttcccaattcataatttgccttacggagtttttagcaccagaggagatccaagacctcgtattggtgtcgctataggtgatcaaatcctggatctctctatcataaaacacctgtttacaggccctgtactttctaagcaccaagatgtattcaatcaacccaccttgaattcattcatgggccttggccaagctgcatggaaggaagctcgggtgtttttgcagaatctcttgtccgtgtctcaggctagactcagggatgacaccgaactcaggaagtgtgcctttattagccaggcttcagcgactatgcatctgccagctaccatcggtgactacacagatttttactcatcccgacagcatgcaactaacgtggggattatgtttcgagataaggagaacgctctaatgcctaactggctgcaccttccagtgggttatcacggtagagcctcctctgttgtggtcagtggaacacctattaggagacccatgggtcagatgaagcctgatgacagcaagcctccggtgtatggagcgtgtaagttgctagacatggaacttgagatggcttttttcgtaggtcctgggaatcgtctaggtgagccgattccaatatctaaggctcatgaacatattttcggtatggtcttgatgaatgattggtcagcacgcgacattcagaaatgggagtatgtacctttgggaccttttctagggaaatccttcggaactactgtctcaccgtgggttgtcccgatggacgctctcatgcctttcgcagtgccaaaccctaaacaagatcctcgtcccctcccatacctgtgccacgatgagccctatacgtttgacattaacctgtcagttaaccttaaaggtgagggaatgtctcaagccgccacaatctgcaagtccaatttcaaatacatgtattggacaatgctacaacaattgactcaccatagtgttaacggttgtaacctgagaccaggagatctcttagcttctggcactatctcaggacctgagccagagaatttcgggagcatgcttgagctctcatggaagggcacaaaacctatcgaccttggtaatggacagacgcgtaaatttttgcttgatggggacgaggttattatcaccggatactgtcaaggtgatggttataggattggatttggacagtgcgccgggaaggtcttgcctgctcttctccctagt

SEQ ID NO: 11781 - DNA, 1257 bp, synthetic construct
  misc_feature 1..1257: note = source = /note="Description of Artificial Sequence: Synthetic coding sequence"
  source 1..1257: mol_type = other DNA
atgtcctttattcctgtagcggaagattcagactttcctatacacaatctgccttacggtgtgttcagcactcggggagaccctcgcccccgcattggggttgcaatcggggatcagatccttgacctgtctatcatcaagcacctgttcacaggcccagtgttgagcaagcaccaagatgtgttcaaccagccaaccttgaattcatttatgggactcggccaagctgcttggaaagaagcccgggtgttcctacagaatcttctgagcgtgtcgcaggccaggctgcgggacgacaccgaattacgcaaatgtgctttcatttcgcaagcctctgctacgatgcatttgcccgccactatcggcgactacacggacttctatagttcccggcagcacgccactaatgtgggaattatgttccgcgataaagaaaatgccctgatgccgaactggctgcatctgccagtaggctatcatggtcgggctagctccgtagtcgtttctgggacaccaatacggagaccgatgggccaaatgaagcctgatgactccaaacccccagtctacggagcttgcaaactgctggacatggagctggagatggctttcttcgtggggccaggaaaccgtctgggggagccaatacctatctctaaggctcatgagcacatcttcgggatggtgcttatgaacgactggtccgcccgcgatatccagaaatgggagtatgtacctctcggcccgtttcttggtaagagctttgggaccactgtttctccttgggtggtgcctatggacgctctgatgccatttgcggtgcctaatcccaaacaagatccccgcccgctgccttatctctgccatgatgaaccatacacctttgacataaacctcagcgtgaacctgaaaggggagggcatgtcccaagccgccactatttgcaaatccaatttcaagtacatgtattggactatgctgcaacaactgacacaccattcggtcaacggctgtaacctgaggccaggcgatcttctggcttcggggacaatttccggcccagagcccgaaaacttcgggtccatgctcgagctatcttggaaggggacaaagcctatcgatctggggaatggtcagacccggaagttcctgcttgatggggacgaggtgatcataacaggttattgccagggggatggatataggatcggtttcggccagtgtgctggaaaggtgttaccagcactgctgccaagt

SEQ ID NO: 11782 - DNA, 1257 bp, synthetic construct
  misc_feature 1..1257: note = source = /note="Description of Artificial Sequence: Synthetic coding sequence"
  source 1..1257: mol_type = other DNA
atgtcctttatccctgtcgcagaagatagtgatttcccaatacataacctgccttatggggtattttccaccaggggcgatcctaggccacgcattggtgtggcaattggcgaccagatcctcgatctttctattataaagcacctcttcaccggccccgtgctttccaagcaccaggacgtattcaatcaacccactctgaattcttttatgggtttgggccaggccgcttggaaggaggcgagggtgtttcttcaaaatcttctctctgtctctcaagccaggcttagagacgacacggagctgcggaaatgcgcatttatctctcaggccagcgccaccatgcacctccctgccactattggtgactatacggacttttatagttcacggcagcatgcaaccaacgtgggtataatgtttcgggacaaagaaaacgctctgatgccaaattggctgcatctgcccgttgggtaccacggcagagcctcctccgtggttgttagcggcacccctatccggagacccatgggacagatgaaaccggatgacagcaagcccccggtgtacggagcgtgcaaactgctcgatatggagctggagatggccttcttcgtgggtcccgggaatcggttgggggagcctatcccaatttcaaaggctcacgagcacatcttcgggatggttctcatgaatgactggagtgctagggatattcagaagtgggaatatgtgcccctgggcccttttctcggtaaaagctttgggaccactgtgagcccgtgggtggtacccatggacgctcttatgccgtttgctgttccaaacccgaaacaggatccccgccccttgccgtatctctgccatgacgaaccttatacgtttgacatcaatctgtcagtgaatttgaaaggagaaggaatgtctcaggccgcaactatttgtaaaagtaattttaagtatatgtactggactatgctccagcaactgacccaccactccgtgaacggttgtaatctgcgcccaggcgatctcctggcgagcgggacgatctcaggtcccgagcctgagaacttcggttctatgctggagctcagctggaaagggactaaaccaatagatttggggaacggacagacgagaaaatttctgctggatggtgacgaagtgatcatcaccggatactgtcagggtgacggatatcggatagggttcggccagtgcgccggaaaggtcctgcctgcgcttttgccgagt

SEQ ID NO: 11783 - DNA, 1257 bp, synthetic construct
  misc_feature 1..1257: note = source = /note="Description of Artificial Sequence: Synthetic coding sequence"
  source 1..1257: mol_type = other DNA
atgagctttatcccggtggccgaggacagcgattttccaatccacaacctcccgtacggagtgttctcgacccgcggcgaccctagacccagaatcggggtcgcaatcggtgaccagatcctggacctgtccatcatcaaacatctcttcactggcccggtgctctcaaagcaccaggacgtgttcaaccagccgaccctgaactccttcatgggactgggacaggcagcatggaaagaagcgagggtgttcctgcagaacctgctgtccgtgtcgcaggcgcgcttgagagatgacaccgaactgaggaaatgcgccttcatctcccaggcaagcgcaaccatgcatctgccggccaccatcggtgattacaccgatttctactcgtcccgacaacacgcgactaatgtgggaatcatgttcagggataaggaaaacgccttgatgccaaattggctgcacctgccggtcggttaccacggaagggcttcttcggtcgtcgtgtccgggacgccgatccggcgccccatgggacagatgaagccagacgactcgaagcctccggtgtacggcgcctgcaagctgctggacatggagctggagatggcattctttgtgggaccgggaaatagactcggcgagcctatccctatcagcaaagcccatgaacacattttcgggatggtgctgatgaatgactggtcggctcgcgatatccagaagtgggaatacgtgcctctgggaccattcctgggaaagagcttcggcactactgtgtccccgtgggtggtgccaatggacgcactgatgccgtttgcagtgccgaaccctaagcaggacccccgcccgcttccatacctctgccacgatgagccttacactttcgatatcaatctgtcggtgaatctgaagggagagggaatgagccaggccgctactatttgcaagagcaatttcaaatacatgtactggactatgcttcagcagctgactcaccactcagtcaatgggtgcaaccttcgccccggcgatctcctggcctccggtactatctccggccctgaacctgaaaacttcggcagcatgctggagctgtcctggaagggcaccaagccaatcgatcttggaaatggacaaacccggaagtttctccttgatggggatgaagtgatcatcaccggctactgccagggcgacggataccggatcggatttgggcagtgcgcgggcaaggtcctgccggccctgctgcccagc

SEQ ID NO: 11784 - DNA, 1257 bp, synthetic construct
  misc_feature 1..1257: note = source = /note="Description of Artificial Sequence: Synthetic coding sequence"
  source 1..1257: mol_type = other DNA
atgtcatttattccagtagctgaggatagcgattttcccatccataacctgccgtacggtgttttcagcacccgtggggaccctcgcccccgcataggggttgccattggcgaccagatcctggacttgagcatcataaagcatctgtttaccgggcccgtcctcagcaagcatcaggatgtgttcaatcaacccacgctcaactcgtttatggggctaggtcaggccgcttggaaggaggcccgtgtattcttgcagaacctactctctgtgtcacaggctcgactccgggacgataccgaacttcgtaagtgtgcgtttatatctcaggcttcagcaacaatgcacctgccagccacaatcggcgattataccgacttttatagcagtaggcagcatgccacaaatgttggcattatgtttagagacaaggagaatgccctgatgcccaactggctccaccttcccgtcgggtaccacggacgcgcgagctctgtggtcgtttctggcacccctattagacgtcccatgggtcagatgaagcctgatgatagcaaaccccccgtttatggagcctgtaaactgctagatatggaactggagatggcatttttcgtcggacctggaaaccgtcttggtgaacccattcccatatcaaaggcacatgagcatatcttcggcatggtgcttatgaacgattggtccgcgcgggacatacaaaagtgggagtatgtaccgctgggcccgtttctagggaaatcgtttggaactacagtgtctccctgggtggtgccaatggacgccctaatgccattcgcagtgcccaatccaaaacaagaccctaggcccttgccttatttgtgccatgatgaaccgtatacatttgatataaatttgtcagtgaatctgaaaggagaagggatgtcgcaagccgctacgatttgtaagtctaactttaagtacatgtattggaccatgctgcaacaactgacgcatcattccgtcaacggctgcaacctgaggccaggcgacctgctggcaagcgggactataagtggccctgaaccggaaaatttcggctccatgctcgagctcagctggaagggaactaagcccattgacttgggtaatgggcagaccagaaagtttcttctcgatggagacgaggtcatcattactggatattgccagggcgatgggtatcgcataggatttggacagtgtgcaggtaaagtcctgcctgccctcctcccttct

SEQ ID NO: 11785 - DNA, 1257 bp, synthetic construct
  misc_feature 1..1257: note = source = /note="Description of Artificial Sequence: Synthetic coding sequence"
  source 1..1257: mol_type = other DNA
atgagcttcatcccagtcgcagaggattccgatttccctatccacaatctcccttacggcgtgtttagcacccgcggcgatccccgaccccggatcggcgtggctatcggtgaccagatcctggacctgtcaattataaagcacctatttacgggccctgtcctgtctaaacaccaggatgtatttaaccagcctactcttaactctttcatgggcctgggacaggccgcctggaaggaagcccgggtttttctccaaaatctgttgagcgtctcccaggcacgcttgcgtgatgacaccgaactgagaaagtgcgccttcatctcacaagcgtctgctacaatgcacctccccgctacaataggagactacactgacttctacagttctcgtcagcacgccactaatgtaggcattatgtttcgggacaaagagaatgccttgatgcccaactggcttcacctacccgtggggtatcacggcagggcgagttcagtggtcgtttccgggaccccaataaggagaccaatgggtcagatgaaacctgatgatagcaagccgccggtgtatggagcatgtaaactgttggatatggagctggagatggctttcttcgtgggtcccggaaaccgcttgggggagcccatacctatctctaaagcacacgagcacatcttcggcatggtcctcatgaacgattggagtgcccgagatattcagaagtgggaatatgtccccctggggcccttcctgggcaagtccttcggaacaactgtaagtccatgggtggttcctatggatgctctcatgccattcgccgttcctaatcccaaacaggacccccgacccctgccttacctctgccatgacgagccctacacattcgacatcaacctatcggtgaacctgaaaggcgagggaatgtcccaggcagctaccatatgtaaatccaatttcaagtacatgtactggactatgctgcagcaactcacccaccattctgtgaatggttgtaatttgagaccaggagatttactggcatccggaacaattagcggtcctgaacccgagaattttgggtcaatgctggaattaagctggaagggaaccaagcccatcgatctcggtaatggccaaacccggaaattcctgctggacggtgacgaagtcatcatcaccggttattgccagggcgacggatacaggatcggcttcggtcagtgtgctggcaaggtgcttcctgccctcttgcccagt

SEQ ID NO: 11786 - DNA, 1257 bp, synthetic construct
  misc_feature 1..1257: note = source = /note="Description of Artificial Sequence: Synthetic coding sequence"
  source 1..1257: mol_type = other DNA
atgtcgtttataccggtagcggaagattcggattttccgatacataatttaccgtatggtgtattttcgacgcgaggtgatccgcgtccgcgaataggtgttgcgataggtgatcaaatactagatctatcgataataaaacatctatttacgggtccggttctatcgaaacatcaagatgtttttaatcaaccgacgctaaattcgtttatgggtttaggtcaagcggcgtggaaagaagcgcgagtatttctacaaaatttattatcggtttcgcaagcgcgtctacgagatgatacggaattacgtaaatgtgcgtttatatcgcaagcgtcggcgacgatgcatctaccggcgacgataggtgattatacggatttttattcgtcgcgacaacatgcgacgaatgttggtataatgtttcgtgataaagaaaatgcgttaatgccgaattggttacatctaccggttggttatcatggtcgagcgtcgtcggtagttgtatcgggtacgccgatacgtcgaccgatgggtcaaatgaaaccggatgattcgaaaccgccggtatatggtgcgtgtaaactactagatatggaactagaaatggcgttttttgttggtccgggtaatcgattaggtgaaccgataccgatatcgaaagcgcatgaacatatatttggtatggtattaatgaatgattggtcggcgcgtgatatacaaaaatgggaatatgttccgctaggtccgtttctaggtaaatcgtttggtacgacggtatcgccgtgggtagtaccgatggatgcgttaatgccgtttgcggttccgaatccgaaacaagatccgcgtccgctaccgtatttatgtcatgatgaaccgtatacgtttgatataaatctatcggttaatttaaaaggtgaaggtatgtcgcaagcggcgacgatatgtaaatcgaattttaaatatatgtattggacgatgttacaacaactaacgcatcattcggtaaatggttgtaatctacgaccgggtgatctactagcgtcgggtacgatatcgggtccggaaccggaaaattttggttcgatgctagaactatcgtggaaaggtacgaaaccgatagatctaggtaatggtcaaacgcgtaaatttttactagatggtgatgaagttataataacgggttattgtcaaggtgatggttatcgaataggttttggtcaatgtgcgggtaaagttttaccggcgttattaccgtcg

SEQ ID NO: 11787 - DNA, 1257 bp, synthetic construct
  misc_feature 1..1257: note = source = /note="Description of Artificial Sequence: Synthetic coding sequence"
  source 1..1257: mol_type = other DNA
atgtcatttatcccagtggcggaagattccgactttcctatacacaacttgccttatggagtcttttccacgcggggggacccccgccctaggatcggtgtcgcgatcggcgaccagatcttggacctgtctattataaaacatctgtttacggggcctgttctcagtaaacaccaggatgtattcaaccagccaacccttaactcgttcatgggcctcggccaggccgcttggaaagaggcccgcgtttttctgcaaaacttgctgtctgtgagtcaagccaggctaagagatgacaccgaacttcgtaaatgcgcgtttataagccaagcgtcagctaccatgcatctgccagcaaccattggcgactatacagatttttacagctctcgccagcacgctactaatgttggcatcatgtttagggataaagagaatgcacttatgcctaattggctgcatctcccagtgggctaccacgggagagctagcagcgtggtggtgtcagggacgccaatccggcgccccatgggccagatgaaaccggatgactcaaagccccccgtgtacggagcctgcaaactgctggatatggagctggaaatggcgttcttcgtcgggcccggaaataggctaggggaacccattcctattagcaaagctcacgaacacatctttggcatggtgctgatgaacgactggagcgccagagacatacaaaaatgggagtatgtgccactcgggcctttcctgggtaagtctttcggaactactgtgtccccgtgggtggtcccaatggatgccctgatgcccttcgcagtcccgaatccaaaacaggatcccagacccttgccctacctgtgccatgatgagccatatacttttgacatcaaccttagcgtcaatctcaaaggcgagggtatgagccaagcggcgactatatgcaaaagtaacttcaagtacatgtattggacaatgttacagcagctgacacaccattcggtaaacgggtgcaatttgcggcccggcgatctgttagctagcggtacgatctcaggccccgaacctgagaatttcggttctatgctggaattaagttggaaagggaccaagccaatcgatctgggaaatgggcagacgagaaagttcctacttgatggggacgaagtcattattaccggctactgtcagggagatggctaccggattgggttcggacagtgcgctggcaaggtgcttcctgccctgctgccttca

SEQ ID NO: 11788 - DNA, 1257 bp, synthetic construct
  misc_feature 1..1257: note = source = /note="Description of Artificial Sequence: Synthetic coding sequence"
  source 1..1257: mol_type = other DNA
atgtccttcattccagtggccgaggactctgatttccctattcataacctgccttatggggttttttcgaccaggggcgacccgagacctagaatcggggtggccattggtgatcagatcctcgacctaagcatcatcaaacacctgtttaccggaccagtgttgtctaaacaccaagatgtgtttaaccagccaactcttaattccttcatgggactcggccaggccgcctggaaagaggccagggtgtttcttcagaatctgctcagtgtcagccaagcccgactcagagatgataccgaactgagaaagtgcgcgttcatttctcaggcctccgctactatgcacttacccgcaacaattggcgactatactgatttctattcatctcgtcagcatgcaaccaacgtcggaattatgttcagagataaagaaaacgctctcatgccgaactggctgcacttgccagtgggctaccacggccgagcttcttctgtggtagttagcggaacaccgatccgaaggcctatgggacagatgaaacccgatgactccaaacccccagtgtatggtgcatgcaagctgctggatatggagctggagatggccttttttgtggggcctggaaacagattgggcgagccgatccctatctctaaggcacacgaacacatctttgggatggtgcttatgaatgactggtcggcccgggatatccagaagtgggaatatgtcccacttggaccctttctagggaagagctttggaacaacagtctctccttgggtagtcccaatggacgcgcttatgcctttcgctgtgccaaatcctaagcaggatcctaggccattgccatatctatgccatgatgaaccatatacatttgacattaacctgtccgtgaacctcaagggagaagggatgtcacaggctgcaacgatctgcaagtctaactttaagtacatgtattggactatgctacagcagctgacccaccactcagtaaatgggtgtaatctaagacccggggacctcctggcttccggcaccatttccggtcccgagccagaaaactttggctctatgctggagctcagttggaagggaacgaaacccatagatctggggaatggccaaactaggaaattcctgctggatggggatgaagtgatcattactggctattgccagggggatggctacagaataggcttcggccaatgtgcaggcaaagtacttcccgccctcttgccttcc

SEQ ID NO: 11789 - DNA, 1257 bp, synthetic construct
  misc_feature 1..1257: note = source = /note="Description of Artificial Sequence: Synthetic coding sequence"
  source 1..1257: mol_type = other DNA
atgtccttcatcccagtggccgaggactctgactttccgatccataatctgccgtacggtgtcttttcaactcggggcgatccgcgcccaaggatcggagtcgctatcggcgatcagattttggacctctccatcatcaagcatctgttcaccggacccgtcttgtccaaacaccaggatgtgtttaaccagcctacgttgaactccttcatggggctcggacaagccgcttggaaagaagcaagagtgtttctgcagaacctcctgtcagtctcccaagcacggctgcgggatgacacggaactgaggaagtgcgccttcatctcgcaagcgtccgccaccatgcatctgccagcgactattggcgactatacggatttctactcatcgcggcagcacgctaccaacgtggggatcatgttccgggataaggaaaacgcgctgatgcccaactggctgcacctcccagtcgggtaccacggacgcgcctcgtcggtggtggtgtcgggaactccgatccgtcgaccgatgggacagatgaagcccgacgactcgaagccgccggtgtacggtgcttgcaaacttcttgacatggaactcgaaatggcattcttcgtgggacctggcaacaggctgggagaacctatcccaatcagcaaagcccatgagcacatattcggaatggttctgatgaatgattggtcagcccgagatatccagaagtgggaatacgtccctctgggaccattcttgggcaagtcattcgggaccactgtgtcgccgtgggtcgttccgatggacgctctgatgccttttgcggtcccgaatcctaagcaagacccgcgcccgctgccctacctctgccatgatgagccgtacaccttcgacattaacctctcagtgaaccttaagggcgaggggatgagccaggccgcgaccatctgcaagtctaatttcaagtatatgtactggaccatgctgcaacagctcacccaccacagcgtgaacgggtgtaatctccgccccggcgaccttctggcgtcgggaactatcagcggcccggagccagagaacttcggaagcatgctggaactctcttggaaaggaactaaaccaatagacctgggcaatggtcaaaccaggaagttcctgctcgacggagacgaggtgattatcactggctactgccagggggacgggtaccggattggctttgggcagtgtgccgggaaggtccttccagctctccttccctcg

SEQ ID NO: 11790 - DNA, 1257 bp, synthetic construct
  misc_feature 1..1257: note = source = /note="Description of Artificial Sequence: Synthetic coding sequence"
  source 1..1257: mol_type = other DNA
atgagcttcataccggttgctgaggactccgattttcccatacataacctgccttacggtgtcttcagcactaggggagacccacgtccacggattggagtcgccatcggggatcagatcctggacctgagcatcatcaagcatctgtttactggacctgtgctcagtaagcaccaggatgtgttcaatcagccgaccctgaattcctttatgggcttggggcaggcagcatggaaagaggcaagggtgtttctacagaatctcctgagcgtttcacaggcacgtctccgcgatgacactgagctgcgaaagtgcgcatttattagccaagcctctgcgacaatgcacctgccagccacaataggtgactacacagatttttatagttctcgccagcacgccacaaacgtggggataatgttccgggacaaggagaatgccctcatgcccaactggttgcacctcccagtgggatatcacggacgagcatcaagtgttgtggtttcagggaccccaatccgcagaccaatgggccagatgaaaccggatgactctaagccccccgtctatggagcttgtaaactgctggatatggagttggagatggcctttttcgtgggtcccggaaaccgactcggggagccaatccccattagcaaggctcatgaacatatttttggcatggtacttatgaacgattggtctgctcgggatatccagaagtgggagtatgttccactggggcccttcctgggtaagtcttttggtactaccgtgtctccgtgggtggtgccaatggatgccctcatgcccttcgcagtccctaatccgaagcaggaccccaggcctctgccctatttgtgtcacgatgaaccatatacgtttgatattaatctgtccgtgaatttgaaaggcgaaggaatgtcacaggccgccacgatctgcaagagcaacttcaaatacatgtattggactatgctccagcagttgactcatcactcagtgaacgggtgcaacctccgaccgggcgacttactggcctccggaaccatcagtggccctgagcccgagaatttcgggtcaatgctcgagctttcatggaagggtaccaaaccaattgatctgggaaatgggcagacccgcaaattcctgctcgacggcgatgaggtcatcattacaggttactgtcagggggatggttacagaattggattcggccagtgcgccggaaaagtgctccccgctctgcttccatca

SEQ ID NO: 11791 - DNA, 1257 bp, synthetic construct
  misc_feature 1..1257: note = source = /note="Description of Artificial Sequence: Synthetic coding sequence"
  source 1..1257: mol_type = other DNA
atgtcgtttattcctgtggcagaagattctgacttccctatccataatctcccatacggcgtgttcagcacccggggagatccccggccaaggattggagtcgcaattggtgatcagatccttgacctgtcgataatcaagcacctgtttaccggacccgtgctgtcaaagcaccaggacgtgttcaatcaaccgactcttaattccttcatgggtctgggacaggcagcatggaaagaagcacgggtgtttctgcaaaaccttctttcagtgtcacaggcccgattgcgagatgatactgaattgcggaaatgcgcattcatttcccaggccagcgcaaccatgcatctgcccgctaccattggagattacaccgacttctattcaagcaggcaacatgcgaccaacgtggggattatgtttagagataaggaaaacgccctgatgcccaattggctgcatcttcctgtgggctaccacggacgggcatcatcggtggtggtgtccggcactcccattcgcaggccaatggggcagatgaagcctgatgacagcaagccacctgtgtacggagcatgcaagctgctggatatggagctcgaaatggcatttttcgtggggccaggtaatcgccttggggagcctatcccaataagcaaggcacatgagcacatctttggtatggtgctgatgaatgattggtccgcgcgggatattcaaaagtgggagtacgtgccacttggcccttttcttggtaagagctttggtaccactgtgtcaccatgggtggtgccaatggatgcactgatgccattcgcagttccaaaccctaagcaggacccccgccccctgccttacctgtgccacgatgaaccctacacctttgacatcaacctttccgtcaatctcaagggagaagggatgtcccaagcagcgactatctgtaagtcgaacttcaaatacatgtactggacgatgcttcagcaactgactcatcattcagtgaatggttgcaatctcagacccggagacttgctcgcctccgggactatatcgggaccagagccagagaactttggaagcatgcttgaactttcttggaagggaacgaaacccattgatctcgggaatggacaaacccgcaaatttctcctggacggtgatgaggttatcataacgggttactgtcagggggatggatatcgaatcggatttggtcagtgtgcaggtaaggtgttgcctgcactcttgccctcg

SEQ ID NO: 11792 - DNA, 1257 bp, synthetic construct
  misc_feature 1..1257: note = source = /note="Description of Artificial Sequence: Synthetic coding sequence"
  source 1..1257: mol_type = other DNA
atgtcttttatacctgttgccgaggattctgattttcctatacacaacttaccctatggggtattttccacacggggagacccccggcccagaataggggtagccatcggagatcagatcctggatctgtctatcatcaagcatctatttacaggacccgtcctatccaaacatcaagacgtgttcaatcagcccactcttaactcatttatggggttagggcaggcagcatggaaagaagcaagggtgtttcttcagaatctacttagtgtgtcccaggcacgattgcgagacgatacagaacttcgaaaatgtgccttcataagtcaggcctccgccactatgcatcttcctgccactatcggagactatacagatttttattcttccagacagcacgcaactaacgtggggataatgtttcgggacaaagaaaacgccctaatgcccaactggcttcacttacccgtggggtatcatggacgggcgagttctgtggtggtgtcagggacacctatcaggcgcccaatggggcagatgaaaccagatgatagtaagccaccagtttacggagcctgtaaactactagatatggaactcgaaatggccttttttgtgggacccggaaatcggttaggggagccaataccgatctccaaagcccatgaacacatatttggaatggttttaatgaacgattggtccgcaagggatatccagaaatgggagtatgtcccacttggaccatttttaggaaaaagtttcgggactactgtgtccccctgggtagtgcctatggatgcattaatgcccttcgctgtgccaaaccctaaacaggatcctagacctctcccttatctatgccacgatgaaccatatacttttgatattaatttatccgtaaatctcaaaggggaagggatgtcccaggccgccactatatgtaaatccaactttaaatacatgtattggactatgcttcagcagctcacacatcattctgtcaacgggtgcaatctaaggcctggagatctcctggcctcgggaacaatttccgggccagaacccgaaaattttggaagtatgctggaactctcctggaaagggacaaaacccatcgacctcggaaatgggcagacacggaaatttctattagatggagatgaagtgataataactggatattgtcagggggatggatatagaatcggattcggacagtgcgctggaaaagtgctgcccgcccttcttccatca

SEQ ID NO: 11793 - DNA, 1257 bp, synthetic construct
  misc_feature 1..1257: note = source = /note="Description of Artificial Sequence: Synthetic coding sequence"
  source 1..1257: mol_type = other DNA
atgtccttcatcccggtggcggaggacagcgattttcccatccacaacttgccctacggcgtcttttcgacgcgcggagacccgcgaccgcgaattggagtcgccatcggtgaccagatcttggacttgtcaatcattaagcacttgtttacgggtcccgttcttagtaaacaccaggatgtttttaaccagccgaccttgaattctttcatgggactgggccaagccgcctggaaagaagcaagagttttcctccagaacttgctttccgtttcccaggcgcgtctcagggacgatacagagctgcgcaaatgcgcgtttatcagccaggcctccgccaccatgcacctgccggccaccattggagactacactgacttctactcctcgcgacagcatgccaccaatgtgggcatcatgttccgggataaggaaaacgccttgatgccgaattggttgcaccttcccgtgggataccacggacgcgcctcatctgtggtcgtatccggtacccccattcgccgacccatgggccagatgaaaccggacgattccaagcccccggtatacggcgcttgcaaactgttggacatggaactggagatggcgtttttcgttggacctggtaatcgcctgggcgagcccataccaattagcaaagcacacgagcacatattcggcatggtcctcatgaacgactggtcggcccgagatattcagaagtgggagtacgtacccctgggcccattcctgggcaagtcatttgggactactgtgtcaccctgggtcgtgccgatggatgccttgatgccctttgcagttccgaatcctaagcaggaccctagacccctaccatacctctgccacgatgagccatatacgtttgatattaacctgagcgtgaaccttaagggcgagggtatgtcacaggcggctacgatctgcaagagcaatttcaagtatatgtactggacgatgctgcagcagctgacccaccacagcgtgaatggctgcaacctccgcccgggagacctattagcctcgggcaccatttctgggcccgagccggaaaatttcgggtcaatgctggagctctcgtggaagggcacaaaaccgatagacctaggcaatggacagacacgaaagtttctcctggatggcgatgaggttatcattacgggctactgtcagggcgatggctaccgcattggcttcggccagtgcgccggaaaagtgctgccagctcttttgccatcg

SEQ ID NO: 11794 - DNA, 1257 bp, synthetic construct
  misc_feature 1..1257: note = source = /note="Description of Artificial Sequence: Synthetic coding sequence"
  source 1..1257: mol_type = other DNA
atgagctttatccccgtggcagaggacagcgatttcccaatacataacctgccttacggcgtattttctacccgtggcgacccacggccacgcattggtgtcgctattggtgatcaaattttagacttgagtatcatcaaacatctcttcactggtcctgtgctctcaaaacatcaggatgtgttcaaccagcctacactcaactcattcatgggcctaggccaggctgcatggaaggaggccagggtcttcctacagaatcttctgagcgtgtcacaggccagactaagagacgacaccgagctgcggaagtgcgcctttatttcacaggcgtctgccaccatgcatttgcctgcgaccatcggcgattatacagacttctattctagcaggcagcacgcaacaaacgttggaatcatgtttcgcgataaggaaaacgcgctcatgcccaattggcttcacctccctgtgggctatcacgggagggcttctagtgtagtggtgtctggaacccctattcgcaggcccatggggcagatgaagcccgacgactctaagccacctgtttacggtgcctgcaaacttttagatatggaacttgagatggccttctttgttggccctggtaatagactgggggaaccgatcccaatctcaaaagcgcatgagcatatatttggcatggtactgatgaacgactggtcagcgagggacattcagaagtgggagtacgtgcccctgggaccttttctgggtaagtccttcggaaccaccgtgtcgccatgggttgtgcctatggatgccttaatgccttttgccgtcccgaatccgaaacaagatccaagaccattgccctacctttgccatgacgagccttataccttcgatatcaatctctcagtgaatctgaagggtgaagggatgagtcaggcggccacaatctgcaagtccaatttcaaatacatgtactggactatgttgcagcaactgacacatcactctgttaacggttgcaaccttaggcccggggacctcctcgctagcggcaccatctccgggcccgaacctgagaatttcggttccatgctggaactgagctggaagggcacaaagcctattgatctgggcaacggtcagactaggaagttcctcctagacggagacgaagtcattatcacggggtattgtcagggagatggctaccggataggctttgggcagtgtgccggaaaggttttgccagccctgttgcccagc

SEQ ID NO: 11795 - DNA, 1257 bp, synthetic construct
  misc_feature 1..1257: note = source = /note="Description of Artificial Sequence: Synthetic coding sequence"
  source 1..1257: mol_type = other DNA
atgtcctttatccctgtggcggaagattcggattttccaatacacaatctcccatacggggtcttttcgacccggggggatccccgcccacggataggagtggcgattggcgatcaaattctggatctgagcatcattaagcacctgttcactgggcctgtcctgagcaaacatcaggacgtgtttaatcagccaacgcttaacagctttatgggactgggacaagcagcatggaaggaagccagagtgtttctgcagaacttgctgtccgtcagccaagcacggctgcgcgatgataccgaactgcggaagtgcgcttttatctcgcaggcatcagctactatgcatcttcccgccaccatcggagattacaccgacttttacagctcccgccagcacgcaactaatgtgggcattatgttcagggacaaagaaaatgcactgatgcccaactggctgcacctccctgtggggtaccacggtagagcgtcctcagtcgtggtcagcggtactcctattcgacgaccgatgggccaaatgaagccagacgactcgaagccccctgtctacggagcctgcaagttgctcgatatggagcttgagatggccttctttgtcggaccaggaaaccggctgggagaaccgatccctatctcgaaggcccatgaacacattttcggtatggtgctgatgaacgattggagcgcaagagacattcagaagtgggagtacgtccctctcggtccatttcttggaaaatcttttggtaccactgtgagcccttgggtggtgcctatggacgcgctcatgccttttgcagtgccgaatccgaaacaggacccaaggccgctgccttacctctgccacgacgagccatacacctttgacattaatctgtcggtgaatctcaaaggcgaaggcatgtcacaggctgcaactatttgtaaatccaacttcaagtatatgtattggacgatgcttcaacaactcacccaccattcggtgaacggatgcaatcttagacctggtgacctgttggcaagcggtactatttcgggacccgaaccagagaacttcgggtcgatgctcgaattgtcctggaaggggaccaaaccaatagatctcggaaacgggcagacccgcaaatttctgcttgacggggatgaggtgatcattaccggatactgccagggggatggataccggattggcttcggacaatgtgccggtaaggtgctgcccgcactgctcccatcc

SEQ ID NO: 11796 - DNA, 1257 bp, synthetic construct
  misc_feature 1..1257: note = source = /note="Description of Artificial Sequence: Synthetic coding sequence"
  source 1..1257: mol_type = other DNA
atgagcttcattccggtcgctgaagattctgacttcccgatccataacctgccgtacggcgtgttttcgacccggggcgacccaaggccgcgcatcggagtggccatcggagatcagatcctggatctctcgatcatcaaacacctgttcactggaccagtcctgagcaagcaccaggatgtgttcaatcaaccgaccctgaattcgttcatgggactgggacaggccgcgtggaaggaggcccgggtattcctccaaaacctgttgagcgtgtcccaggcgagactgcgcgacgacaccgagctccggaaatgcgcgttcatttcgcaggcttcggcgaccatgcatctgcccgccacgatcggtgactatactgacttctattcgtcgcgccaacacgcaaccaacgtgggcatcatgttcagagacaaggagaatgccttgatgccgaattggcttcacttgcctgtgggctaccacggcagagcgtcatcggtcgttgtctccggcacgcctatacgtcgccctatggggcagatgaagccggatgactcgaagccgcccgtctatggcgcctgcaagctcctggacatggaacttgaaatggcctttttcgtggggccgggtaaccggctgggagaaccgatcccaatctcgaaggcacatgaacacatttttggaatggtgctgatgaacgactggtctgcaagagacattcagaagtgggagtacgtgccgctcggcccattcctgggcaaatcctttggaactactgtctcaccgtgggtcgtcccgatggatgcactgatgccgttcgcggtgccgaatccgaagcaggacccacgcccgctgccgtacctgtgtcacgatgagccgtacactttcgatatcaacctgtcagtgaaccttaagggggaaggaatgagccaagcggccactatctgcaaaagcaactttaagtatatgtactggaccatgctccagcagctgacccatcactctgtgaacggatgtaatctgcgaccgggagatctgctggcctccggaacgatctcgggtcccgagccggaaaacttcggtagcatgctcgaactgtcttggaaaggcactaagccgatcgacctcggcaatggccaaactcggaagttcctgctggacggtgatgaagtgattatcaccgggtactgccagggggatggataccgcatcggttttggacaatgcgcggggaaagtgctccccgcgctgttgccttca

SEQ ID NO: 11797 - DNA, 1257 bp, synthetic construct
  misc_feature 1..1257: note = source = /note="Description of Artificial Sequence: Synthetic coding sequence"
  source 1..1257: mol_type = other DNA
atgagcttcatcccagtggctgaagactccgactttcccatccacaacctgccatatggagtgttctccactaggggagatcctagaccacgcataggcgtagctattggagaccaaattctcgacctttctatcatcaagcatttgttcaccggacctgtgctgtctaagcaccaagatgtgtttaatcagcccacactgaatagttttatgggcctgggtcaggccgcctggaaggaagcaagggtgttcctccagaacctccttagtgtctcccaggccagactcagagacgacactgagcttcgtaagtgcgcctttatctcccaagccagcgctactatgcacctccccgctactattggtgactacactgatttttactcctcaagacagcacgctactaacgtcggcatcatgttcagggacaaggagaacgctttgatgccaaactggctgcaccttcccgttggataccacggacgtgcaagctcagttgtcgtgagcggcacacccataaggagaccaatgggccagatgaaaccagacgactcaaagccacctgtgtacggcgcctgtaagctgctggatatggaactggagatggccttcttcgtaggacccggtaaccgtctgggagaacccatacctatctccaaagcacacgaacacattttcggtatggtccttatgaatgactggtctgctcgcgacatccagaaatgggaatatgtaccattgggccccttccttggaaaatcctttggcactacagtatcaccctgggtggtacccatggacgcccttatgccttttgccgtgcccaaccccaagcaagacccaaggccactcccctacctgtgtcacgatgaaccatacacatttgacatcaaccttagtgtcaacttgaagggcgagggtatgagccaggctgccaccatctgcaagagcaattttaagtatatgtactggacaatgctgcagcagctgacacaccacagtgtgaatggatgcaacctcagacccggtgatctgctcgcttcaggcaccatatcaggtcctgaacctgagaacttcggtagtatgttggaactctcatggaagggtacaaagcctatagacctgggcaatggccagactaggaagttcctgttggacggcgacgaggtaattatcaccggatactgccagggcgatggttacaggatcggcttcggccagtgtgctggaaaggtgttgccagctctcctgccaagc

SEQ ID NO: 11798 - DNA, 1257 bp, synthetic construct
  misc_feature 1..1257: note = source = /note="Description of Artificial Sequence: Synthetic coding sequence"
  source 1..1257: mol_type = other DNA
atgagcttcatcccagtagcagaagactcagacttcccgatccataatctcccctacggggtatttagtacacgcggcgaccctcggccgcgcataggcgttgcaatcggggaccaaattcttgacctcagcatcattaaacatttattcaccgggccagtgctctccaagcaccaagatgtgtttaatcagcccaccctgaattcgtttatgggactaggccaggctgcttggaaggaagctagagtgttcctccagaatctgctttcagtgtcacaggctagattacgagacgacactgagctgcgaaaatgcgctttcattagtcaagcctccgccacgatgcatttacccgctaccatcggtgactacacagacttctactcgagtcggcagcacgccacaaatgtcggcattatgttcagagataaggaaaacgccctgatgcccaactggctgcacctccccgtgggatatcatgggcgggctagcagcgtggtcgtctctgggactcctattaggaggcctatgggccagatgaagcctgacgacagcaagccgcctgtttatggcgcctgcaagctgctggacatggagctggaaatggccttctttgtcggccctggaaaccgcctcggcgaaccaataccgatctctaaggctcatgaacacatttttgggatggtgctgatgaatgattggtccgcaagagatatacaaaaatgggaatacgtccctttaggccccttccttggcaagtcgttcggaacaacagtcagcccgtgggtggtgccaatggacgctctcatgccattcgccgtcccaaaccctaagcaggacccccgtccccttccttacctttgtcatgatgagccctacactttcgatattaacttgtcagttaaccttaagggcgaggggatgagtcaagcagccacaatctgcaaaagtaactttaagtatatgtactggaccatgctccagcagctgactcaccacagcgttaatggatgcaatcttcggccaggagatttactggcaagtggcactatttccggcccagagcctgaaaatttcgggagtatgcttgagctctcctggaagggcacaaaacccatagacctcggaaacggccagacaaggaagtttcttctggacggcgatgaagtaatcatcacaggctactgccagggagacgggtatagaatagggtttggccaatgtgccggcaaggtgttgccagctctgctgccatca

SEQ ID NO: 11799 - DNA, 1257 bp, synthetic construct
  misc_feature 1..1257: note = source = /note="Description of Artificial Sequence: Synthetic coding sequence"
  source 1..1257: mol_type = other DNA
atgagcttcatccctgtggcggaggactcagattttcctatccacaacttgccctacggcgtgtttagtactcgaggtgatcccagacccaggatcggagtcgctataggagatcagatcctcgatctgtccattattaaacatctgtttaccggccctgtgctgtcaaaacatcaggacgtctttaatcagcctactctcaatagtttcatgggcctggggcaagcagcttggaaggaggccagggtattccttcagaacttgctgagtgtttctcaggcaaggctccgcgacgatacggaactcagaaaatgtgccttcatctcacaggcttccgcgaccatgcaccttcccgccaccatcggtgattacacggatttctattctagtcgccaacacgcaacaaacgtagggattatgtttagggacaaggaaaatgctttgatgcccaattggctgcaccttcctgtgggttaccatggacgggcgtcctccgttgttgtgtctgggacccctatcagaagaccaatgggtcaaatgaagccggatgattcaaaacctccggtgtacggagcctgtaaactcctggatatggagctggagatggccttctttgttgggcctgggaataggctcggtgagccaatccctatcagtaaggcacatgagcacattttcggaatggtcctgatgaatgattggtccgcacgcgatatccaaaagtgggaatacgtgccgctcgggccctttcttgggaagtcttttggtaccacagtgtcaccctgggtggtaccgatggatgctctgatgccttttgccgtacccaaccctaagcaagatccccggcctttgccttatctgtgccatgacgagccctatacctttgatatcaatctttctgtcaacctgaagggagagggcatgtcacaggccgctaccatctgcaagagtaattttaagtacatgtattggactatgctgcagcaattgacgcaccacagtgtgaacggctgcaaccttaggcccggggaccttctggctagtggcaccatcagcgggcccgagcctgaaaacttcggttcaatgctcgagctctcctggaaggggacaaagcctatcgatctcggcaatggacagaccaggaagtttctccttgatggtgacgaagtgatcatcactggatattgccagggcgatggttatagaatcgggttcggccagtgcgccggaaaggtcctgccagcccttctcccgtct

SEQ ID NO: 11800 - DNA, 1257 bp, synthetic construct
  misc_feature 1..1257: note = source = /note="Description of Artificial Sequence: Synthetic coding sequence"
  source 1..1257: mol_type = other DNA
atgtcattcatacccgtggccgaggatagcgattttccaatccataacttgccttacggagtgttctcaactagaggtgatcctagaccgcggatcggagtggcaattggagatcagattctggatctgtcgattatcaaacatctttttaccggtccagtgctctccaagcatcaggatgtgtttaaccagccaactcttaactccttcatgggcttggggcaggcggcatggaaggaagctagagtctttctgcaaaaccttctctcagtgtcacaagccaggctgagggatgacactgaactccggaaatgtgcgttcattagccaggcatcggccacgatgcacctgccagcaactatcggtgactacaccgacttttactcgtcacgtcaacacgcgaccaacgtgggtataatgttccgagacaaagagaatgcgcttatgccaaactggctgcatcttcctgtgggataccacggccgggcatcaagcgttgtggtgagcggtacccctatcaggaggcctatgggccaaatgaagccggatgactccaagccccccgtctacggagcttgtaaacttctcgacatggaactggagatggcttttttcgtggggcctggaaaccgactgggcgagccaatacccatatcaaaggcacatgaacatatctttggcatggtgctcatgaacgactggtccgccagagatatccaaaagtgggagtacgtccctttgggaccatttctcggtaagtcgttcgggaccactgtctccccgtgggtggtgccgatggatgcactcatgccgtttgcggtgccaaaccctaagcaggatccgcgcccgctgccatacttgtgccatgacgaaccttacacctttgatatcaacctcagcgtgaacttgaagggagaggggatgtcccaagcagccacgatttgtaaaagcaatttcaagtatatgtattggaccatgctccagcaactcactcaccactcagtaaatggttgtaatcttcgacccggggatcttcttgcgtcgggcacgatttcgggacccgaaccggagaattttggctccatgcttgaattgagctggaagggcaccaagcctatcgatctgggtaatggtcaaacccggaagtttcttcttgacggcgatgaggtcatcattactggttactgccaaggagacggttatcgcattggttttggtcagtgcgcgggaaaggtcctccctgcactgttgccttca

SEQ ID NO: 11801 - DNA, 1257 bp, synthetic construct
  misc_feature 1..1257: note = source = /note="Description of Artificial Sequence: Synthetic coding sequence"
  source 1..1257: mol_type = other DNA
atgtcattcatacctgtggcagaagattccgacttcccaatacacaatctcccatacggagtctttagcacccggggggatccacgcccaagaatcggcgtggcaataggtgatcaaattctcgacctttcaatcataaaacatctttttactggtccggttctttcaaagcatcaagatgtctttaatcagcctaccctgaattcgttcatgggacttggccaagcagcgtggaaggaagcacgggtgtttctccaaaatcttctctccgtatcccaggccaggctgcgagacgatacggaactgcggaaatgtgcattcataagtcaagcatccgcaaccatgcatctgccagcaactattggagattacaccgatttctactcctcgaggcaacacgccaccaacgtgggcattatgtttagagacaaggaaaacgctctgatgcctaattggcttcacctgcctgtggggtaccatggccgcgcctcgagcgtggtcgtgtcgggaactccaatccggcgcccaatggggcagatgaagccagatgatagcaagccaccggtgtatggtgcttgcaagctccttgatatggaactggagatggcattctttgtgggccctggaaatcggcttggagaacctattcctattagtaaggcacatgaacatatcttcggcatggtgctcatgaacgactggtcagccagggacattcagaagtgggagtacgtccctctgggtcctttcctggggaagagctttggtacgaccgtgtccccatgggtggtgccaatggacgctcttatgccatttgcggtgccaaacccaaaacaagatcctcgtccactgccttacctttgccacgacgagccctacacttttgacatcaacctttccgttaacctgaaaggggaaggtatgagccaagcagcaaccatctgcaagtcgaactttaagtatatgtactggactatgctgcagcagctgacccatcatagcgtcaacggatgcaacctgcgccccggtgatctgctggcgtccggaactatttcggggcctgaacctgaaaacttcggatccatgttggaactgtcctggaaagggaccaaacctatcgatctcggcaatggtcagacgcgaaagtttcttcttgatggagatgaagtcattatcaccggatactgtcagggggatgggtaccgcattggttttggacagtgtgcagggaaggtcttgcctgctttgctgcctagc

SEQ ID NO: 11802 - DNA, 1257 bp, synthetic construct
  misc_feature 1..1257: note = source = /note="Description of Artificial Sequence: Synthetic coding sequence"
  source 1..1257: mol_type = other DNA
atgtccttcatccctgtcgcggaagatagcgattttccgattcacaaccttccgtacggggtgttcagcaccagaggggaccccaggccacgaatcggggtcgccattggcgaccaaatcctcgacctctcgatcattaaacatctctttaccggtccggttctgtccaaacaccaagacgtattcaaccagccaaccctgaactccttcatgggactcggacaggcggcctggaaggaagcgcgcgtctttctgcagaacctgctctcggtgtctcaggctcgcctgcgtgatgatactgaactccgcaagtgcgcctttatctcccaggcatcagctacgatgcatttgccggctacgatcggagattacaccgacttctactccagccggcagcacgccaccaatgtgggcatcatgtttcgcgacaaggaaaatgcgctgatgccaaattggctgcatctgccggttggataccacgggcgcgcaagctccgtggtggttagcggcacgcctattaggcggcccatgggacagatgaagcctgacgattccaaacctccggtgtacggggcttgcaagctcctggatatggaactggagatggctttctttgtcggacctggcaataggttgggcgagccgattccgatctcgaaagcccatgagcacatcttcggtatggtgttgatgaacgactggtcagcacgggacatccagaagtgggagtacgtgcctctcggcccattcctgggcaaatcattcggtaccaccgtctccccttgggtcgtgcctatggacgcattgatgccattcgccgtgcccaatccaaagcaggacccgcggccgttgccgtacctctgtcacgacgaaccatacaccttcgacatcaacctttctgtgaacctgaagggggagggaatgagccaggctgcaaccatctgcaagtctaacttcaagtacatgtattggaccatgcttcaacagctgacccaccacagcgtgaacggatgtaacctgcgccctggcgacctcctggcatcgggtactatttccggacctgagcctgaaaacttcggatcgatgcttgaactgtcctggaagggaaccaagccaatcgacctgggaaatggccagactcgcaaattcctcttggacggagacgaggtcatcataacggggtactgccaaggcgatggataccgcatcggctttggacaatgcgcgggaaaggtcctgccggcactgttgccctct

SEQ ID NO: 11803 - DNA, 1257 bp, synthetic construct
  misc_feature 1..1257: note = source = /note="Description of Artificial Sequence: Synthetic coding sequence"
  source 1..1257: mol_type = other DNA
atgtcctttatcccagtggcagaggattccgattttccaatccacaacctcccttacggggtcttttccacgagaggtgatccaagaccgcgaatcggtgtggccattggagatcaaattctggacctctccatcattaagcacctctttactgggcctgtgctgtccaagcatcaagatgtctttaatcagccgaccctcaacagctttatgggtcttggacaggcagcctggaaagaagcgagagtgtttctccaaaacctgcttagcgtgtctcaagccaggcttcgtgatgacacggagctgcgcaagtgtgcctttatctcccaagcgtctgcgaccatgcatctgcctgctactattggtgattacaccgacttttactcgtcgagacaacacgcaaccaatgtgggtatcatgttcagggataaggaaaacgcacttatgcctaattggctgcatcttccagtcgggtaccatggaagggcatcatccgtcgtcgtgtcggggacccctattcggcgccccatgggccaaatgaagcctgatgactcaaagccccccgtctacggagcttgtaagttgcttgatatggagcttgaaatggcatttttcgtcggccctggtaacaggctgggcgaaccaattccaatttccaaggcccatgaacacattttcgggatggtgttgatgaatgattggtctgcaagagacatccaaaagtgggaatacgtcccccttggcccttttttggggaagagcttcggtaccaccgtgagcccttgggtggtgcctatggacgcactgatgcccttcgcagtgccaaacccaaagcaagatcctcgacccttgccatacctttgtcacgatgaaccgtacacgtttgacatcaaccttagcgtgaatctgaagggagagggaatgtcgcaagcagccaccatttgtaagtccaactttaagtatatgtattggaccatgctccaacagctgacccaccactcggtcaacgggtgtaaccttcgaccgggggacctgctcgcctcggggactatatcgggtccagagcccgaaaacttcggttcgatgcttgaactctcctggaaaggcactaagccaattgacctggggaacggacaaactcggaaatttctcctggatggcgacgaggttatcattaccggatattgccaaggtgatggataccgcatcggcttcggacaatgcgccggtaaagttctgccggccctgttgccatcg

SEQ ID NO: 11804 - DNA, 1257 bp, synthetic construct
  misc_feature 1..1257: note = source = /note="Description of Artificial Sequence: Synthetic coding sequence"
  source 1..1257: mol_type = other DNA
atgtctttcataccggtggccgaagattcggacttccctatccataaccttccgtacggcgtcttctctacacgcggggacccgcggcccagaatcggtgtcgccatcggggaccagatactggatttgtccatcattaagcacctctttaccggcccagtactgtcaaagcatcaggatgtgttcaatcagcccacactaaatagctttatgggattaggccaggccgcttggaaagaggctcgagttttcctccaaaaccttctttccgtcagccaggcccgtctgcgcgatgataccgaacttagaaagtgcgcgtttatctctcaggcgagcgccactatgcacctccctgcaacaatcggagactataccgacttctactcctcccgccaacatgccactaacgtcgggatcatgttccgggataaggagaacgccctgatgcccaactggctgcatttgcccgtgggctatcatggccgcgccagcagtgtcgtcgtctccgggacccccattagacgaccaatgggccagatgaagcccgacgatagtaagccaccggtttatggagcatgcaaactactggacatggaactagaaatggccttctttgtgggcccagggaaccggctcggcgaacctatccctatcagcaaagcccatgagcatatattcggaatggttctgatgaatgactggagcgctcgggacattcagaaatgggagtacgttcccctaggcccttttttgggaaagtccttcggaaccactgtgagtccctgggttgtgccgatggacgcgctgatgccatttgccgttccgaatccaaaacaggatccgcgcccactgccgtacctgtgtcacgacgagccttacacattcgatataaatttgtccgtaaatcttaagggggaaggaatgagtcaagccgccaccatctgtaagtccaatttcaagtacatgtattggacgatgctccagcagctgacccaccactctgttaatggatgtaaccttcggccaggtgaccttctagcttccggcactatttcgggtccagagcctgaaaattttggtagtatgttagagctgagttggaagggcactaaacctattgaccttggaaatgggcagacacggaaattcttgttagacggcgacgaggtcatcataactggttactgtcagggggatggctatagaataggatttggacagtgtgctggaaaagtgctcccggcgttactgccttct

SEQ ID NO: 11805 - DNA, 1257 bp, synthetic construct
  misc_feature 1..1257: note = source = /note="Description of Artificial Sequence: Synthetic coding sequence"
  source 1..1257: mol_type = other DNA
atgtccttcattcctgttgcagaggacagcgactttcctatccacaatctgccctacggagtttttagtacccgtggcgacccacgacccaggattggagttgctattggcgaccagattctggatctgagcataatcaagcatttgttcacagggccagttctgtcaaagcaccaagacgtgtttaaccagcccactctgaactcattcatgggactgggtcaggcggcctggaaggaggcccgagtgtttctccagaacctgctgtctgtctctcaagcaagacttagggatgataccgagctgcggaaatgtgctttcataagtcaggcaagtgcaacaatgcatctgccagcaaccattggagactacactgacttttattcctcccggcaacacgcaacaaacgttggaatcatgttccgggataaggaaaacgcgttaatgcccaactggctgcacctccccgtagggtatcacggcagagcctcctcagtggttgtgtccggtaccccaatacggagacccatgggacagatgaaaccggacgatagcaaaccccccgtgtacggtgcctgcaagctgctggatatggagctagaaatggcttttttcgtgggtcctggaaacaggctaggagaaccaattcccatatccaaggcccatgagcacatcttcggtatggtgctgatgaacgattggtctgcacgggatatccaaaaatgggagtatgtacctttagggcctttcctcgggaagtccttcggcacgactgtatcaccttgggtggttccaatggatgcactgatgccttttgccgtgccaaatcccaagcaagatccccgtcctttgccttatctgtgtcacgatgagccatacacttttgacatcaacctgagcgtaaacctgaaaggtgaaggaatgtcccaggcggccaccatctgcaagtccaacttcaaatacatgtactggacaatgttgcagcagttgacacaccattctgtgaacgggtgtaatctgagacccggggatcttctggcatccggcacaatatccgggcccgagccggagaacttcggctcaatgttggagctcagctggaaaggaactaagcccatcgacctgggtaacggacagacacgcaaatttctgctggacggggacgaagtgattatcacggggtattgccagggcgacggctatcggattgggtttgggcaatgtgccgggaaagtgctcccagctctcctgcctagc

SEQ ID NO: 11806 - DNA, 1257 bp, synthetic construct
  misc_feature 1..1257: note = source = /note="Description of Artificial Sequence: Synthetic coding sequence"
  source 1..1257: mol_type = other DNA
atgagttttataccagtggccgaagattctgacttccccatccataaccttccctacggggtttttagcactcgcggggaccctcgccctcggattggcgttgcaatcggggaccagatcctggacctgtccattatcaagcacctgtttaccggacctgtgctaagcaagcaccaggatgtgttcaaccagcccactctgaatagcttcatggggcttggccaggctgcctggaaggaggcccgggtttttctgcaaaatcttttaagcgtgtcacaagcacggctgcgggatgataccgagttaagaaaatgtgccttcataagtcaggctagcgccactatgcatctcccagccacaattggcgactatactgacttctactcaagtaggcaacacgctacaaacgtggggattatgttccgtgacaaggaaaacgccctgatgcctaactggctgcatctgcctgtggggtaccatgggagggcctctagcgtggtggtgtccggaacacctataagaagacctatgggccagatgaagccagacgattccaagccaccagtttacggcgcctgcaagttgctcgatatggagctagagatggcctttttcgtagggcctggcaatagactgggcgagcctattcctatcagcaaagcccatgagcacatcttcggtatggtgctaatgaacgactggtctgctagagatattcagaaatgggagtatgtccccctggggccatttctaggcaagtcattcgggacaaccgtcagtccttgggtggtgcccatggacgccctgatgccttttgccgtgcctaacccaaagcaagatcccagacctctgccttacttatgtcatgacgaaccttacaccttcgatattaacctcagcgtgaacctgaagggggaaggcatgagccaggccgcaacaatctgcaaatctaatttcaagtatatgtactggacaatgctgcaacagttgacacaccactctgtcaacgggtgcaatctgaggcctggggatctactagccagtggcaccatctccggccccgaacctgaaaatttcggcagcatgctcgaactctcttggaaagggaccaagccaattgacttaggcaatggccagaccagaaagttcctgctggacggcgatgaggttatcatcaccggctactgccagggggatggctacagaattggtttcggacagtgcgcaggcaaggtgctccctgccctgctcccatca

SEQ ID NO: 11807 - DNA, 1257 bp, synthetic construct
  misc_feature 1..1257: note = source = /note="Description of Artificial Sequence: Synthetic coding sequence"
  source 1..1257: mol_type = other DNA
atgtcgttcattcccgtcgcagaggatagcgattttcctatccacaatctgccatacggtgtgttcagcaccaggggggatccacgcccgagaattggagtcgctataggggaccagatcctggatctttccatcataaagcatctgttcaccggcccagtgctgtcaaagcatcaagacgtgtttaatcaaccaactctcaatagcttcatggggttgggacaagcggcatggaaggaagcacgagtctttttgcaaaatcttctctcggtgtcgcaggcaaggctccgtgacgataccgagctgcggaagtgtgccttcatttcgcaggcgtcagcaactatgcatctgccagcgaccatcggagattatactgacttttacagctcccgccagcacgcaaccaatgtcgggattatgttcagagacaaggaaaacgcacttatgccaaattggctgcacctgcctgtgggataccatggaagagcatcgagcgtcgtcgtctctggaactccaatccgtagacctatgggacaaatgaagcctgacgattccaagcctccagtttacggagcatgtaagctgttggacatggagcttgagatggcgtttttcgtgggccctggaaataggcttggagaacctattcccatatccaaagcgcacgagcatatctttggaatggtgttgatgaacgactggagcgcgagagatattcagaagtgggagtacgtgcctcttggtccgttcctgggcaagtcatttggcaccacggtgagcccatgggtcgtgccaatggatgcgctgatgccgtttgctgtgccaaaccctaagcaagacccaagacctttgccttacctctgccacgatgaaccttacaccttcgatatcaacctttccgtgaatcttaaaggcgaaggtatgagccaagcagcaacgatctgtaaatcaaactttaagtatatgtattggaccatgctgcagcaactcacccatcattcggtcaacggatgtaaccttcggcctggcgatcttcttgcaagcggtaccatttcgggcccagagccagaaaacttcggctcaatgcttgagctctcatggaaaggaaccaagcctatcgatctggggaatggacagactagaaagtttcttctggacggagatgaagtgatcattactggttactgccaaggcgacgggtacaggattggcttcggccagtgtgcaggtaaggtgcttcctgccctgcttccttcg

SEQ ID NO: 11808 - DNA, 1257 bp, synthetic construct
  misc_feature 1..1257: note = source = /note="Description of Artificial Sequence: Synthetic coding sequence"
  source 1..1257: mol_type = other DNA
atgagctttatccctgtagccgaggattcggactttcccatacacaaccttccttacggtgttttctccacccgcggcgaccctcgccccaggatcggagtggctatcggagatcaaatactggacctcagtatcatcaagcacctgttcacaggtcccgtgctgtcgaagcaccaagacgtctttaatcagcccaccctgaattcttttatgggccttgggcaggccgcgtggaaggaggcccgagttttcttgcagaatctgctgtctgtaagccaggcacgcctgagggacgatacggaactgaggaaatgtgcattcattagtcaggcctccgccaccatgcacctacctgctaccatcggcgattacacggatttttacagctctcggcagcatgcaactaatgtcgggatcatgtttagggataaagagaatgccctgatgcctaactggctgcacctgccagtggggtatcacggccgcgcctcatccgttgtggtttctggcacgccgattcgccgtcccatgggccagatgaaaccagacgactcgaagccaccagtgtacggcgcatgtaaactattggatatggagctcgagatggccttctttgtcggccccggtaatcgcctcggcgaacccatccccatctcgaaggctcacgaacacatctttgggatggtgttgatgaatgactggagcgcaagagacatccagaagtgggagtatgtgccactggggccctttctagggaaaagttttggcaccactgtctcgccctgggtagtgccaatggatgctctgatgcctttcgccgtgcctaacccgaaacaggacccccgccccctgccctatctatgccatgatgagccatacacattcgacatcaaccttagcgtcaatctgaagggtgaaggcatgtcacaggctgctacgatttgcaagtccaattttaagtatatgtattggacaatgcttcagcaactaacacatcattccgtgaacggatgcaacctacggcccggggatctgctggcttccgggacaatctccggccccgaacctgagaactttgggagcatgctagaactgtcatggaaagggaccaaaccaattgatctgggcaatggccaaaccaggaagttccttctggacggggacgaagtgattattaccggctattgccaaggagacggttaccgcattggtttcggccaatgtgccggcaaggtgctcccagcgctgctcccatct

SEQ ID NO: 11809 - DNA, 1257 bp, synthetic construct
  misc_feature 1..1257: note = source = /note="Description of Artificial Sequence: Synthetic coding sequence"
  source 1..1257: mol_type = other DNA
atgagctttatccctgtggctgaggactccgacttccccatccataacctcccatatggggttttcagcaccaggggagaccccagaccaaggattggggtggctattggcgatcaaatccttgacctctctattatcaagcacctgtttaccggcccggtgctgtctaagcatcaggatgtatttaaccagcctaccctgaactccttcatgggcctcggccaagcagcatggaaggaggcgagggtgtttttacagaacctcctctccgtctcgcaggcccggctgcgggacgacaccgagctccgtaagtgcgccttcatcagtcaggcgagcgctaccatgcacctgcccgctacgattggagattacacagatttttactcttcccgccagcacgcgacgaacgtcggaatcatgttccgggacaaggaaaacgcccttatgccaaactggctccatttgcctgtggggtatcacgggcgtgcctcgagcgtcgttgtatccggaaccccaattaggaggcccatggggcagatgaagcccgacgactctaaacctccggtgtacggcgcttgtaaattgctggacatggagcttgaaatggctttcttcgtgggcccgggcaaccgactgggcgagcctataccaatatcaaaggcacacgagcacatcttcggtatggtcctgatgaacgactggagcgccagggacatccagaagtgggagtatgttccgctgggtcccttcttgggcaagagttttgggacgaccgtgagcccctgggtggtgccaatggatgccctgatgccctttgccgtgcctaaccccaagcaggaccccaggcctctgccgtacctgtgtcacgatgaaccttacaccttcgacatcaacctgtctgttaacctcaagggcgaaggtatgtcccaggcggcaacaatttgtaaatctaactttaagtacatgtattggaccatgttgcagcagttgacccaccatagcgtcaatgggtgtaacctccgcccaggagacctactagcatcaggaaccatctcggggccagaaccagagaacttcggaagcatgctggagctttcttggaaaggtacaaagcccattgacctggggaatggccagaccaggaagtttttacttgacggggacgaggtgatcatcacagggtactgccaaggggatggctacagaatcggctttggccaatgcgcgggcaaggtgcttcctgccctgctcccttct

SEQ ID NO: 11810 - DNA, 1257 bp, synthetic construct
  misc_feature 1..1257: note = source = /note="Description of Artificial Sequence: Synthetic coding sequence"
  source 1..1257: mol_type = other DNA
atgtcctttatacctgtggctgaggatagcgactttcctattcacaacctgccttacggagttttttcaacacgaggcgatcctaggcctaggatcggagtggccattggtgatcagatattagacttaagcattatcaaacacctgtttaccgggccagtcctgagtaaacaccaggatgttttcaatcagccaactctgaactcattcatggggctggggcaggcagcttggaaagaggcacgcgtttttctccagaatttgctgtctgtcagccaggccagattgcgcgatgataccgagctccggaagtgcgcgttcatctctcaggccagtgccaccatgcacctgcccgcaacgatcggcgactatactgatttttactccagccggcagcacgccacaaacgtcgggatcatgtttagggataaagagaacgcacttatgccaaactggctacacctccctgttgggtaccatgggagagcctccagtgtggtggtgtcaggtacacccatcagacggcctatggggcagatgaagcctgacgattcaaagccacctgtgtacggggcctgtaaactgctggacatggagctggagatggccttcttcgtggggcccggaaacagacttggagaaccaatcccaattagtaaagcgcacgagcatattttcggtatggtactgatgaacgattggagtgctcgcgatatccagaagtgggaatatgttcctttgggccccttcctcgggaagtcattcggcacaacagtttccccatgggtcgtgcctatggacgcccttatgccgtttgccgtgcccaaccccaagcaggacccgcgacccctcccgtatctttgtcatgacgagccatataccttcgacatcaacctgagtgtgaatctaaagggtgagggcatgtcccaggccgccaccatatgcaagtctaactttaaatatatgtattggaccatgctccaacagctgacgcaccactcagtcaacgggtgcaacctccggcccggggatttactcgcgtctgggactataagcggccccgaacccgagaactttgggagcatgttagagttgtcgtggaaaggcactaagcccattgacctgggcaacggacagacacgtaagtttttgctcgatggagacgaggtaatcattaccggctactgtcagggcgacggctataggatcgggttcggacagtgtgcagggaaggtccttcccgccctgctgccatcc

SEQ ID NO: 11811 - DNA, 1257 bp, synthetic construct
  misc_feature 1..1257: note = source = /note="Description of Artificial Sequence: Synthetic coding sequence"
  source 1..1257: mol_type = other DNA
atgtcctttattcctgttgcagaagattcggactttcctattcataatctgccgtacggagtgtttagcaccagaggtgatcctcgtcctaggataggagtggctatcggggatcagatcctggatctctcgatcataaagcatctgtttactggacccgtgctctcaaaacaccaagatgtgttcaatcaacccaccctgaatagcttcatggggctcggtcaagccgcatggaaggaggcacgagtgtttctgcagaaccttctgtccgtgtctcaagcacgcttgcgagatgataccgaattgcggaagtgcgcgttcattagccaggcttcggcaactatgcacctccctgctaccattggtgattacaccgatttctactcatcacgccaacatgcaactaatgtcggaattatgtttagggataaggagaatgcactcatgccaaactggctgcatctccccgtggggtaccacgggagagcctcctcggtggtggtttccggtactccgattaggcggcctatggggcagatgaagcccgacgactcgaagccacctgtctacggcgcttgtaaactgcttgacatggaactggaaatggccttttttgtcgggcctggtaatcgcctgggagaaccgatacccattagcaaggcacatgaacatatcttcggcatggtccttatgaacgactggtcggcacgtgatattcagaaatgggagtacgtcccgttgggaccttttctcgggaaatcgtttggaacgacggtttcgccttgggtggtcccaatggacgcattgatgccatttgctgtaccaaatcccaaacaagacccaagacctctgccctacctgtgtcatgatgagccttacacgttcgacattaacctgtccgtgaatcttaagggtgagggaatgtcgcaagcagccactatttgcaagtcgaatttcaagtatatgtactggactatgcttcagcaactgactcatcactcggtcaatgggtgtaacttgaggcccggtgaccttctggcatcgggcaccatcagcggtccagaaccagagaattttggatccatgcttgaactctcatggaaaggaactaagcccatcgatttgggtaacgggcagaccaggaagttccttctcgatggagatgaggtgattatcactggatactgtcagggtgatggttacagaatcgggtttgggcaatgtgccggcaaagtgttgcctgcgctgcttccatcc

SEQ ID NO: 11812 - DNA, 1257 bp, synthetic construct
  misc_feature 1..1257: note = source = /note="Description of Artificial Sequence: Synthetic coding sequence"
  source 1..1257: mol_type = other DNA
atgtcctttatacctgtcgcagaagacagcgactttccaatccataaccttccatacggcgtgttcagcacgcggggagacccccggccccgaataggcgttgccatcggtgatcagattcttgatctctccataatcaagcatctctttacagggcctgtcctcagcaagcaccaagatgtgtttaatcagcctaccctgaactcttttatgggtttagggcaggcagcctggaaggaggcgcgcgtgtttctccagaacctgctttccgtcagtcaagcccgcctacgcgacgataccgagctgaggaaatgtgcctttatctcccaggcaagcgccaccatgcatttgccagcaacaataggtgactacaccgatttttatagctctcggcaacatgcaacaaacgtgggcatcatgttcagggacaaggaaaacgctttaatgcccaactggctccatctgccagtggggtatcatggacgcgcctcttctgttgtggtgtcaggcacacccatccggcggccaatgggccagatgaagcccgacgattctaagccccccgtttatggcgcttgcaagctgctcgatatggaactggaaatggccttttttgtggggcctggaaataggttgggagaacctatacccatctccaaggcccacgagcacattttcggaatggtcttaatgaacgactggtccgccagggatattcagaagtgggagtatgtgcctttaggaccattcttagggaagagctttggaactaccgtgagcccatgggtggtgcctatggatgccttgatgccattcgcagtcccaaaccccaaacaggacccacggcccctcccctatctatgccacgatgagccctatacttttgatatcaatctgtcggtgaacctaaaaggggaaggcatgtcgcaggctgccaccatctgcaagtccaatttcaaatacatgtactggaccatgcttcagcagttgacgcaccactcggttaatggatgcaacctaaggcccggagacctgctggcctccggcactatctccggacctgagcctgagaatttcggctcgatgctggagctgagctggaagggtactaagcctatagacctgggtaatggtcagacccgcaagtttttgctcgatggagacgaggtgattatcaccggttattgtcagggtgacggctaccggatcggattcggtcaatgcgccgggaaggtgcttcctgccttgctgccttct

SEQ ID NO: 11813 - DNA, 1257 bp, synthetic construct
  misc_feature 1..1257: note = source = /note="Description of Artificial Sequence: Synthetic coding sequence"
  source 1..1257: mol_type = other DNA
atgagcttcatcccggtcgcggaggactccgacttccctatccacaacctgccttacggagtgttctcaacccggggtgacccgcgcccacgcatcggggtggcgatcggcgatcagatcctcgatctgtcgattatcaaacatctgttcacgggaccggtgctgagcaaacaccaagacgtgtttaatcagcctaccctcaactcgtttatgggacttgggcaagcggcttggaaggaagctcgggtctttctgcagaacctgctcagcgtctcacaggcccggctgagagacgacaccgagctgcgcaaatgcgccttcatctcccaggcatcggccacgatgcacctccctgctactatcggcgactacactgatttctacagctcccgccagcacgccactaatgtggggatcatgttcagagacaaggagaatgccctgatgccgaactggctgcatctgccggttggataccatggcagagcatccagcgtggttgtgtcgggcaccccaatccgccgcccgatggggcagatgaaaccggacgactcgaagccaccggtgtacggtgcctgcaagctgttggatatggaactcgaaatggcctttttcgtcggacccggaaatcgcctgggagaaccgatcccaatttcgaaagctcatgaacatatctttggcatggtgctgatgaacgactggagcgcacgcgatatccagaaatgggagtacgtgccactgggaccgttcctggggaaatccttcgggactactgtgtcaccgtgggtcgtgcccatggacgcgctgatgccgtttgcagtgccaaatccgaagcaagatccccgaccactcccgtacctgtgccacgatgagccgtacactttcgacatcaacctgtcggtcaaccttaagggcgagggaatgagccaagctgctactatctgcaagtcgaacttcaagtatatgtattggacgatgctccagcaactgacccaccacagcgtgaatggctgtaacctgcgaccgggtgatctgctcgcatctggaactatctccgggccggaaccagaaaacttcggctcgatgctggagctcagctggaagggaacgaagccaatcgatctggggaacggacaaacgcggaaattcctgttggatggagacgaggtgatcatcactggatactgtcaaggggatggctaccgaattggattcggacagtgcgcgggcaaggtgctcccggccttgctgccgagc

SEQ ID NO: 11814 - DNA, 1257 bp, synthetic construct
  misc_feature 1..1257: note = source = /note="Description of Artificial Sequence: Synthetic coding sequence"
  source 1..1257: mol_type = other DNA
atgtccttcataccagtcgctgaggactctgattttcccatccataacctaccttatggggtgttttcaactagaggggatccacggcctagaataggagtggccataggagatcagatcttggatctgtctatcatcaagcatctgtttacagggccagtgctttcaaaacatcaggatgtgttcaaccagcccacactcaattcattcatggggcttgggcaggcagcttggaaggaagcccgggtgtttctccagaatctcctctctgtgtcacaagcacgcctgcgggatgatacagaactccggaaatgcgccttcatctcccaggcctcagccactatgcatttaccagctactatcggagattacactgatttctattcttcccgtcagcatgctactaatgtggggatcatgtttagagataaagaaaacgcccttatgccaaactggctccacttgcctgtagggtaccacgggcgagcctccagtgtggtagtttcagggacacccatccgcagacctatgggacagatgaaaccagatgattctaagcctcccgtgtacggggcctgcaaactgctagatatggaactcgaaatggccttctttgtggggccagggaacagacttggagagcctatccccatctctaaagctcacgaacacatctttggaatggtactaatgaacgattggagtgccagagatatccagaaatgggaatatgtacctttagggcctttcctgggaaaaagtttcgggactacagtcagtccatgggtagtacctatggacgcacttatgcctttcgccgttcccaacccaaaacaggacccaaggcctttaccctacttatgccacgatgaaccatatacatttgatataaacctatcggtgaacctaaagggggaagggatgtctcaggccgctactatctgtaaatctaatttcaaatacatgtattggactatgctgcagcagcttactcatcatagtgtgaacgggtgtaatctgagaccaggagatctccttgcctctggaacaatttccgggcctgaaccagagaattttgggtcaatgcttgagctgagttggaaagggactaaaccaatcgatttgggaaacgggcagactaggaaattcctgctagacggagacgaagtcatcatcacagggtattgccagggggatgggtatagaatagggtttggacaatgcgccggaaaagtgctgccagctctcctcccctca

SEQ ID NO: 11815 - DNA, 1257 bp, synthetic construct
  misc_feature 1..1257: note = source = /note="Description of Artificial Sequence: Synthetic coding sequence"
  source 1..1257: mol_type = other DNA
atgtctttcatccctgtggcagaagattcggatttcccgattcacaatctcccttatggtgtgttttcaaccagaggcgaccctcgccccagaattggcgtagctatcggagatcaaatcttagatctttccatcattaagcatctctttacaggaccagtcctaagcaaacatcaggacgtgtttaaccagcctacactgaattctttcatgggccttgggcaggccgcatggaaggaggcgcgcgtttttttgcagaatcttctgtccgtgtcgcaggcccgattgagggatgatactgagctgcggaagtgcgccttcatttcacaggctagtgccactatgcacctccccgctaccattggtgactatactgatttctacagctctaggcagcacgcaaccaatgttggcataatgttccgtgacaaagagaacgcgcttatgcctaactggttgcacctgccggtaggctaccatggccgagcctcatcagttgtggtctctggcactcccatacgccggccaatgggacaaatgaaacctgacgactccaagcctcccgtctacggtgcctgcaaactgctggatatggagctggagatggcctttttcgtaggccctggaaacaggctgggggagccaatcccgataagcaaagcacatgagcatatattcgggatggttctcatgaacgactggagcgcgcgagacatccagaagtgggaatacgtaccgctcggaccttttttaggcaagagtttcggaaccaccgtgtcgccctgggtggtgccaatggatgccctcatgcccttcgccgtcccgaatccaaaacaagacccccggcctcttccctatctgtgtcatgacgaaccttatacattcgacatcaatctaagtgtgaatttaaagggcgagggaatgagtcaagccgctaccatttgcaaatcaaacttcaagtacatgtactggacgatgctccaacagctgactcatcactctgtgaatggatgtaatctgcggcctggagacctcctagcatcagggactatttctgggcccgagccagaaaacttcggatcaatgcttgagttgagctggaagggaacaaaacccatcgacctgggcaacggccagactaggaagttcctgctggatggggatgaggttatcattacaggttattgtcaaggggatggctataggataggatttggccaatgtgcagggaaagtgttgcctgcgctattgccctct

SEQ ID NO: 11816 - DNA, 1257 bp, synthetic construct
  misc_feature 1..1257: note = source = /note="Description of Artificial Sequence: Synthetic coding sequence"
  source 1..1257: mol_type = other DNA
atgagcttcatcccggtcgctgaggactcggacttccccatccataatctgccctacggagtattctcgactcgcggtgatccacggccccgcattggagtggcgatcggagatcaaatcctcgatttgtcgatcatcaagcacctgttcactggccctgtgctgtcgaagcatcaggatgtgttcaaccagccaactctgaattcgttcatgggcctgggacaggctgcgtggaaagaagcccgcgttttcctgcagaatctcctgtcggtgtcgcaagcacggctgcgggacgacaccgagctgcggaaatgtgcctttatctcgcaggcctcggcgaccatgcacctgccggccacgatcggagattacactgatttctactcttccagacagcacgcgaccaatgtgggaatcatgttccgcgataaggagaacgccctcatgcctaactggctccacctgccggtgggttaccatggaagggccagctcggtcgtggtcagcgggaccccgatcagacgtccgatgggccagatgaaaccggatgacagcaaaccaccggtgtacggagcttgcaaactcctcgacatggaacttgaaatggcgttcttcgtggggccaggaaaccggctgggcgaacccatccctatcagcaaggcacatgagcatatctttggtatggtgctcatgaatgattggagcgcccgcgacatccaaaagtgggaatacgtcccgcttgggcctttcctcggcaagtccttcggcacgactgtgtcaccatgggtggtcccgatggacgcccttatgccattcgccgtcccgaacccgaagcaggatccgcgcccgctcccatacctgtgtcacgacgaaccttacacttttgacatcaacctctcggtgaacctgaagggggagggaatgagccaggcagccactatctgtaagtcaaacttcaaatacatgtactggaccatgttgcaacagctgacccaccacagcgtcaacggatgcaaccttagaccgggagatctgctggcctccggaaccatctcagggccagagcccgaaaactttggatcgatgctggaactttcctggaagggaaccaaaccgatcgacctgggaaacggacagacccgcaaattcttgctggacggtgatgaggtcatcatcactggctactgccagggagatgggtacaggattgggttcggacagtgtgcaggtaaagtgctcccggctctgctgccctca

SEQ ID NO: 11817 - DNA, 1257 bp, synthetic construct
  misc_feature 1..1257: note = source = /note="Description of Artificial Sequence: Synthetic coding sequence"
  source 1..1257: mol_type = other DNA
atgagctttatccccgtggccgaggatagcgacttccccatccacaatttgccctacggagtatttagcactcgaggtgaccctcggccacgcataggggtggctatcggggaccagattcttgatctttctatcattaaacacctgttcacaggcccggttctcagcaaacatcaggatgtctttaaccagccaacactgaacagtttcatgggacttggacaggccgcttggaaagaagcgagggtctttctccaaaacttgctgagcgtttctcaggccagacttcgggacgacactgaattacgcaagtgcgctttcattagccaggcttccgctaccatgcacctgcctgcaactatcggggattatactgatttctactcaagccgtcaacatgctaccaacgtcggtataatgttcagagacaaagaaaatgctctgatgccaaactggctgcatctgcccgtcggctatcacggcagggccagttcggtggttgtgagcggcactccaatccggagaccaatggggcagatgaaacctgatgacagtaaaccaccagtatatggtgcttgcaagttgctggacatggaattggagatggcatttttcgttggccccggcaatcggctgggtgagcccatccctatcagtaaagcccacgagcacattttcgggatggtccttatgaacgactggagtgctcgtgacatccagaagtgggagtatgtccctttgggccctttccttggcaaaagcttcggcaccaccgtgtctccatgggtggttcctatggatgccctgatgccattcgctgtccccaacccgaagcaagacccacgcccactgccatacttgtgtcacgacgaaccttatacctttgatatcaacctctctgtgaacctcaaaggggaaggcatgtcccaagcagcgactatatgcaagagcaactttaaatacatgtattggactatgctgcagcagttaacccaccatagcgtcaatgggtgtaacctgaggcctggagacttgcttgcatcaggcactatctccggccctgaacctgagaattttggatcaatgctggagctgtcatggaagggaactaaacctattgacctcggaaacggacaaacaaggaaattcctcctggacggagatgaggtgatcataactggctattgccagggagatggatatagaataggttttggacagtgcgctggaaaagtgctccccgcgcttctcccctca

SEQ ID NO: 11818 - DNA, 1257 bp, synthetic construct
  misc_feature 1..1257: note = source = /note="Description of Artificial Sequence: Synthetic coding sequence"
  source 1..1257: mol_type = other DNA
atgtcgtttataccggttgcggaagattcggattttccgatacataatctaccgtatggtgtattttcgacgcgtggtgatccgcgaccgcgtataggtgtagcgataggtgatcaaatactagatctatcgataataaaacatttatttacgggtccggtattatcgaaacatcaagatgtatttaatcaaccgacgctaaattcgtttatgggtctaggtcaagcggcgtggaaagaagcgcgtgtatttttacaaaatctattatcggtttcgcaagcgcgattacgtgatgatacggaattacgaaaatgtgcgtttatatcgcaagcgtcggcgacgatgcatttaccggcgacgataggtgattatacggatttttattcgtcgcgtcaacatgcgacgaatgttggtataatgtttcgtgataaagaaaatgcgttaatgccgaattggctacatttaccggttggttatcatggtcgtgcgtcgtcggttgtagtttcgggtacgccgatacgtcgtccgatgggtcaaatgaaaccggatgattcgaaaccgccggtatatggtgcgtgtaaattattagatatggaattagaaatggcgttttttgtaggtccgggtaatcgtttaggtgaaccgataccgatatcgaaagcgcatgaacatatatttggtatggttctaatgaatgattggtcggcgcgtgatatacaaaaatgggaatatgtaccgctaggtccgtttttaggtaaatcgtttggtacgacggtttcgccgtgggttgtaccgatggatgcgttaatgccgtttgcggttccgaatccgaaacaagatccgcgaccgctaccgtatttatgtcatgatgaaccgtatacgtttgatataaatttatcggtaaatctaaaaggtgaaggtatgtcgcaagcggcgacgatatgtaaatcgaattttaaatatatgtattggacgatgctacaacaattaacgcatcattcggtaaatggttgtaatttacgaccgggtgatttactagcgtcgggtacgatatcgggtccggaaccggaaaattttggttcgatgttagaattatcgtggaaaggtacgaaaccgatagatctaggtaatggtcaaacgcgtaaatttttattagatggtgatgaagttataataacgggttattgtcaaggtgatggttatcgaataggttttggtcaatgtgcgggtaaagttttaccggcgttattaccgtcg

SEQ ID NO: 11819 - DNA, 1257 bp, synthetic construct
  misc_feature 1..1257: note = source = /note="Description of Artificial Sequence: Synthetic coding sequence"
  source 1..1257: mol_type = other DNA
atgagcttcattccggtggccgaggattctgacttccctatccacaatttgccctacggagtcttttctacccgcggtgaccctcgcccccgaattggggtagccatcggtgaccagattctagacctcagcattatcaaacacctttttacagggcccgtgctaagcaagcatcaggacgtgtttaatcagcccaccctgaacagtttcatgggcctgggacaggcagcatggaaagaggcccgagtgttcctgcagaatctgctgagcgtcagccaggcaaggttgcgggacgacacagagctgcgcaagtgcgccttcatttcccaggcaagtgcaaccatgcacctgccagccactattggcgactacacagatttttacagtagccggcagcacgcaaccaacgtgggaattatgttccgggataaggaaaatgcgctcatgcccaattggctgcacctgcccgtcgggtatcacgggcgggcctcgtccgttgttgtctccggaactcccatccggcgccccatggggcagatgaagccagacgactcaaagcctcctgtgtacggtgcctgcaaactgctcgatatggagctcgagatggcctttttcgtgggtcctggaaacagactcggagagcctataccaataagcaaggcacacgaacatatttttggtatggtccttatgaatgactggagcgcacgagacatccagaagtgggagtacgtccctctgggtccattcctcgggaagtccttcggtactactgtgtccccttgggtggtacctatggacgccctgatgcccttcgcagtccctaatccaaagcaggacccaaggcccctaccctacctttgccacgacgaaccatacacatttgatattaacttgtcagtgaatctcaagggggagggtatgtcacaggctgcaaccatatgcaaatcaaactttaagtatatgtattggacaatgctgcagcagctgactcaccatagcgttaatgggtgtaatctcagacctggcgatctgttggcaagtgggactatctctggacctgaaccagagaattttggctcaatgctggaactatcttggaaggggactaagccgatagacttgggcaacgggcagactcggaaattcttactggacggagacgaagtgatcattacagggtactgtcagggtgatggctatcgcataggttttgggcagtgtgccggaaaggtgctacccgctctcttaccatca

SEQ ID NO: 11820 - DNA, 1257 bp, synthetic construct
  misc_feature 1..1257: note = source = /note="Description of Artificial Sequence: Synthetic coding sequence"
  source 1..1257: mol_type = other DNA
atgtctttcatccctgtggccgaggattcggatttcccgattcacaatctgccatacggcgtcttcagcaccagaggagatccaaggcccagaataggcgtggcgattggcgatcagattctcgacctcagtataattaagcatctttttactggtccggttctatctaagcatcaagatgttttcaaccagccgacactgaactctttcatgggtctgggccaggcggcgtggaaagaggcaagagtgttccttcagaacctactcagtgtgtcgcaggccagactgcgagacgataccgagctgcgtaagtgcgccttcatcagtcaggcatcagcaacgatgcatctgcctgccacaattggggattacaccgatttttactcttccaggcagcacgccaccaatgtgggtataatgtttcgcgacaaagagaatgctctgatgccaaactggctccatctgcctgtagggtaccatggcagggcctcatctgtcgtcgtgtcgggaacccctattcgccgacctatgggccaaatgaagcccgacgacagcaagccacccgtgtacggagcatgcaagttgctggatatggaacttgaaatggcattcttcgtaggcccggggaatagactcggcgagcctatcccgatcagcaaagcacatgagcatatttttggtatggtccttatgaatgactggagtgccagagatattcagaagtgggagtatgtgccactgggtccttttttgggaaaatctttcggcacaaccgtgtccccatgggttgtcccaatggacgctcttatgccatttgccgtgcctaacccgaagcaggatccaaggcccctgccatacttatgtcacgatgaaccgtacactttcgatattaacctgtccgtcaatctaaagggcgaggggatgtctcaggccgccacgatttgcaaatccaacttcaagtatatgtactggaccatgttgcagcaactgacacatcactctgtcaatgggtgtaacctcaggcccggcgatcttctcgcgtcgggcacgatttccgggcccgagccagaaaactttggcagcatgctcgagctatcttggaaggggactaaaccaattgatctcgggaacgggcagacgcggaaattcctacttgatggggatgaggtaattataacaggctactgtcagggcgatgggtaccgtattggcttcggacaatgtgctgggaaagtcttgcccgcgctgttgccttct

SEQ ID NO: 11821 - DNA, 1257 bp, synthetic construct
  misc_feature 1..1257: note = source = /note="Description of Artificial Sequence: Synthetic coding sequence"
  source 1..1257: mol_type = other DNA
atgtctttcatacctgtggctgaagactccgacttccccatacacaatcttccctatggggtgttttcaacaagaggggatcctagacctcgcatcggagtagctatcggggatcagattcttgatctgtcaattatcaaacatctcttcacagggccagtgctcagtaaacatcaagatgtcttcaatcagcctactctaaactctttcatgggattaggacaggcagcttggaaagaagctcgggtgttcctccagaatctactttccgtgtctcaggccagactccgggatgatacagaattacggaaatgtgccttcatcagtcaggcctccgcgacaatgcatctccccgccacaataggggattatacagatttctattcatctagacagcacgccacaaatgtagggataatgttccgcgacaaggaaaacgctctaatgcctaactggttacatctgccagtggggtatcacgggcgggctagttctgttgtggtatcagggacaccaattagaaggcccatgggacagatgaaacctgacgattctaaaccccccgtatatggagcatgcaaactactagacatggagctggaaatggcattttttgttgggcctgggaatcgccttggagaacccattcccatcagtaaggcacacgaacacattttcgggatggtcctgatgaacgattggagtgctagggacatacagaaatgggaatatgtccctcttggaccctttctagggaaatcctttggaactacagtgtccccctgggtggtgcccatggatgctctaatgcccttcgctgtgccaaacccaaaacaggatccacggcctctcccctatctgtgccatgatgaaccttatacattcgacatcaacttgtctgtgaacctcaaaggggaagggatgtctcaagccgctactatatgcaaatccaacttcaaatatatgtattggactatgctacagcagctcacacaccattccgtcaacggatgtaacttacgccctggggatctgttagctagtggaacaatttccgggcccgaacctgaaaactttggatccatgcttgagctttcatggaaagggacaaaacccatagatctcgggaacgggcagactagaaaattcttgctggacggagatgaagtaatcataactgggtattgtcagggagacggataccggatagggtttgggcagtgtgctgggaaagtgttacccgctttgctaccttct

SEQ ID NO: 11822 - DNA, 1257 bp, synthetic construct
  misc_feature 1..1257: note = source = /note="Description of Artificial Sequence: Synthetic coding sequence"
  source 1..1257: mol_type = other DNA
atgtccttcattcccgtcgccgaagattccgactttccaattcataacctgccttatggagtttttagcactcgaggtgacccgcggccccgcattggtgttgcgatcggcgatcagattttggatctcagcatcatcaagcacctcttcaccgggccagtcctctctaagcaccaggacgtgttcaaccagcccactctgaactctttcatgggactgggacaggccgcttggaaggaggccagggtgttcttgcagaatctgctttcagttagccaggccaggctgcgggatgataccgaacttagaaagtgtgccttcatttcccaggctagcgctacaatgcacctccctgctactataggtgactatacagatttctactcaagccgccaacacgccacgaacgtcggaatcatgtttcgcgataaggagaatgccctgatgcccaattggttgcacctccctgtcgggtaccatggcagagccagttctgtggtagtgagcgggacacccattcggaggcccatgggccagatgaagcctgacgattcaaagcctcccgtatacggggcctgcaaactgctggatatggagttggaaatggccttcttcgtgggcccaggcaacagactcggagaaccaattcccatatccaaagcgcatgagcatatttttggtatggtgcttatgaatgactggtctgcccgggacatacagaaatgggaatacgttccccttggaccgtttcttggaaaaagcttcgggacaactgtgagcccgtgggtcgttccaatggacgcccttatgccattcgcagttcctaacccaaagcaggatccccggccactaccctacctgtgccacgacgagccctacaccttcgatattaatttgagtgtgaacttgaaaggcgagggtatgagtcaggcagccactatttgcaagtccaacttcaaatacatgtactggactatgcttcaacagctcactcaccactccgtgaatggatgtaacttgcgccccggggatctacttgccagtggcacgatatcgggccctgaacccgagaactttggcagcatgctcgaattaagctggaagggcaccaagccgatagaccttggcaatgggcaaacccgcaagtttttgttggatggtgacgaggttataattacagggtattgtcagggtgacggatacaggatcggattcggtcaatgcgcaggtaaggttctccccgcgctgctaccatct

SEQ ID NO: 11823 - DNA, 1257 bp, synthetic construct
  misc_feature 1..1257: note = source = /note="Description of Artificial Sequence: Synthetic coding sequence"
  source 1..1257: mol_type = other DNA
atgtcttttatcccggtcgccgaggactccgactttccgatccacaacctgccatacggcgtcttttccactaggggcgatcctcgcccccgcattggtgtagccatcggcgatcagatcctggacctttccattatcaagcaccttttcaccggccccgttctttctaagcatcaggatgtgttcaatcaacctactctgaactccttcatgggtttgggtcaggccgcctggaaggaggctagggtgtttttgcagaacctcctgtccgtttcccaggctcgcctccgcgacgacaccgagctccgtaaatgtgcgtttatctcgcaggcatctgcgaccatgcacctgcccgctaccatcggggactacaccgatttctactcttctcgccaacacgctactaacgtcggcatcatgttcagagacaaagagaacgccctgatgcccaactggcttcacctccctgtgggttaccacggacgcgcgagttccgtggtcgtgtccgggacccccattaggcgacccatgggtcagatgaagcctgatgactccaagccccccgtttacggagcttgtaagctccttgatatggaactggaaatggctttcttcgtgggtcccgggaatcgtctcggagaaccgatccctatctcaaaggcgcacgagcacattttcggcatggtactgatgaacgactggtccgctagggacattcaaaagtgggagtacgtgccgctcgggcccttcctgggtaaatcgttcggcacgaccgtctctccttgggtcgtccctatggacgctctcatgccttttgcagtgcctaaccccaagcaggatccacgtccgcttccctacctgtgccacgacgagccatatacatttgacatcaatctctcggtcaatttgaagggtgagggaatgagccaggcagccaccatttgcaagtctaacttcaaatatatgtattggactatgttgcagcagttgacccaccatagcgttaacggctgtaatctccgacccggcgacctcctcgcttctggcacaatttccggaccagagcccgagaatttcggctccatgttggagctttcatggaaaggcacgaagcccatcgacctgggaaacggtcagacccgcaagttcctactcgatggtgacgaggtgatcatcacgggctactgccagggtgacggctaccgtatcggttttggtcagtgcgccggcaaggtgctgcccgccctgttaccttcc

SEQ ID NO: 11824 - DNA, 1257 bp, synthetic construct
  misc_feature 1..1257: note = source = /note="Description of Artificial Sequence: Synthetic coding sequence"
  source 1..1257: mol_type = other DNA
atgagttttatccctgtggctgaggactcagactttccaattcataacctcccctacggcgtgtttagtacaaggggagaccctcgaccacggattggagtggccatcggtgatcagattctggacctgtccatcatcaaacacctgtttacaggccctgtgttaagcaaacatcaggatgtgtttaatcaacccaccttgaactctttcatggggctaggtcaggccgcttggaaggaagcacgggtgtttctccagaacctcctctctgtaagtcaggccaggcttcgcgacgatacagaacttaggaagtgcgcattcattagccaggcctctgctacaatgcaccttccagcaacaataggtgactatacagatttctactcctccaggcaacatgcaacaaacgtcggtatcatgtttagggacaaagagaacgctctcatgcccaattggctgcacttgcctgtcggatatcatggccgggccagctccgtggtcgtgagcggaacccccatccgcaggccgatgggtcaaatgaagcccgacgattctaaacctccggtttatggcgcgtgcaagctccttgacatggagctagaaatggcttttttcgtgggaccgggtaatagattgggcgagcccatcccgatcagtaaggcccacgaacacatattcggaatggtactgatgaacgattggagtgcgcgagacattcaaaagtgggagtatgtgcctcttggccccttcctgggcaagtcctttggcactacagtcagtccctgggtggttcccatggatgcactcatgcctttcgctgtccctaacccaaagcaagatccccggcccctgccttatctgtgccatgatgagccatatacattcgatattaaccttagtgtaaatctcaaaggcgaggggatgtcgcaagctgcaaccatttgcaagagtaacttcaagtatatgtactggactatgttgcagcagctcacacaccactcagtcaatgggtgtaacctgaggccgggcgatctgctggctagtggaacaatctcaggcccagagcctgaaaacttcgggagcatgctggaacttagctggaaaggcactaaacccattgacctggggaatggccaaacaaggaaatttcttctcgacggagatgaagtgatcattactgggtattgccagggagacggctacaggatcggatttggccaatgcgccggcaaagtcctgcccgccttgctaccatct

SEQ ID NO: 11825 - DNA, 1257 bp, synthetic construct
  misc_feature 1..1257: note = source = /note="Description of Artificial Sequence: Synthetic coding sequence"
  source 1..1257: mol_type = other DNA
atgtcttttatccccgtcgctgaggactctgatttcccgattcataacctcccatacggagtattcagcacaagaggcgatcccaggccaaggataggtgtcgctattggcgatcaaatcttggatctgagtatcatcaagcacctatttacaggccctgttttgtccaagcaccaagacgtgtttaaccagccgaccctgaatagtttcatgggcctggggcaggccgcatggaaggaggccagggtgttcctgcagaaccttctctctgtttcgcaggcacgactgcgtgatgatacagagttgcgaaaatgcgcctttatctcgcaggcctcagccacgatgcatcttcccgccactattggtgattacacggatttctattcatccagacaacatgcgactaacgtgggtataatgtttagagataaggagaacgccttaatgcctaactggctgcacctgcctgtagggtaccacggtcgcgcgtcctctgtcgtggtatcagggacaccgatccgaagacccatgggacagatgaagcctgacgatagtaaaccacctgtctatggggcctgcaaactcttggacatggaactggagatggccttttttgtcggacccggcaatcggctcggggaacccattcccatttccaaagctcatgagcacattttcggaatggtccttatgaacgactggagcgccagggatatccagaaatgggagtacgtgccacttggtcccttcctgggaaagagctttgggacaactgtcagtccttgggtcgtacccatggatgcattgatgcctttcgctgtccctaaccccaaacaggatcctcgaccactgccctatctttgtcatgacgagccatacactttcgatatcaatctcagcgttaaccttaaaggcgaggggatgtcccaagctgccactatttgtaaatccaactttaaatatatgtactggactatgctgcagcagctgacgcatcattctgtgaatggatgcaatcttcgcccaggcgatctcctggctagcggcaccatctcagggcctgagccagagaacttcggcagtatgcttgaactgagttggaaaggtaccaaaccaattgacctaggcaacggtcagacacgtaagtttcttcttgatggcgacgaggtgatcatcacaggctattgccagggagatggttataggatcggattcggccagtgtgctggaaaagtgctccctgcccttctaccgtcc

SEQ ID NO: 11826 - DNA, 1257 bp, synthetic construct
  misc_feature 1..1257: note = source = /note="Description of Artificial Sequence: Synthetic coding sequence"
  source 1..1257: mol_type = other DNA
atgtcattcatccctgtggcagaggatagcgacttccccatccataatttgccttacggcgtgttctctacgcgcggggaccccaggcccagaattggtgtggccatcggcgaccagattttggacttgtccatcatcaagcatctgttcactggaccagtcttatcaaaacatcaggatgtattcaatcagccaacactgaatagtttcatggggctaggacaggcggcatggaaggaagcccgcgtgttccttcagaaccttctctctgtcagccaggctcgtcttcgggacgataccgagctacgaaaatgcgcctttatctctcaggcaagtgccactatgcatttgcccgccaccattggcgactatacagacttctacagcagcaggcagcatgcgaccaatgttgggatcatgttcagagacaaggaaaatgccctgatgccaaattggctgcatctgcctgtggggtatcatggtagggcctccagcgtggtggtgtcaggcacccccatcagacgacccatgggacagatgaagcccgacgacagcaaacccccagtgtatggagcttgcaagctgctcgatatggaactggagatggccttcttcgttggaccaggcaatcgcctgggtgaacccataccaatttccaaagcccatgagcacattttcggtatggtcctaatgaacgattggtctgcacgcgatattcaaaaatgggagtacgtgcctctgggcccctttctgggtaagagctttggtacaacagtcagtccatgggtggtccctatggatgccttgatgccttttgccgtccccaacccaaagcaggacccacgccccctgccctacttatgccatgatgagccatacacgtttgacatcaacctgtcagtaaacttgaaaggtgaaggcatgagtcaggctgcaacgatctgtaagagcaattttaaatacatgtactggaccatgctccagcagctcacccatcattctgtcaacggctgcaacctccgtcctggcgatctcctggctagcggcacaatctcaggccccgaacccgagaacttcggctcaatgctggagctatcctggaagggcaccaaacccatcgatctgggcaatgggcaaactaggaaattccttctcgatggggacgaggtgatcatcacgggatactgccaaggcgacggataccgcattgggtttggccagtgtgctggaaaggtgcttcccgccctcctgccgtcc

SEQ ID NO: 11827 - DNA, 1257 bp, synthetic construct
  misc_feature 1..1257: note = source = /note="Description of Artificial Sequence: Synthetic coding sequence"
  source 1..1257: mol_type = other DNA
atgtcttttatcccggtggccgaagacagtgacttccctattcataatctgccctacggggtgttttccactcgcggcgatccccgcccaagaatcggagtggctatcggggaccaaatcctggatctctcaatcattaagcacctgttcactgggcccgtcctgtccaagcatcaggacgtgttcaaccagcccaccctcaacagcttcatgggtttgggccaggcggcttggaaggaagcccgcgtgttcctgcagaatctactcagtgtctctcaggctaggctgagggacgatactgagctgaggaaatgcgccttcatctcccaggcctccgccactatgcacctgccagccacaatcggcgactacacagatttttattccagccggcaacacgcaacaaatgtggggataatgtttcgggataaggaaaacgcacttatgccgaattggctgcacctgcccgtagggtatcatggcagggcatccagcgtggtggtcagcgggaccccgatcaggagacccatgggccagatgaagcctgatgactcaaaacccccagtttatggggcctgcaagctgctagacatggaactcgagatggcattcttcgtcgggccgggaaaccgtcttggtgagccaatacctatctctaaggctcacgagcatatattcggtatggtcttgatgaatgattggagcgcaagagacattcagaagtgggagtacgtgccccttgggccatttctgggcaagtcatttggaactacagtgtctccttgggtcgtgcctatggacgcactgatgccattcgcggtgcctaaccccaaacaagacccacgcccccttccttacctgtgtcacgacgagccttatacctttgatatcaatttgagtgtgaatctgaaaggagagggcatgtcacaggctgcgacgatctgcaagtcaaacttcaagtacatgtattggaccatgctccaacagctcacccaccatagtgtcaacggttgcaaccttaggccaggggacctccttgcgtctgggactatttccggacctgagccggagaattttggatcaatgctggaactgtcctggaagggcacaaagcctattgatctcggaaacggtcaaacacggaaattcttattggatggtgacgaagtcatcatcacagggtattgccaaggagatggttacagaattgggtttgggcaatgtgctggaaaggtcctgcccgcattactgcccagc

SEQ ID NO: 11828 - DNA, 1257 bp, synthetic construct
  misc_feature 1..1257: note = source = /note="Description of Artificial Sequence: Synthetic coding sequence"
  source 1..1257: mol_type = other DNA
atgtcctttattccggtggctgaagatagcgacttccctattcataacctcccctatggcgtattctcaactcggggagatccccgcccccgcataggtgtagctataggcgaccagatactcgacctgtccattatcaaacatctgtttactggccctgtcctgagtaagcaccaggatgtatttaaccaacccacactcaattccttcatggggttagggcaggccgcctggaaagaggcacgggtttttctacagaacctgctgtccgtctctcaggccaggcttcgtgacgacacggaactccgcaagtgtgcatttattagccaagccagtgccaccatgcaccttccagccaccattggcgattacaccgacttctattcatcaagacagcacgctaccaacgtgggaatcatgtttagagacaaggagaacgctctaatgcccaactggctccatctccctgtcggctatcacggcagagctagctccgtggtagtgagtggcactccaatacggagacctatgggacagatgaaacccgatgactcgaaaccaccagtctacggagcctgcaagctgctagatatggaacttgagatggccttcttcgtggggcctggcaataggctgggggagccaatcccaatcagcaaagcccacgaacatatatttggaatggtgttgatgaacgattggagcgctcgagatatccagaagtgggaatatgtaccactcgggccttttctcggcaagtcatttggcacaaccgtctccccatgggtggtccccatggatgctcttatgccatttgctgttcccaaccccaaacaggatcctagaccacttccctatttatgccacgacgagccctacacattcgatattaacttaagcgtgaacctgaaaggtgaaggtatgtcccaggctgccacaatttgcaagtccaatttcaagtatatgtattggaccatgctgcagcagctgacccaccactctgtgaatgggtgtaacctgcgccccggggatctgctagcttccgggacgatctccggacctgagcctgaaaactttggatcaatgctggaactctcatggaagggaaccaagcccatagatctgggaaacggacagacgcgaaagttcctgttagacggcgatgaggtgattattacgggatattgtcagggagatgggtacagaataggtttcggccagtgtgccggcaaagtgctccccgccctgctgccaagt

SEQ ID NO: 11829 - DNA, 1257 bp, synthetic construct
  misc_feature 1..1257: note = source = /note="Description of Artificial Sequence: Synthetic coding sequence"
  source 1..1257: mol_type = other DNA
atgagtttcatcccggtcgcggaggacagtgattttcccatccataacctcccttacggcgtattctccacgcgaggggatccgcgaccgcgaatcggagttgccatcggcgatcagatccttgacttgtctatcattaagcatctgttcactggacccgtcctgtccaagcaccaggatgtctttaaccaacctacactaaattcgttcatgggtctcggacaagcggcctggaaagaggcacgtgtattcctccaaaacctgctctccgtgtcccaggcccggctccgtgacgacactgagctgaggaagtgtgccttcatctcccaggcctctgccaccatgcatctgcctgctaccatcggtgattatactgacttttactcatctcgacaacacgcaaccaatgttggtataatgtttagagataaggagaacgccctgatgcctaactggttgcacttgcctgtggggtatcatggccgggctagcagtgtcgtcgttagcggaacgcctattcgcagaccaatgggtcaaatgaaacctgatgattctaagccgcctgtctacggtgcttgcaagttgttagatatggagttggagatggccttctttgttgggcctggaaaccgcctcggggagcctatccctatttcaaaggctcacgaacatatttttggtatggtacttatgaatgactggtccgcccgagacatccagaaatgggagtatgttcccttaggcccttttctaggcaaatcattcggtacaacggtctcaccctgggtcgtccctatggatgctcttatgccttttgcagtgccgaaccctaaacaagatccgcggccactcccgtacctctgtcatgacgaaccatacacgttcgatatcaacctctccgtcaacctcaaaggcgagggaatgtcgcaggcggccacgatctgtaaatccaactttaagtacatgtactggacgatgctccagcaactaacccaccatagcgtaaacggatgcaatcttcgtcccggcgatttgttggcgagcggtactatatcaggccccgaacctgaaaatttcggttcaatgttggagttgagctggaagggaactaaaccaatagatcttggtaacggccaaactcgcaagttcttgctagacggggatgaggtgatcattaccggatactgccaaggagatggatataggatcgggtttggacagtgtgccggcaaggtccttccagcccttttaccttct

SEQ ID NO: 11830 - DNA, 1257 bp, synthetic construct
  misc_feature 1..1257: note = source = /note="Description of Artificial Sequence: Synthetic coding sequence"
  source 1..1257: mol_type = other DNA
atgagttttatacccgttgcagaagattcagatttccctattcataacttgccatacggtgtttttagtaccaggggggatccacgtccaaggattggggtggcaatcggcgaccagatcctcgatttgtctataattaaacatctttttaccggaccggtcttgtcaaagcaccaagatgtcttcaatcaacccactcttaacagcttcatgggcctcgggcaggctgcctggaaggaagcccgggtattcttacaaaaccttctctccgtctcccaggctcgtttacgtgatgatacggaactccgaaaatgtgcatttatcagtcaagcgtcagcaactatgcatctacctgctaccatcggtgactataccgacttctattcttcccgacaacacgcaacaaacgtgggaatcatgttccgggataaggaaaatgcattgatgccaaactggcttcatcttccagtgggttaccatggcagagctagttccgttgtggtgtcgggtactccgataaggaggccaatgggacagatgaagcctgacgacagtaaaccaccagtgtacggagcatgtaaactcctcgatatggaattggaaatggccttcttcgttggaccggggaatagattaggtgaaccaataccgatttctaaagcccacgagcatattttcggtatggtgttaatgaatgattggtccgcacgagacatccagaaatgggagtacgttccattgggtccgttccttggtaaatctttcggtactaccgtgtcgccatgggttgtccccatggatgcacttatgccattcgcggtccccaatccgaaacaagatcctcgtccgttgccatacttgtgtcatgacgaaccttatactttcgatattaatttgtcagtcaatctcaaaggtgagggaatgtctcaggctgctactatctgcaagtccaattttaagtacatgtattggactatgctccagcagctcactcatcactcagttaatggatgtaatttgaggcccggagatttgctcgctagtgggactatatcaggtcctgagcctgagaacttcgggagtatgttagagttgtcttggaagggcactaaacctattgatttgggaaatggacagactcggaaattcttgttggatggtgacgaggtcatcattactggttattgtcaaggcgatggttatagaataggattcggacaatgcgctggtaaagtcttgcctgcactccttccttcg

SEQ ID NO: 11831 - DNA, 1257 bp, synthetic construct
  misc_feature 1..1257: note = source = /note="Description of Artificial Sequence: Synthetic coding sequence"
  source 1..1257: mol_type = other DNA
atgtcctttatccctgtggcggaggacagtgactttcccattcacaatctgccctacggagtgttctctactaggggcgatccaaggccacgaatcggggtggcgattggcgaccagatcctcgacctgtctatcatcaagcatttgttcacggggccggtgctgtctaagcaccaggatgtgttcaaccagcctactctgaatagtttcatggggctggggcaggccgcgtggaaggaggcacgcgtgttcctgcagaatctgctcagtgtttctcaggcccgcctgcgcgatgatacagagcttcgcaagtgtgcattcattagccaggcctctgcgaccatgcatctccctgcaactattggtgactacaccgacttttactcttctaggcaacacgccaccaacgttggtattatgtttcgggacaaggaaaatgctctgatgcctaattggttgcaccttccagtcggctaccacggcagagccagcagtgtggtagtatcaggaactccaattaggcgccctatgggtcagatgaaaccagacgactctaaaccgccagtgtatggggcttgcaaactgcttgacatggaattggagatggccttcttcgtgggacctgggaataggctgggcgagcctattcccatatccaaggctcatgagcacatctttggaatggtccttatgaacgattggagcgctagagacatccagaaatgggaatacgtccctttgggtccgttcttgggtaagtcatttggtacaaccgtcagcccgtgggtggttccaatggacgccctcatgccatttgctgtgcctaatcccaaacaggatcctcgccctctgccgtacctgtgtcacgacgagccatacacgttcgatatcaacctgagtgtaaacctcaagggagagggaatgtcccaggcagccacgatctgcaagtctaactttaaatacatgtactggacaatgcttcagcagttgactcaccatagtgtaaacggctgcaaccttagacctggagatctgctggcctccggcacaatcagcggtccggagccggagaacttcgggtcaatgctcgaactgtcttggaagggcacaaagcccatcgatttgggaaatggccaaacccgaaagttcttgctggacggagacgaggtgattatcaccggatactgccagggggacggataccggataggcttcggtcaatgtgccggcaaggtcctcccggcattgctgcccagc

SEQ ID NO: 11832 - DNA, 1257 bp, synthetic construct
  misc_feature 1..1257: note = source = /note="Description of Artificial Sequence: Synthetic coding sequence"
  source 1..1257: mol_type = other DNA
atgtctttcattcccgttgccgaagactctgatttccccatccacaatttgccttacggcgtcttctcaaccaggggagacccccgtcctagaataggcgtggcaatcggtgaccagatccttgacctgtccattattaaacacttgtttactggtccagtgttgtcaaagcaccaagatgtttttaaccaacccaccctgaactctttcatgggtctgggacaggccgcctggaaggaagccagggtttttcttcaaaacctgctctccgtgtctcaggctcgtctgcgcgacgacacagaactcaggaagtgtgcattcatatcacaggcatctgctaccatgcacctgcccgccaccattggagattacacagacttttacagctcacgccagcacgctactaacgtaggcattatgttccgtgacaaggaaaatgctctcatgcctaactggttgcatttgcccgtgggctatcacggcagggcttctagcgtggtcgtgagcggtacacctataaggcgccctatgggacagatgaagcccgatgactccaagccccctgtgtatggtgcttgcaagctcctggatatggagctggagatggccttctttgtaggtccaggaaatcgcctgggagagccaatcccaatctctaaggctcacgagcatatcttcggtatggtgctgatgaacgattggtccgcacgtgacattcaaaagtgggagtacgtccctttgggccctttccttggcaagagctttggcaccaccgtctccccatgggtggttccaatggacgccctgatgccatttgctgtgcccaatcccaagcaggacccccgtcccctgccatatctgtgccatgacgagccatatactttcgatattaatttgtccgtgaacttgaaaggagagggtatgagccaagccgctactatctgcaagagcaatttcaagtacatgtattggacaatgctgcaacagctcactcatcacagtgtcaatggctgcaacctccgccccggagacctcctggcctctggtacaatctctggtcctgagccagagaactttggtagcatgctcgaattgtcttggaagggcaccaaaccaatcgatctgggcaacggccaaacaagaaaatttctgctggacggagatgaggttatcatcaccggctattgtcagggtgacggatataggataggatttggtcagtgcgccggcaaggtcctgcctgctctgcttccaagc

SEQ ID NO: 11833 - DNA, 1257 bp, synthetic construct
  misc_feature 1..1257: note = source = /note="Description of Artificial Sequence: Synthetic coding sequence"
  source 1..1257: mol_type = other DNA
atgtcttttatccccgtcgctgaggattccgattttcctatacataatctaccatacggcgtcttctccactaggggcgatccgaggccacgtattggcgttgccatcggcgatcagatcctcgacctatcgatcatcaagcatctgttcaccggcccagttctctcgaagcaccaggatgtgtttaatcaaccgacgttgaattcatttatgggactgggccaggccgcctggaaggaggctagagtctttctgcagaatcttctgagcgtgagccaggctcgacttcgagacgatacggagcttcgaaaatgcgcttttatcagccaggcgtccgccacgatgcatctgccggcaaccatcggggactatacagatttctacagttctcgtcagcacgccaccaacgtaggcatcatgttccgggacaaagaaaacgcgctgatgcccaactggctgcacttaccggttggataccacggtagggcaagtagtgtcgtggtgtcaggcacgccaatacggcgccctatgggacaaatgaagcctgatgatagcaaaccgcccgtttatggcgcatgcaagctgctggatatggagcttgagatggccttcttcgtgggacccggtaatagactaggtgaacctatccctatcagtaaagcacatgaacacatcttcgggatggtactcatgaacgattggtccgccagagatatccagaagtgggaatatgtgcccctgggtccgttcctgggaaaaagcttcggcacgacagtgagtccctgggtggtgcctatggatgctcttatgccattcgccgttccaaaccctaagcaagatccacgaccgctgccgtacctctgccacgacgagccctacacgtttgatattaacctgtcggtgaatctgaagggagaaggtatgagtcaggctgctaccatatgtaaatccaacttcaaatatatgtattggacgatgctacaacaactcacgcaccactccgtcaatggttgtaatctgagacccggtgacctgctagcatcaggcactataagcggtcctgagcctgagaatttcggctccatgctggagttgagctggaaggggaccaagcctatagatctgggcaacggtcagaccaggaagttcttgctcgacggtgatgaggtcattattaccggctactgccagggcgacggttatcgtattggctttggtcagtgcgcaggcaaggtgctccccgctctgttgccatca

SEQ ID NO: 11834 - DNA, 1257 bp, synthetic construct
  misc_feature 1..1257: note = source = /note="Description of Artificial Sequence: Synthetic coding sequence"
  source 1..1257: mol_type = other DNA
atgtctttcataccagtggccgaagattcagactttcctattcataatctgccatatggtgtgttctccactcgaggcgatcctagaccacgcattggtgtagctatcggtgatcaaatcctggacttgagcattatcaagcatctgttcaccgggcccgtcctcagcaaacatcaggatgttttcaaccaacccacactgaactcattcatggggctgggacaggccgcttggaaggaagcccgcgttttcctgcagaatttgctgtccgtttcacaggctcggctcagagacgacacagagctgaggaagtgcgcttttatcagccaagcaagcgcaaccatgcacctccctgccaccatcggggactacactgatttctactcgagtcgtcagcacgcaacaaacgttggaatcatgttccgggataaagaaaacgcccttatgccaaactggctacatttgcctgtgggatatcatggcagagccagttctgtggtagtttccgggacacctattcgacgacctatgggccagatgaagcctgatgattccaagcctccggtctatggcgcatgtaagctcttagatatggagctcgaaatggcctttttcgtggggccggggaaccgcctcggtgagccaatcccaatctcaaaggctcacgaacacatcttcgggatggtactgatgaacgactggtcagctagagatatccagaaatgggaatacgtacccttgggacccttcttaggcaagtcattcgggaccacagtgtccccttgggtggtgccaatggacgcactgatgcccttcgctgtgccaaatccaaaacaggaccctaggcctctgccctacctgtgtcacgacgagccctacaccttcgacattaatctcagtgtgaacctcaagggggaaggtatgtctcaggccgcaacaatctgtaaaagtaactttaaatacatgtactggactatgcttcaacaactgactcaccatagtgtaaacggatgcaacctgcgtccgggcgacctcctggcgtccggcactatttcagggcccgagccggaaaactttggaagtatgctggagctcagctggaagggaacaaaacccattgatctgggaaatgggcagaccagaaagttccttctcgatggggacgaagtcattattactggatactgccagggagacggatacaggatcggcttcgggcagtgcgcaggaaaggtcctccccgctctcctgccctcc

SEQ ID NO: 11835 - DNA, 1257 bp, synthetic construct
  misc_feature 1..1257: note = source = /note="Description of Artificial Sequence: Synthetic coding sequence"
  source 1..1257: mol_type = other DNA
atgtccttcatccccgtggctgaggatagcgacttcccaattcataaccttccgtatggagtgttctctacccggggtgacccaaggccgcggattggggttgcaattggcgaccaaatcctagacctatccatcatcaaacatctttttactgggcccgtactgtctaagcatcaggatgtgttcaaccagcccacactcaactcatttatgggtctgggacaggctgcttggaaagaggctagggtattcttgcagaaccttctgtcagtttcacaggcccgattgcgagatgacactgaattgaggaagtgcgcattcatatctcaggcaagtgccacaatgcacctgccagctacaatcggtgattacaccgacttctatagctctcgccagcacgccacaaacgtgggcattatgttcagggacaaagagaatgccctaatgccaaactggctccatcttccggtgggttaccacggccgcgctagcagcgttgtggtctcagggacgccgatcaggagaccaatgggacaaatgaagcccgacgactccaaacctcccgtttatggcgcctgcaaactgctggatatggagcttgaaatggctttttttgtcggccctggtaatcgcctgggcgagcctatcccgatcagcaaagctcacgagcacatcttcggtatggtcctcatgaacgactggagtgccagagacattcagaagtgggagtatgtgccgctgggtccgtttcttgggaagagttttggaacaactgtcagcccctgggtcgtacccatggacgctttgatgcccttcgccgtccctaaccctaagcaggaccctagacccctcccttacctgtgtcatgacgagccttacaccttcgatataaacttgagtgtgaacctaaaaggcgagggaatgtcacaggcagcaactatttgcaaatcaaatttcaaatacatgtattggaccatgctgcagcagctgacacatcattctgtgaacgggtgtaatctgaggcctggcgatttgctggcaagcggcaccattagcggtccagagcctgaaaacttcgggtcaatgttggagttgtcctggaaaggtacaaagcccatcgatctgggtaacggccagactagaaagttcttgctcgatggtgatgaggtgattatcaccggttattgtcagggggacggctacaggatcggatttggtcagtgtgctggaaaggtgctgccagcactgctgccttct

SEQ ID NO: 11836 - DNA, 1257 bp, synthetic construct
  misc_feature 1..1257: note = source = /note="Description of Artificial Sequence: Synthetic coding sequence"
  source 1..1257: mol_type = other DNA
atgagctttattcccgttgccgaagactccgatttcccaatccataacctgccctacggagttttctcaacaagaggagaccctaggcctagaatcggtgtcgctattggtgatcagattctcgatctgtccataatcaaacatctcttcactggaccggttctatcaaagcatcaggatgttttcaaccaacctaccttgaacagctttatgggtctgggtcaggcagcctggaaagaagccagagtgttcctccagaacctgctatctgtctcacaggcgcggctgagagatgacaccgaattaagaaagtgtgcattcataagccaagcctcagccacgatgcatctgcccgccacaatcggggattacactgacttctattcctcacgccagcacgccacaaacgtgggaatcatgttcagagacaaagagaatgccctgatgcccaattggctacatttgcccgtgggctaccacggcagagcctcaagtgtggttgtttccggaacccctatacgccgccccatgggccagatgaaaccggacgattctaaacctcctgtctacggggcttgtaagctcctcgacatggaactggagatggcattcttcgtcgggccaggcaatcggctgggagagcctatcccaatttctaaggcccacgaacatatcttcggaatggtgttgatgaacgactggagcgcccgagacatacagaaatgggagtacgtgcctttggggcccttcctgggaaagtctttcggaactaccgtctctccatgggtggtccctatggatgccctgatgcctttcgctgtaccaaacccaaagcaggaccctagacctctcccatatctctgtcatgatgaaccctataccttcgatatcaatctgtctgttaatcttaaaggtgagggtatgtcgcaggctgcaaccatttgcaaatctaattttaaatatatgtactggaccatgctgcagcagctcacacaccactcagtcaacggctgtaacctccggccgggagacctgctagctagcgggaccatctccggcccagaacccgaaaatttcggcagcatgctcgaattgtcatggaaaggcactaaacctattgacttaggcaatgggcagactagaaagttcctgctggatggcgatgaggttatcattacggggtactgtcagggagatggctatcgaattgggtttgggcagtgcgctgggaaggtcttgcccgctctcctcccttca

SEQ ID NO: 11837 - DNA, 1257 bp, synthetic construct
  misc_feature 1..1257: note = source = /note="Description of Artificial Sequence: Synthetic coding sequence"
  source 1..1257: mol_type = other DNA
atgtcttttatacccgtggcagaagactccgatttcccgatccataatctcccatatggcgtctttagcacgcgtggcgacccccggccacgcataggagttgcgatcggagaccaaatcttagacttgagcattattaaacacctgttcaccgggcccgtgttgagtaagcaccaggacgtgtttaaccaacctaccctgaactcatttatgggccttgggcaggccgcttggaaggaagccagggtctttctgcaaaaccttctttccgttagccaggcccgcttacgtgacgacacagagctcaggaaatgtgcctttatttcccaggcatctgccaccatgcacctacctgcgacaattggcgactatacagacttttatagctctagacagcatgccacaaatgttggaatcatgtttcgggataaggagaacgctctgatgcccaattggttacaccttcctgttggataccatggtcgggcttcatcggtggtggtctctgggacgcctatccggaggcccatgggccagatgaagccagacgactccaagcccccggtgtatggggcttgcaagttactcgacatggaattggaaatggctttcttcgtgggtccaggcaatagattgggcgaaccaattcctatctcaaaagcacacgagcatatctttgggatggtcctgatgaatgactggtccgcgagggacattcaaaagtgggaatacgtgccactggggccttttcttggcaagtctttcggaaccaccgtgtccccctgggtggtccccatggacgcactgatgccttttgctgtacctaatccaaaacaggacccccgacccctcccctatctctgccatgacgagccatacaccttcgatataaatctgagcgtgaacttgaagggtgaaggaatgtcccaggccgccaccatctgtaaaagtaattttaagtatatgtattggacaatgctgcagcagttaacccatcatagcgttaacggatgcaacctccggccaggggatctgctggccagcgggaccatatctggtcctgagcctgagaattttggtagcatgcttgagttatcatggaagggtactaaaccaatagatctgggcaatgggcagacccggaagtttctactggatggggatgaggtcattatcaccgggtactgtcaaggcgatggttacaggatagggttcggccagtgcgcagggaaggtactaccagcactgctcccaagt

SEQ ID NO: 11838 - DNA, 1257 bp, synthetic construct
  misc_feature 1..1257: note = source = /note="Description of Artificial Sequence: Synthetic coding sequence"
  source 1..1257: mol_type = other DNA
atgagctttatcccggtagcagaagactctgacttcccaatccataatctaccctatggagtcttttcaaccagaggagatcctaggcctcggatcggcgtcgccatcggagatcagattttggacctgtccataatcaaacacctcttcaccggcccggtactcagtaaacaccaagacgtctttaatcagccaaccctcaattcatttatgggcctcggccaggcagcttggaaagaggccagagtgttcctccagaatcttttgtctgtgtcccaggcccggctacgcgatgataccgaactgcggaagtgcgctttcatatctcaagcctccgccactatgcacttgccagcaacaattggtgactataccgacttctactcctccagacagcatgcaaccaacgtcggcatcatgtttagggataaagaaaatgccctgatgcccaattggttgcatttgccggttggctatcacgggagagcaagctccgtggtagtgagtggcaccccaatacggcggcccatgggacaaatgaaaccggacgattctaagcctcccgtctatggcgcatgtaagctgctcgacatggaactggagatggcattcttcgttggtcccgggaaccgacttggagagcccatccccatctcaaaggcccatgaacacatcttcggcatggtcctgatgaatgattggtccgcgcgggacatccagaaatgggaatacgtgccactgggaccttttctcggcaaaagcttcggtactactgtgtctccatgggtcgttccaatggacgcactcatgccattcgctgttccaaaccccaaacaggatccgcggccgctgccctacttatgccacgacgaaccatatacattcgatattaatctgagcgtaaacctcaaaggagaaggaatgagccaggcagccaccatctgtaaaagtaacttcaaatacatgtattggaccatgctgcaacagctgactcaccactccgtgaatggttgcaacttgcgtcctggcgacttactggctagcggcaccatctccgggccggaaccagagaatttcggcagtatgctggaactatcctggaaaggaaccaagcccatcgacttgggaaacggacagactcggaagttcctgttggacggggatgaggtgattattactggatactgtcagggagacggatacagaattggattcggacagtgtgccgggaaggtactgcccgcactgctaccctca

SEQ ID NO: 11839 - DNA, 1257 bp, synthetic construct
  misc_feature 1..1257: note = source = /note="Description of Artificial Sequence: Synthetic coding sequence"
  source 1..1257: mol_type = other DNA
atgtcctttattcctgtggcagaggacagtgacttcccaatccacaatctgccctacggagtatttagcactagaggtgaccctcgcccaaggatcggagtggccatcggggatcagattctcgacctgagtattattaaacacttgttcacgggaccggtcctgtctaaacaccaagacgtgtttaaccagccgacgctgaacagctttatgggcctaggacaggcggcttggaaagaggctagggttttcctgcagaaccttctgtccgtgtcacaggcaagactcagggatgatacggaactgagaaaatgtgctttcatcagccaggccagcgcaacgatgcacctccctgccacaatcggcgattacaccgacttttatagtagtaggcaacacgctaccaacgtgggaataatgttcagggataaggagaatgcgctgatgcccaattggctgcatctccctgtgggttaccacgggagagcttcttccgtcgtcgtctccggaactcccattcggcggcccatggggcagatgaaacccgacgactctaaacctccggtgtatggagcatgcaagctgttggacatggaactagagatggctttttttgtgggccccggtaaccggcttggagaaccaattcctattagtaaggcacatgaacacatcttcgggatggttctaatgaacgattggtcagcacgggatattcagaagtgggagtacgtacctcttggccctttcttaggcaaatcgttcggcacaaccgtgtcaccttgggtagtccccatggacgccttgatgcccttcgccgtccccaatcccaagcaagaccccaggcccttaccctatttgtgccatgatgagccttatacctttgacatcaacctaagcgtgaacctcaaaggcgagggcatgagtcaagctgctaccatctgcaagtcaaacttcaagtatatgtattggacgatgctccagcagctcacccaccactcagtcaatggttgcaatttaagacctggcgacctgctcgccagcggaactatctccggcccagaacccgagaattttgggtccatgctggagctctcctggaaaggtacaaaacccatagatcttgggaacgggcagacaaggaagtttctgctggatggagatgaggtgatcattacaggatactgccaaggggacgggtaccggattggattcggccagtgtgcaggaaaggtcctgcctgccctcctcccgtcg

SEQ ID NO: 11840 - DNA, 1257 bp, synthetic construct
  misc_feature 1..1257: note = source = /note="Description of Artificial Sequence: Synthetic coding sequence"
  source 1..1257: mol_type = other DNA
atgtcgtttattccagtggcagaggatagcgattttcccattcataatctgccttacggagtattttctacgcgcggggacccccggcccagaatcggggtggctattggcgatcagatactcgacctgtcaattataaaacacctctttaccggtccagtcctcagcaaacatcaggatgtgttcaaccagcccacgctgaactcctttatgggccttggtcaggcggcctggaaagaagcccgggtctttctgcagaacctattgagcgtgtcccaagcccgcctgagagatgataccgagcttcggaagtgcgcctttatctctcaagccagcgcaaccatgcatctgcctgcaacgataggcgattataccgacttctacagctcacgccaacatgcaaccaatgtcggaattatgtttcgcgacaaggaaaacgcattgatgcctaattggcttcacctgcccgtcggttaccacggccgcgcttccagcgtggtcgtgtccggaaccccgatcagaaggcccatgggccagatgaaaccagacgattcaaaaccgcccgtgtacggagcctgtaagctgctggatatggagcttgaaatggcctttttcgtaggcccggggaaccggctgggtgagcctatccccatcagtaaagcacacgaacacatatttggcatggttcttatgaatgactggtctgcccgtgatattcaaaagtgggagtatgtgccccttggaccctttttgggtaagtcgtttgggacaactgtcagcccgtgggttgtgcctatggacgccctgatgccattcgcggttcccaatcctaaacaggacccacgtccccttccgtatttgtgccatgatgagccatatactttcgatatcaacttgtctgtgaacctcaagggggaggggatgtcccaggccgcgactatatgcaagtccaattttaaatatatgtactggactatgcttcaacagctgacacatcacagcgtcaacggttgcaacttgcggcctggggatctcctggcctcgggaacgatctccggacccgagcctgaaaatttcggctcaatgctggaactgtcttggaaagggactaagcccattgacctggggaatgggcagacaaggaaatttttgctcgacggcgacgaggtcattattacgggctattgtcaaggggatggatatcgcattggcttcggacagtgcgccggcaaggtcctgccagccctcctcccctcg

SEQ ID NO: 11841 - DNA, 1257 bp, synthetic construct
  misc_feature 1..1257: note = source = /note="Description of Artificial Sequence: Synthetic coding sequence"
  source 1..1257: mol_type = other DNA
atgagttttatccctgttgccgaggattctgatttccccatccataatctgccatacggggtgttctccacaagaggagatcccagaccacgcatcggcgtcgcaattggggatcagatcctggacctcagcatcatcaaacacctgttcactggcccggtcctgagtaaacatcaggatgtttttaaccaaccgacattgaactccttcatgggtctcggccaggccgcttggaaggaggctcgggtttttctgcagaatttgttgagtgtgtcccaagcgcgcctgcgagatgacaccgaactgcgcaagtgcgccttcatcagccaagcctctgccaccatgcaccttccagccacaatcggcgattataccgatttttatagttcacggcaacatgccactaacgttggtattatgttccgcgacaaggaaaatgctcttatgccaaactggctccaccttcctgttggctatcacggtcgcgcatcctctgtggtagtcagcgggacgcccatcaggcgacccatgggacagatgaaaccagacgatagcaagccccctgtttatggtgcatgcaaacttctggatatggagctggagatggctttcttcgtgggtcctggcaatcgactgggcgagcctattcctattagcaaggctcatgagcatatctttggcatggttttgatgaatgattggagtgcgcgcgatatccagaaatgggaatacgtgccactcggccctttcctcggaaagagctttggaaccaccgtgtccccatgggtggtccctatggacgccctcatgccctttgcggtgcctaacccaaagcaggacccgaggcccctgccttacctttgtcatgatgaaccatacactttcgacattaacctgagcgtgaatctgaagggtgagggcatgtcacaagccgccactatttgtaagtctaacttcaagtatatgtactggacgatgctccagcaactgacccaccactccgtaaacgggtgtaacctgcgccccggggacctcctcgcatccggaaccatttccggcccagaaccagaaaattttggttccatgctcgagctgtcttggaagggtactaaacctatcgatctcggaaatggacagactcgaaaattcttgttggacggagacgaagtaattatcacgggctattgtcagggtgacggctatagaattgggttcggacaatgtgccggcaaggttttgccagccctgctgcctagt

SEQ ID NO: 11842 - DNA, 1257 bp, synthetic construct
  misc_feature 1..1257: note = source = /note="Description of Artificial Sequence: Synthetic coding sequence"
  source 1..1257: mol_type = other DNA
atgtcattcatcccggtagcagaggactccgacttcccaatccataacctgccctacggcgtgttttcaaccagaggcgatccaagaccacgcattggcgtggctatcggtgatcagatcctcgacctgtccatcatcaagcatctgttcaccggcccggtcctctccaaacaccaggacgtgttcaatcagccaaccctcaacagcttcatggggttgggacaggccgcgtggaaagaagcgcgggttttcctgcaaaatctgcttagcgtgagccaggcaaggctgcgggacgacactgaactcaggaagtgcgcgttcatctcgcaggcgtcggccaccatgcatctgccagccacgattggggactacactgacttttactcgtcaagacagcatgccaccaatgtgggcatcatgttccgagataaggaaaacgccctgatgccgaactggctgcaccttccggtgggataccacgggagagcttcctcggtggtggtgtccggaactccgatccgccggccaatgggccagatgaaacccgacgattcgaagccgcctgtctacggagcgtgcaagctcctggatatggagttggaaatggcatttttcgtgggaccggggaaccggctgggagagcctatcccgatttcgaaggcccacgagcacatcttcggaatggtgcttatgaacgactggagcgcccgcgacatccaaaagtgggagtatgtccctcttggaccttttctgggaaagagcttcggaaccactgtgtcaccgtgggtcgtccctatggatgcgctgatgccattcgctgtgccgaatcccaagcaagacccccgcccgctcccatacctgtgccacgatgagccgtacacctttgatataaatctgagtgtcaatctgaagggcgaaggaatgtcccaggccgcaacgatctgcaaatcgaactttaaatacatgtactggactatgctccagcaactgactcatcacagcgtcaacggctgcaacctccgccctggagatctcttggcatcaggtactatctcgggtcccgaacctgagaacttcgggtccatgctcgaactgtcttggaagggaaccaaaccaatcgacctcggaaacggacaaactcgcaagttcctgctggacggagacgaagtgatcatcaccggatactgtcagggtgatggataccggattggcttcgggcaatgtgctggtaaggtgttgccggccctcctgccgtcc

SEQ ID NO: 11843 - DNA, 1257 bp, synthetic construct
  misc_feature 1..1257: note = source = /note="Description of Artificial Sequence: Synthetic coding sequence"
  source 1..1257: mol_type = other DNA
atgagttttatacccgttgccgaggactctgactttcctatacacaacctaccgtatggggtcttcagtacccggggcgatccaagaccaagaattggagtggcgatcggcgatcaaatcctggacttatcaataataaagcatcttttcaccggaccggtgctgagcaaacaccaggatgtcttcaatcagcccaccctcaactcgttcatggggctcgggcaggcagcttggaaagaagcccgcgtctttctccagaatctcttgtccgttagtcaggcgagactgcgcgatgatactgagctcagaaagtgcgcctttatctcccaagcttctgctacgatgcatttgcctgccacaataggggactatacggacttctactcttcccgtcagcacgccaccaatgtcggcatcatgttcagagataaagagaacgccctaatgcccaattggctgcatctcccagtcggctatcatgggagagcatcgagcgtggtagtcagcggaacccccatccggagacctatgggccagatgaaacccgacgatagcaagcctcccgtgtacggagcctgcaaattgttggacatggagctggaaatggcattcttcgtcggacctggtaaccgcctgggagaacccattcctatttcaaaggctcatgagcatatcttcggtatggtcctgatgaatgactggagcgctagggatattcaaaaatgggagtatgtgcccctggggccttttctgggaaagtccttcggaaccaccgtatctccttgggtagtgcctatggacgccctaatgccgttcgcagtgcccaatcctaaacaggatccccgacctctcccttatctgtgccacgacgagccttatactttcgacatcaacttaagcgttaacctcaaaggagagggaatgtcccaagcagcgacaatctgcaaatccaatttcaagtacatgtactggacgatgctgcagcaacttacccaccattcagtgaatggctgcaacctgcggccgggcgacctgctggctagcgggactatcagcggacccgaaccggaaaatttcgggagcatgctggaattgtcgtggaaggggaccaaaccgatcgatctaggcaatggccagaccaggaaattcctgctcgacggggacgaggtcattataactggatattgccagggtgacggctaccgaattggatttgggcagtgcgccggtaaggtcctgcccgctctgctgccatca

SEQ ID NO: 11844 - DNA, 1257 bp, synthetic construct
  misc_feature 1..1257: note = source = /note="Description of Artificial Sequence: Synthetic coding sequence"
  source 1..1257: mol_type = other DNA
atgtcgtttattccagtggccgaggatagcgatttcccaattcacaatctgccttacggggttttctccacacgcggcgatccacgacccagaattggggtcgccattggcgaccagatcttggatttgtcaatcattaaacatctgttcactggacctgtgctgtcgaagcatcaagatgtgtttaaccagccgaccttgaactccttcatgggcctgggccaggccgcctggaaagaagcccgggtgtttctacagaatctactgagtgtctcgcaggcccggcttagagacgacactgaactgaggaagtgcgcttttatttctcaagcgtctgcaacgatgcacctgcctgccaccatcggagattacacggacttctatagttcccgtcagcacgcaacgaatgtagggattatgttccgcgataaagagaatgcactgatgccgaactggctgcatctcccggtgggataccatggccgggcctcttcggtggtcgtgtcaggtactccgattcgtcgcccgatgggtcagatgaagcctgacgacagcaaaccacccgtatacggagcttgcaaattactcgatatggaacttgaaatggcttttttcgtcggaccaggtaatcggctcggggaacctatccctatttctaaggcacatgagcacattttcgggatggtccttatgaatgactggtctgctcgggacattcaaaaatgggagtatgtccccctcggccctttcttaggaaaatcattcgggacaaccgtctctccctgggtagtgccaatggatgcccttatgccattcgcagtgcctaaccctaagcaagacccgaggcccctgccatacctttgtcacgatgagccatatacattcgacattaatctgtccgttaacctcaaaggagaggggatgagtcaggcagcaaccatttgcaagagcaactttaagtatatgtattggaccatgctccagcagctgacccaccacagcgtgaacggctgcaacttgcgccctggtgatctcctcgcatcggggacgatctctggccctgaacccgagaattttgggtcaatgctggagttgagctggaaggggaccaagcccattgacctgggcaacggacagacgagaaaatttttgctggacggcgatgaggtgattattacaggatactgtcagggagatggttataggatcggcttcggtcagtgcgccggcaaagtgctcccggcacttcttccatcg

SEQ ID NO: 11845 - DNA, 1257 bp, synthetic construct
  misc_feature 1..1257: note = source = /note="Description of Artificial Sequence: Synthetic coding sequence"
  source 1..1257: mol_type = other DNA
atgagctttatacccgtcgccgaagatagcgattttcccatccacaacttaccgtacggggtgttttctactcgaggagatcccagaccgagaatcggcgtcgcaattggagaccagattctcgatctttcaattatcaagcatctgtttactggcccggttctgtccaaacatcaggatgtgtttaaccagccgacactgaacagtttcatgggcctaggccaagctgcctggaaggaagcaagagtttttctgcagaatctgcttagcgtttcccaggcccgattgcgggatgacactgagctgagaaagtgcgcttttatttctcaagccagtgccactatgcacttacccgccaccatcggggattacactgatttctacagttctcggcagcacgctacaaacgtcgggattatgttccgagataaggaaaacgctttgatgcctaattggcttcaccttccagtgggatatcatggccgcgcctctagcgtggtcgtgagcggcacgcccatacggcggccaatgggccagatgaagcccgatgacagcaagcccccagtttacggagcctgtaaattgcttgatatggaactcgagatggctttcttcgttggccccggaaaccgcctcggtgagcccatcccaatctcgaaggctcacgaacacatcttcgggatggtactgatgaatgactggtctgcccgagatatacagaaatgggaatatgtgcctctcggcccattcctgggaaagtcgttcgggactacagtgagcccatgggtggttcctatggatgccctgatgccatttgctgtgcctaatccgaagcaggatccccgcccactcccttatctgtgtcacgatgaaccctatacgttcgacattaatctgagcgttaatctgaaaggtgaaggcatgtcacaggctgccactatttgtaagtccaacttcaaatacatgtattggacaatgctccagcagctgacacaccacagtgtaaatggttgcaacctgcgtccaggtgacctgctggcatctggcacaattagcggacctgaaccagagaacttcggaagcatgttggagttatcttggaagggaactaaacctatcgatctgggcaacggacagactaggaagtttctcctggatggggacgaagttattatcacaggctattgccagggcgacggctatagaatcggctttggccagtgcgctggtaaggtactaccggctttacttcccagc

SEQ ID NO: 11846 - DNA, 1257 bp, synthetic construct
  misc_feature 1..1257: note = source = /note="Description of Artificial Sequence: Synthetic coding sequence"
  source 1..1257: mol_type = other DNA
atgtcattcatccctgtggccgaggattccgattttcccatccacaatctgccatacggggtgttctcaacgcggggagatcctaggccacgaattggcgtggctattggcgatcagattcttgacctcagcataatcaaacatctatttacggggccagtgctgagcaaacatcaggacgtgtttaaccagcctactttgaactcatttatgggtcttggacaggccgcctggaaagaagctagagttttccttcaaaacttgctctccgtttcccaagctcggctacgcgacgacaccgaactgagaaagtgcgctttcataagccaggctagcgctaccatgcatctgccggcgactattggtgattatacggacttctatagctctcgccagcacgcgactaacgtgggaatcatgttcagggataaggaaaacgcgttgatgccaaattggctacacttgccggtaggttatcacggccgagccagctcagtcgtcgtgtctggaacccccatccgaaggcccatggggcagatgaaacccgatgatagcaagcctcccgtctatggcgcctgtaagttgctggatatggaattggaaatggccttctttgttgggcccgggaatcgacttggtgagcctatccctatcagtaaggcccacgagcacatattcggcatggtgctgatgaatgattggagtgccagggacattcagaagtgggagtacgtgccactgggcccattcctcgggaagtcgttcgggaccactgtgagcccctgggttgtcccaatggatgcactgatgcccttcgcggtacctaatccaaagcaggacccgcgccccctgccttacctttgtcacgacgagccctatactttcgatattaatctgtctgtcaacctcaagggcgagggtatgagccaagcggctactatctgtaaatcgaattttaaatacatgtattggaccatgctccaacagctgacacaccactcagttaatgggtgcaacctgagacccggggacctgctggcctctggcactatatccggccccgaaccggaaaattttggcagcatgttagagctgagctggaaggggaccaagcctatcgatcttggcaatggacagacaaggaagttcttgctggacggggatgaagtcataatcaccggctactgtcagggtgacggttatcgtatcggttttggacagtgcgcaggtaaagttttaccagcgctgctacccagc

SEQ ID NO: 11847 - DNA, 1257 bp, synthetic construct
  misc_feature 1..1257: note = source = /note="Description of Artificial Sequence: Synthetic coding sequence"
  source 1..1257: mol_type = other DNA
atgtccttcattcccgtggcagaagactccgattttccaatccacaatttgccttatggcgttttcagcacgaggggtgaccctagacctagaattggcgtcgctatcggtgaccaaatcttggatttgagcatcattaaacacttgttcactggcccagtgctttccaagcaccaagatgttttcaatcagccgactctgaactcttttatgggcctgggacaggcggcgtggaaagaggccagggtatttcttcagaatctgctgagtgtatctcaggctaggctgcgcgatgacaccgaattgcgcaagtgtgcgttcatttcacaagccagcgctaccatgcaccttcctgccaccatcggcgactatactgatttttacagctccaggcaacacgctacgaatgtgggaatcatgtttagggacaaggaaaacgcccttatgccaaattggctccatcttccagtcggatatcatggcagagcctcttccgtagtggtatccggcactccaatccgcaggcctatgggccagatgaaacctgatgattccaagcccccggtatatggcgcctgcaagttgctggatatggaactcgaaatggcatttttcgtcggccccggtaataggctcggcgagcctatccctatttctaaggctcacgagcatatttttggcatggttctgatgaacgattggagtgcacgcgacatccagaagtgggaatacgtcccattgggcccctttcttggcaaaagtttcggtactaccgtgtcaccctgggtggtcccaatggacgctcttatgcccttcgctgtaccaaacccaaagcaggaccctagaccgttgccttacctctgccatgacgagccgtacaccttcgacattaatttgtctgtcaacctgaaaggagaaggaatgtcccaggcggctactatttgtaagagcaacttcaagtacatgtattggacaatgctgcagcaactgacacaccatagtgtcaacggttgtaatctgaggccaggcgatctcttggcttcaggcactatcagtggtccagaaccagagaactttggttctatgctggagctgtcttggaagggaactaagcctattgatctgggtaatggacaaacaaggaagtttctcttggatggtgacgaggtgataatcaccggctattgccaaggcgacggctacagaatcggtttcggtcaatgcgctggtaaggtgttgcccgcgctgctcccgagc

SEQ ID NO: 11848 - DNA, 1257 bp, synthetic construct
  misc_feature 1..1257: note = source = /note="Description of Artificial Sequence: Synthetic coding sequence"
  source 1..1257: mol_type = other DNA
atgtccttcattcccgtcgccgaggactccgacttccccatccataatctaccttacggcgtgttcagtacaagaggcgacccaaggcccagaatcggggtggccataggcgaccaaatactggatctgagcattataaaacatttattcactggacctgtgctgtccaagcaccaggacgtcttcaaccaaccaaccctaaattcctttatgggtctgggacaggctgcatggaaagaagcacgcgtcttcctgcagaacctcctctcagtgagtcaggctcggctgcgtgatgacactgaattaagaaagtgtgcctttataagtcaagctagtgctaccatgcacctcccagccaccataggtgactataccgacttctattccagccggcagcacgctacaaacgtgggcattatgtttcgcgacaaggaaaacgctctgatgccaaattggctgcatcttcccgtgggctatcacggcagggcaagctctgtggttgtcagcgggacccccattcgcaggcctatgggccagatgaagcctgacgacagcaagccccccgtgtatggcgcatgcaaactactggatatggaactagagatggctttcttcgtcggcccagggaacagactgggtgaacctattcctattagtaaggctcacgagcacatcttcggcatggttctaatgaacgactggtctgcacgtgacattcaaaagtgggaatacgtccctctcggccccttccttggcaagtcattcggcacaactgtgtccccctgggttgtccccatggacgcactcatgccattcgccgtgcctaatcctaaacaggatccaaggccactgccttacctgtgtcacgacgaaccctatacttttgacataaacctctctgttaatctgaagggcgaggggatgtcccaggccgctaccatctgcaagtcaaatttcaaatatatgtattggacaatgctgcaacagctaacccatcattccgtgaacggctgcaacctaaggcccggcgatctgctggcctctggcacaatttccggaccagagcccgagaacttcggcagtatgctggaattgtcttggaaaggcactaaacctatagaccttggcaatgggcagaccaggaaatttctcctggatggggacgaagttataatcaccgggtattgccaaggggatgggtatcggatcgggtttgggcagtgtgcagggaaggtgctgcccgccctgctaccctca

SEQ ID NO: 11849 - DNA, 1257 bp, synthetic construct
  misc_feature 1..1257: note = source = /note="Description of Artificial Sequence: Synthetic coding sequence"
  source 1..1257: mol_type = other DNA
atgtccttcatccccgtggcagaggacagcgatttcccgatccacaacctcccttacggagtgttcagcacacgaggggatccgaggcctagaattggggtggccatcggggaccaaatcctggatctgtccatcataaagcatctgttcactggcccagtgctgtccaaacatcaggacgttttcaatcagccaactttaaattccttcatgggcctgggtcaagcagcgtggaaggaggcaagggtgttcttacagaatttgctctctgtgtctcaggcccggcttcgagacgacacagagctacgtaagtgcgctttcatctcccaggccagcgctaccatgcacttgcctgcaactatcggcgattacactgacttctattcctcacgccagcacgccactaacgtgggcattatgtttcgggataaagagaacgcattgatgccgaactggctgcacctgccagtgggttatcatggccgagctagttccgtggttgtctcagggacgcctattagacgaccaatgggacagatgaaaccggacgactcaaagcccccagtgtatggagcctgcaaactcttggacatggaactggagatggcctttttcgtgggccccggcaatagactgggagaacccattcccatctccaaggctcacgaacatatattcggtatggttctgatgaatgactggagcgcccgggacattcagaagtgggagtatgtccccctcggaccctttttggggaaaagtttcgggaccacagtctctccttgggtggtccctatggacgctcttatgccattcgcagtgcccaacccgaagcaggatccgcggcccctgccctatctttgccacgacgagccttacacattcgacattaatctttcagttaatctcaaaggagagggtatgtcgcaggcagccaccatttgcaagtccaatttcaaatacatgtactggactatgcttcaacagctgacacaccacagtgtgaatggctgcaatctgcgcccaggagaccttcttgccagcggtactatctcaggacccgaaccagaaaacttcgggagtatgctagaattgagctggaagggcacaaagccaatcgatctcgggaatgggcaaacacgaaagtttcttctcgatggagacgaagtaattattactggttattgccagggggatggataccggattggattcggtcagtgtgctggaaaggtccttcctgccctgctcccttct

SEQ ID NO: 11850 - DNA, 1257 bp, synthetic construct
  misc_feature 1..1257: note = source = /note="Description of Artificial Sequence: Synthetic coding sequence"
  source 1..1257: mol_type = other DNA
atgagctttataccagtggccgaagactctgattttccgatccataacctcccgtatggagtttttagtactcggggagatcccaggccgcgaataggagttgctatcggtgatcaaatcttggatttatcaattataaagcacctgtttaccggaccggttttaagtaaacatcaggatgttttcaatcagccaactctgaatagctttatgggattgggacaggcagcatggaaggaagctcgggttttccttcagaaccttttgtcagttagtcaagcccgacttagagatgatacagagctccgaaagtgtgcgtttatctcgcaagcatcagccaccatgcacctcccggctacgataggtgattatacggatttctatagttcgcgtcaacatgccactaatgtgggaatcatgtttcgagacaaggaaaacgctttgatgccaaattggttgcacctaccggtcggttaccatggacgagcttcatctgtggtggtgtccggcacaccaatcaggcgcccgatgggtcagatgaagccagacgactctaagccccctgtttatggagcatgtaagctcctagatatggaattggagatggcattctttgtcggaccaggaaatcggttgggcgaaccgattccaatttcaaaggcccatgagcatatttttggaatggttcttatgaacgattggtcagctcgtgatatccagaaatgggagtacgttcctctcggacctttcttgggaaagtcctttggaactacggtttcaccgtgggtggtaccaatggatgctctcatgccgtttgcagttcctaatccaaagcaagatccgagacctcttccttacttgtgtcacgatgagccatacacgttcgacattaatcttagtgtgaacttgaagggtgaagggatgtcccaagcggcaacaatttgcaaaagtaattttaaatatatgtactggacgatgctccaacagctgacccatcattcggttaacggttgtaatttacgccctggagatctgcttgcgtccggaactataagcggaccagaacctgagaactttggatcaatgcttgaactgagctggaaaggaaccaagccaattgatctgggaaatggacaaactcggaaatttttattagacggagatgaagttattataactggatattgccagggagatggctaccgtatcggatttggtcaatgtgccggaaaggtactaccggctctgttgccatcc

SEQ ID NO: 11851 - DNA, 1257 bp, synthetic construct
  misc_feature 1..1257: note = source = /note="Description of Artificial Sequence: Synthetic coding sequence"
  source 1..1257: mol_type = other DNA
atgtctttcattccagtggcggaagactccgactttcctatccacaacctgccctacggagtgttctccaccagaggggaccccaggccccggatcggagtggctatcggcgaccagatccttgatctctctataatcaagcatctattcacaggacccgtgctgtccaagcatcaggatgtgttcaaccagcctaccttgaacagcttcatgggcctcggccaagctgcttggaaagaggcgcgggtgtttttgcagaatctcttgagcgtgtctcaagcacgacttagagacgataccgagttacgcaaatgcgcatttatcagtcaggcctccgcaaccatgcatctgcctgccacaatcggagactatactgatttctactcctccaggcagcatgctacaaacgttggaatcatgttccgcgataaagagaatgcgctcatgccgaattggctccaccttcctgtggggtatcatggacgggccagtagcgtcgtcgtgtcaggaaccccaattcggcgacctatggggcagatgaaaccggacgactccaagccccccgtatacggggcatgcaagctccttgacatggagcttgaaatggcattctttgttgggccgggcaatcgcctaggggagcccatcccaatcagcaaggcccacgagcacattttcggaatggtcctgatgaatgactggagcgctcgggacatccagaagtgggagtacgtgccccttggtccattcctggggaagagcttcggcaccacagtgagcccctgggttgtacccatggacgctctgatgcccttcgccgtccccaatcccaagcaggatcccagacctctcccctacctctgccacgatgagccttataccttcgacattaacctcagcgtcaatctcaagggggagggcatgtcacaggccgctaccatttgtaagagcaactttaagtacatgtactggacaatgcttcagcagctgacccaccacagcgtgaatggatgcaatctccggccaggcgacctgctcgcaagtggtacaatcagtggccctgagccagagaacttcgggtccatgctggaactgagctggaaaggaacaaagcctattgatcttgggaacggccagactcggaagttcctgctcgacggcgacgaagtgataatcaccgggtactgccaaggtgacgggtacaggattgggtttggacagtgcgctgggaaggttctacctgcgcttttaccttca

SEQ ID NO: 11852 - DNA, 1257 bp, synthetic construct
  misc_feature 1..1257: note = source = /note="Description of Artificial Sequence: Synthetic coding sequence"
  source 1..1257: mol_type = other DNA
atgtcatttattccagtagccgaagattcagattttccaattcataatttaccatatggtgttttcagtacaaggggagatcctagaccaagaattggagttgcaattggagaccaaattttggacttatctattatcaaacatctttttacaggtccagttttatctaaacatcaagatgtatttaatcaacctacattaaattcatttatgggacttggacaagcagcatggaaagaagctagagtatttcttcaaaatttactttcagtatcccaagctagattaagagatgatactgaattaagaaagtgtgcatttatttctcaagcttccgcaacaatgcatttacctgctacaattggtgattatacagatttttattcatctcgtcaacacgctacaaatgttggaattatgtttagagataaagaaaatgcattaatgccaaattggcttcacttaccagttggatatcacgggagagcttcttctgtcgtagttagtggtacaccaattagaagaccaatgggacaaatgaaaccagatgatagtaaaccaccagtctatggagcttgtaaacttttagatatggaacttgaaatggccttttttgttggacctggtaatcgtctaggtgaaccaattccaattagtaaagcacatgaacatatttttggaatggttttaatgaatgattggtctgctagagatattcaaaaatgggaatatgttccacttgggccatttcttggaaaatcctttggaacaactgttagtccatgggttgttccaatggatgctcttatgccatttgctgttccaaaccctaaacaagatccaagaccacttccttatctttgtcatgacgaaccttatacgttcgatattaatttatcagttaaccttaaaggtgaaggaatgtcacaagcagctacaatatgtaagtcaaattttaaatatatgtattggacaatgcttcaacaattaactcaccacagcgttaatggatgtaaccttagaccaggagatcttttagcttctggaacgatttcaggacctgaaccagaaaattttggttccatgttagaactttcttggaaaggaactaagccaatagatttaggtaatggtcaaacaagaaaatttcttttagatggagatgaagttataataactggatattgtcaaggagacggatatagaattggatttggacaatgtgctggaaaggtacttcctgctcttttaccatca

SEQ ID NO: 11853 - DNA, 1257 bp, synthetic construct
  misc_feature 1..1257: note = source = /note="Description of Artificial Sequence: Synthetic coding sequence"
  source 1..1257: mol_type = other DNA
atgtctttcattccagtagctgaggattctgacttccctatacataatctcccctacggtgtcttctctacacgaggcgatccaagaccccggatcggggttgccataggggatcagatcctggatcttagtatcataaagcacctttttacaggacccgtgctgtctaaacatcaggatgtctttaatcagcctacactgaacagttttatggggctcgggcaggccgcctggaaagaagcacgggtgttcctgcagaatctgctgtccgtcagccaggctaggctgagagacgacacagagttaaggaagtgtgcatttatctctcaggcctccgccaccatgcatcttcctgccactattggagactacactgatttctattcttctcgccagcacgctacgaatgtggggatcatgtttcgtgacaaggagaacgctttgatgcctaattggctgcacctccccgtgggctatcacggccgggcctcttcagtcgtagtctccggtaccccaatcagaaggccgatgggccaaatgaagccagacgacagtaagccgccggtgtacggggcttgtaagctcttagatatggagctggaaatggccttttttgtcggacccggaaatcgactgggggaacccattcccattagcaaggcccacgaacacattttcgggatggttctgatgaatgattggtccgctcgagacattcagaagtgggagtacgtgccactcggacctttcttgggtaaatcgttcggcactacagtgtccccttgggtggtccctatggatgccctcatgccattcgcggtgcccaaccccaaacaggatcccagacctctgccctatctctgccacgacgagccttacactttcgacattaatctctctgtgaacttaaaaggagaaggaatgagccaggctgccactatttgcaaatcaaactttaagtacatgtattggaccatgctgcagcagctgactcatcatagtgtgaacgggtgcaatctgcgaccaggggacctcctggcgtccggcaccatctccgggcccgaacccgaaaatttcggttcaatgctggaactctcgtggaagggtacaaagcctattgacttgggaaatggacagactcgcaagttcctgctggacggagacgaagttataataacagggtattgccagggtgatggctaccggatcgggttcggacaatgtgcgggcaaggtgctgcctgctctgctgccttcc

SEQ ID NO: 11854 - DNA, 1257 bp, synthetic construct
  misc_feature 1..1257: note = source = /note="Description of Artificial Sequence: Synthetic coding sequence"
  source 1..1257: mol_type = other DNA
atgtctttcattcccgtggccgaagactctgattttccaatccacaatctgccttatggcgtattcagtacaaggggtgatcccagaccacggattggggtcgctatcggggaccagattttggacctttcaattattaagcacctcttcacgggccctgtcctgtctaagcatcaggatgtcttcaaccagcctactttgaattcctttatgggactggggcaggcagcatggaaggaagctcgcgtctttctgcaaaacctcctgtctgtgtcccaggcgaggctgagagacgataccgaactgaggaaatgtgctttcataagtcaggcctccgcaacgatgcatcttcctgccaccattggagactataccgatttttactctagtcgacaacacgctaccaatgtgggcataatgttccgagacaaagaaaatgcccttatgccaaattggctgcacctccccgtggggtaccacggccgagcctcttctgtcgtggtttcaggcactccgattcgccgcccaatggggcagatgaagcccgacgattccaaaccccctgtgtatggtgcctgtaagctgttggacatggagctggagatggcctttttcgtgggccctggcaatcggctcggggagcctatccccatctcaaaagcccacgaacatatttttggaatggtgctgatgaacgactggtccgctagagacattcagaaatgggagtatgttccacttgggccctttttggggaagtccttcggaaccacggtcagtccctgggtggtccccatggatgcgctgatgccctttgccgtgcccaaccccaagcaggacccaagaccgctcccctacctgtgccacgacgaaccctacacatttgacattaatctgagcgtgaacttgaaaggggaaggcatgagtcaggctgctacgatttgcaagtccaattttaagtacatgtactggacaatgctgcagcagctgacccaccatagtgtgaacggatgcaatttgcggccaggcgacttgttggcgagcgggacaatttctggcccagagccagagaatttcggctctatgctggagctgtcttggaaaggaacaaaacctatcgatctggggaacggccagactcgaaagttcctgttggacggggatgaggtgattatcacgggctattgccagggcgacggctatagaatcggcttcggccagtgtgccggaaaagtacttcccgcactcctcccatct

SEQ ID NO: 11855 - DNA, 1257 bp, synthetic construct
  misc_feature 1..1257: note = source = /note="Description of Artificial Sequence: Synthetic coding sequence"
  source 1..1257: mol_type = other DNA
atgtctttcatccccgtagctgaggacagcgacttccccatacacaatctgccgtatggggtgttctccactcgtggcgacccccggccgagaattggcgttgccattggcgaccagatcctggacctcagcatcattaagcacctgttcacagggccagtgttgagtaaacaccaagatgtgttcaatcagcctacgctcaactctttcatggggctcggccaggccgcctggaaggaagcccgtgtgttcctccaaaaccttctcagtgttagccaggcccgtcttcgagacgatactgagttgcggaagtgcgcttttatttctcaggcctctgcgacgatgcacttgcccgctaccatcggggactatactgacttttatagctctagacagcacgcgactaacgtcggaattatgttccgcgacaaggagaacgccctcatgccaaactggctacacttacccgttgggtatcacggaagggcatcgtctgttgtggtaagcgggactccaatcaggcgccctatgggacaaatgaagcctgacgactctaagcctcctgtatatggtgcttgtaaattgctcgatatggaacttgagatggccttctttgtcggccctggcaataggctgggtgagccgataccgatcagtaaagcccatgaacatatattcgggatggtgctaatgaacgactggtccgcacgcgatatccagaagtgggagtatgtccccctcgggcccttcttgggaaaatcctttggtactaccgtctcaccatgggttgtgcctatggatgccctcatgccattcgcagtgcccaatcccaagcaagatccgcgcccattgccatacctttgccacgatgagccgtacacatttgatattaacctatcagtcaatctgaagggcgaaggcatgagccaggcggctacaatctgcaaatctaattttaaatatatgtactggactatgctgcagcagctcactcaccattccgtgaatgggtgcaatttacgacctggagacctccttgcatccggcactattagcggacccgaaccagaaaactttggaagtatgttggagttgtcatggaagggtacaaagccgatcgacctgggtaacggacagactcgcaaattcctgctcgacggggacgaggtgataataacgggttactgccagggcgatgggtacaggattggattcggacaatgtgcaggaaaagttttacctgccctgttgccgtct

SEQ ID NO: 11856 - DNA, 1257 bp, synthetic construct
  misc_feature 1..1257: note = source = /note="Description of Artificial Sequence: Synthetic coding sequence"
  source 1..1257: mol_type = other DNA
atgtcctttatacctgttgccgaagattctgacttcccaatccataacctcccatatggggtgttctctacaagaggtgatccaaggccaaggatcggtgtagcaattggggaccagatactggatctctcaattattaagcacttgttcaccggaccagtcctgtctaagcaccaggatgtattcaaccagccaaccttgaactctttcatggggctgggacaggccgcttggaaagaggccagagtcttccttcagaacctgctgagtgtgtcacaagctcggctccgagatgatacagagcttaggaagtgtgcctttattagccaggcatccgcaaccatgcacctgccagcaactattggcgattatacggatttctactcatctcgccaacatgcaacaaacgttggcattatgttcagggataaagagaatgcattaatgcccaattggttgcacttacccgtgggctatcacggccgcgcctccagcgtggttgtgagcggtacaccaattcgccggcccatgggccaaatgaaaccagacgactcaaagccgccggtgtacggcgcctgtaaactgctggatatggaactggagatggctttttttgtgggccccggcaatcgcttaggcgagccaatacccattagcaaggcccacgagcacatcttcggaatggtcctgatgaatgactggagtgcaagggacatccagaagtgggaatatgtgcccttagggcctttcttagggaagtccttcggcacaaccgtgtccccttgggtggttcctatggatgccctcatgccattcgccgtgcccaaccccaaacaggatccacggcccttgccctacctctgccatgacgaaccctatacgtttgatatcaacctgtcggttaacctgaaaggcgaaggcatgagtcaggctgccaccatctgtaaaagtaattttaagtacatgtactggaccatgctgcagcagctgacccaccactccgttaatggttgcaatctccgccccggggatcttcttgccagcggcaccatcagcggaccggagcccgaaaactttggttctatgttagagctcagctggaagggcacaaaacctattgatctcggaaacggccaaacacggaagtttttgctggacggtgatgaagtgataataacagggtactgccagggggacggctataggatcgggttcgggcagtgtgccggaaaagtgttaccggcccttctgccgtcc

SEQ ID NO: 11857 - DNA, 1257 bp, synthetic construct
  misc_feature 1..1257: note = source = /note="Description of Artificial Sequence: Synthetic coding sequence"
  source 1..1257: mol_type = other DNA
atgagcttcatcccggttgcggaggattctgacttcccaatccataatctgccttatggcgttttcagcacgaggggcgatccaaggcccaggattggtgttgctatcggagaccagatcctggatctcagtataattaaacacctgttcacgggtccggtcctcagcaaacaccaagatgtgtttaaccagccgacactcaactcgttcatgggactgggtcaagcggcatggaaggaggcgcgcgttttcttgcagaatctccttagcgtatcacaggcccgcttgcgggatgacactgaactccgcaaatgtgctttcataagccaggcatccgcaacaatgcatcttccggcgacaattggagactatacagatttttatagctcacgtcaacacgcaacgaatgtgggcatcatgtttcgagacaaggaaaatgccctgatgcctaattggcttcacctgcccgtgggctaccacggcagagcgagcagtgtggtggtctccgggacccccattcgaaggcctatggggcagatgaagcctgatgattcaaagccccccgtctatggagcatgcaaactcctggatatggagttagaaatggccttcttcgtcggtcccggaaatcgcctcggcgaacccatacctatttcgaaggcccacgaacacatattcggcatggtattgatgaatgactggtcggcccgcgacatccagaagtgggagtatgtcccactggggccttttctaggaaaatccttcggaaccacggtttcaccctgggtggtccctatggacgctctcatgccattcgccgtaccaaatcccaagcaggatccccgacctctcccatacctttgtcatgacgaaccctataccttcgatattaacctttctgtaaatctaaagggtgagggcatgtcgcaagccgccacaatttgcaagtccaattttaagtatatgtactggaccatgttacagcaactcactcatcattccgtgaatggatgcaatttacggccaggggacctcctggcatccggaacaattagtggacctgagcctgagaactttggtagtatgctcgagctgtcatggaaaggcactaagcctatcgatcttggtaacggtcagacccggaaatttctgctcgacggggacgaagtcattatcactggatactgccagggcgacggatatcgcattgggttcggtcagtgcgcaggaaaggtattgccagctcttttaccaagc

SEQ ID NO: 11858 - DNA, 1257 bp, synthetic construct
  misc_feature 1..1257: note = source = /note="Description of Artificial Sequence: Synthetic coding sequence"
  source 1..1257: mol_type = other DNA
atgagcttcatccctgtggccgaggactctgactttccgatccataacctgccctacggggtgttctctacacgcggggatccgcgccctcggattggggtggcaattggtgatcagatcctggatcttagcatcatcaagcacttgttcactggccccgtgctatctaagcaccaggatgtcttcaatcagccaacactcaattccttcatgggattaggacaggccgcgtggaaagaggccagagtttttctgcagaatctcctgagtgtctcgcaggctagattaagagacgacacagagctgagaaagtgtgctttcatctctcaggcctctgcaaccatgcatcttccagcaacaatcggagactacacggacttttactcaagtagacaacatgccacaaatgttggaattatgttccgggacaaggagaacgctcttatgcctaactggctgcacctgccagttggttatcacgggagagcctctagtgttgtcgtctccggcacaccaatcagacgtcctatgggccagatgaaacccgacgactctaagcctccggtgtacggggcctgcaaactcctggacatggagctggagatggccttctttgtcggccccggcaaccggctcggtgaacctatccccatcagtaaagctcacgagcacatcttcggtatggtcctcatgaatgactggtcagcccgcgacattcagaaatgggagtatgttccgctgggacctttcctaggtaagtcttttggtactaccgttagtccgtgggtcgtgccgatggatgccctaatgccattcgctgtgcccaacccaaagcaggacccacgcccgctcccgtatctgtgccatgacgaaccatacacattcgacattaatttatccgttaatctcaagggtgaggggatgtcacaggcggcaacaatctgcaaaagcaattttaaatatatgtattggaccatgctccagcagctgacacaccattctgttaatggttgcaatctaaggcctggtgacctgctcgcgtctggcacaattagcggacctgagcccgagaatttcgggtctatgctagaactgtcctggaagggcacaaagccaatcgacttggggaatgggcagacacggaagtttctgctggacggagatgaagtgatcattaccggctactgtcaaggagacggctaccggatcggatttgggcagtgcgcagggaaggtcctgccagcactgttgccctca

SEQ ID NO: 11859 - DNA, 1257 bp, synthetic construct
  misc_feature 1..1257: note = source = /note="Description of Artificial Sequence: Synthetic coding sequence"
  source 1..1257: mol_type = other DNA
atgtcatttatacccgtggctgaagactccgactttcctatccataatctgccgtacggggtcttctctactcgtggagatcctcgcccccgcattggggtggcaatcggcgaccagatacttgatctgagtattattaaacatctcttcacaggccctgtcctttctaaacaccaggacgttttcaaccagccaacactcaacagcttcatgggtttagggcaggctgcttggaaagaagcccgtgtgttcttgcaaaacctcctgagtgtatcccaggcgagactgagggatgatactgaacttagaaaatgtgcattcatcagccaggcctctgccaccatgcacctgccggcgacaattggcgattataccgatttttactcatctagacaacacgccacgaatgtggggatcatgttccgggacaaggaaaatgccctgatgcccaattggctgcatctgccggttgggtaccatggtcgggcttcgagcgtggtagtgtcaggcacgccgatccgacggcctatggggcaaatgaaaccagatgattctaaaccgccggtctatggggcttgcaaactgctggacatggaactagagatggccttcttcgtaggcccagggaatagattaggagagcctatcccaataagcaaggcacacgagcacatttttggcatggtactgatgaacgactggtccgccagagacatacagaagtgggaatatgtacccttagggccctttctcggaaaatcctttgggactacggtgtctccttgggtggtacctatggacgccctcatgccgtttgcagtgccaaaccctaagcaggatcccagacccctcccatacttatgccatgatgaaccctacaccttcgacatcaacctgtccgtaaacttgaaaggagaaggcatgtctcaggcagctacaatttgcaaaagtaacttcaagtatatgtattggacaatgcttcagcagttgacacatcactcagtcaatgggtgtaatctccgccctggagacctacttgcgtcaggcacaatttcagggcctgagcccgagaatttcggctctatgctggaactgtcttggaagggcacaaaaccgatagacctggggaatggccaaacaagaaagttccttctggacggggatgaagttattattaccggctattgtcaaggagatggctaccgtattggatttggccaatgcgccggcaaggtgctgcctgcactactgccctca

SEQ ID NO: 11860 - DNA, 1257 bp, synthetic construct; identical to SEQ ID NO: 11858
  misc_feature 1..1257: note = source = /note="Description of Artificial Sequence: Synthetic coding sequence"
  source 1..1257: mol_type = other DNA

SEQ ID NO: 11861 - DNA, 1257 bp, synthetic construct
  misc_feature 1..1257: note = source = /note="Description of Artificial Sequence: Synthetic coding sequence"
  source 1..1257: mol_type = other DNA
atgtcttttatcccggtcgctgaggatagcgacttcccaatccataatttgccatatggcgtattttctacacgtggcgacccgcgcccaaggatcggcgtcgccataggggaccagattttggatctttcaattattaagcacctctttacgggcccggttctgtcgaagcatcaagatgtattcaatcagcctacactgaatagtttcatgggactcggtcaggctgcatggaaagaagcccgcgtttttttacagaatctgctgagcgtttctcaggcgaggttacgtgatgacacggagctgcggaaatgcgcattcattagtcaggcgtcagcgactatgcacctcccggcaactatcggagattacacagacttttattcttcacgtcagcatgctacgaatgttggtatcatgtttagagataaggaaaatgcgttaatgccgaactggcttcatctaccggttgggtatcatgggagggcatctagcgtcgtagttagcggtactcctatacgccggcctatggggcaaatgaagcccgatgattctaaaccgccggtctatggcgcttgcaaattacttgatatggaactggagatggcattttttgttggtccaggcaaccgcctgggcgaaccgatccctatatccaaagcgcacgagcatatttttggcatggttctaatgaatgactggtctgctcgggacattcaaaaatgggaatacgtgccgctcggcccttttttaggaaagagctttggcacaaccgtctcgccatgggttgtgcccatggatgctcttatgccgttcgccgtgccgaatccgaaacaagaccctaggccgttaccgtatttatgccatgacgaaccttatacgtttgacatcaatcttagcgttaatctaaaaggagaagggatgtcacaggcagcgacaatctgcaaaagcaattttaagtatatgtattggacaatgcttcagcagttgacacatcactcggtgaatggatgcaatcttcgtcctggggatctcctagcatcaggtacaatttcaggcccggagcctgaaaacttcgggagcatgctggaactttcttggaaaggcaccaaaccaattgacttaggcaacggtcaaacacgtaaatttctgttagatggcgatgaagttattattactggttattgccagggtgatggatataggattggctttgggcaatgtgcaggaaaagttctgccggcgctgttaccgtca

SEQ ID NO: 11862 - DNA, 1257 bp, synthetic construct
  misc_feature 1..1257: note = source = /note="Description of Artificial Sequence: Synthetic coding sequence"
  source 1..1257: mol_type = other DNA
atgtctttcatccctgtagccgaagattccgatttcccaatccataatctgccttatggggttttcagtacacgcggggatccccggcctcgcattggggtggctataggggaccagattctcgatttgtcaattataaaacatctctttactggaccagtcctaagtaaacaccaggatgtatttaaccagcccactctcaactctttcatggggctaggacaggccgcctggaaagaggcaagggtgttcctccagaatctccttagtgtgtcccaggcaaggctccgagatgatacagaactgcgaaaatgtgcattcatatcccaggcctctgcgactatgcaccttccagccactatcggagattatacagatttctatagttcacgacagcacgctactaatgtgggaatcatgttcagggacaaagaaaatgctctcatgccaaactggttacacctacccgtcgggtatcatgggcgggccagttctgtggtggtttctgggactcctataaggaggccaatggggcagatgaaacctgatgattctaaacctcccgtttatggagcctgcaagctgctggatatggaacttgaaatggcttttttcgtcggacccgggaacagacttggagaacctattccaatctctaaagctcacgaacacattttcggaatggtacttatgaacgactggtcagctcgggatattcagaagtgggaatacgtcccacttggaccttttctaggaaagtctttcgggacaacagtgtctccttgggtagtgcccatggatgcattaatgcctttcgcggtacctaaccctaaacaggatccccgccccttgccatacctttgccacgatgaaccttatactttcgatatcaatctctctgttaacctcaaaggagaagggatgagtcaagctgctacaatctgtaaatcaaatttcaaatatatgtattggactatgctccagcagttaactcaccactctgtgaatgggtgtaatttgcggcctggggatctgcttgcatctggaactatctcaggacccgaacctgaaaattttggatctatgctggaactttcctggaaagggacaaaacctatcgatcttgggaacgggcagactagaaaattccttctagacggagatgaagtcataatcacaggatattgccagggggatgggtatagaattggattcggacagtgcgccggaaaggtgctccccgcccttctgccatcc

SEQ ID NO: 11863 - DNA, 1257 bp, synthetic construct
  misc_feature 1..1257: note = source = /note="Description of Artificial Sequence: Synthetic coding sequence"
  source 1..1257: mol_type = other DNA
atgtcttttattccagttgctgaagattccgacttcccaatccataatcttccgtacggggtgttttccacccggggcgatccccgcccccggatcggcgtggctatcggagaccagatcctggacctctccattatcaaacatctgttcacaggacccgtcttaagcaagcatcaagatgtgttcaatcagccgacattgaacagtttcatggggctcggtcaggcagcttggaaggaggcaagagtatttctgcagaaccttctgtccgtgtcacaagctagactgcgggatgatacagagctcagaaaatgtgcattcatcagtcaagccagtgccacgatgcacctcccagccacaatcggagattataccgatttctacagttcacgacaacacgcgactaacgtcggcatcatgttcagggataaggagaatgccctaatgcccaactggctgcacttgcccgttgggtatcacggtagggcgtcgtcagtggtcgtatctgggactcctattagacggcccatgggtcagatgaaacctgacgactctaagccacccgtgtacggagcgtgcaaactgctggacatggagctcgaaatggcatttttcgttggacctggaaatcgactgggtgaacctatcccaatctccaaagctcatgaacatattttcggaatggtcttaatgaatgattggtccgcgcgtgatattcaaaagtgggaatatgttccactcggaccctttcttggcaaaagcttcgggacaaccgtgagtccgtgggtagtgcctatggacgccctgatgccgtttgcggtaccaaacccaaaacaggaccccaggcctctcccctatctctgtcacgacgagccatacacctttgacattaacctgtctgtgaacctgaaaggagagggaatgtcgcaggccgccactatttgcaaaagcaactttaaatacatgtattggacaatgcttcagcagctcacgcaccattcggttaatggatgtaatcttcggccaggcgacctccttgccagcggcaccatatcaggacctgagccagaaaatttcgggtcaatgctggagctgtcctggaaaggtaccaagccaattgatttggggaacgggcagacacgaaagttcctgcttgatggcgacgaagtaatcatcacagggtactgtcaaggggacgggtacagaatcggctttggacagtgcgcgggaaaagtcctgccagccctcctccctagt

SEQ ID NO: 11864 - DNA, 1257 bp, synthetic construct
  misc_feature 1..1257: note = source = /note="Description of Artificial Sequence: Synthetic coding sequence"
  source 1..1257: mol_type = other DNA
atgagttttataccggtggccgaggactccgactttcctatccataaccttccatatggcgtgttctcaaccagaggggatccacgacctcgaatcggcgtggccatcggtgaccagatcctggacctgtccatcattaagcatctgttcacaggccctgtgctcagtaagcaccaggacgtttttaatcagccaacactcaactcgtttatgggtctaggccaggcagcctggaaggaggcccgagtctttctccagaacctgttgagcgtgtcccaagccagactcagagatgacaccgagctgaggaagtgtgcctttatatcccaggcatcagctaccatgcacctccctgcaacaattggggactacaccgacttttactcttctcgccagcatgccactaatgtgggcatcatgtttagagataaggagaatgctctgatgcctaattggctccacctccctgtgggatatcatgggcgggcctcttccgtcgtcgtcagcggcacccctatcagaagacctatgggacagatgaagccagacgattcgaaaccccccgtgtacggcgcctgtaagctacttgacatggagttagagatggccttcttcgtcggacccgggaacagactgggagaacccattccgatttccaaggcccatgagcatatttttggaatggtgctgatgaacgactggagtgccagggatatccagaagtgggagtatgtccccctgggaccctttctgggcaaaagtttcgggacaacggtgagcccctgggtggttcccatggacgctctcatgcctttcgccgtgcctaaccccaaacaggacccgcgcccactcccgtatttgtgccatgacgagccttacaccttcgacatcaatctgtcagtgaatttgaagggcgaaggaatgtcccaggccgctaccatttgcaaatctaactttaagtacatgtattggactatgctccaacagctgacacaccacagtgtgaacgggtgcaacctgcgccctggtgacctgctcgcgagcggtaccataagcggccctgagcctgagaatttcgggtcgatgctggagctttcgtggaaaggcaccaaaccaatcgatcttggcaacgggcagacgcgcaagtttctgctcgacggcgacgaagtgatcattaccgggtattgtcagggcgacggatatcgcatcgggttcggacagtgcgcaggaaaagtgttgccagctctgcttccgtca

SEQ ID NO: 11865 - DNA, 1257 bp, synthetic construct
  misc_feature 1..1257: note = source = /note="Description of Artificial Sequence: Synthetic coding sequence"
  source 1..1257: mol_type = other DNA
atgtcctttattccagtggccgaggatagtgatttccctattcacaacctgccctacggggtcttttctacaagaggtgatcctcggccacgaataggcgtcgcaatcggtgaccagattctggacctgagcatcatcaaacacctatttacaggtcctgtgctttccaagcaccaggatgtatttaaccaacctaccctgaactcttttatgggtctggggcaagcagcgtggaaggaggctcgggtgtttctgcagaacctcctttcagtttcacaggctcggctgcgcgacgatacagagctccgaaaatgcgccttcatctcacaggcatccgcaaccatgcacctcccagcaaccattggcgactacacagacttttattcatccagacagcatgctaccaatgtgggaatcatgttcagagacaaagagaatgctctcatgccgaactggctgcaccttcctgtgggttaccacggacgcgcttccagcgtagtggtgtcaggaactccaattcgacggcccatgggccagatgaaacctgatgactctaaaccgccagtgtacggagcctgcaaactgctggatatggagctcgagatggcctttttcgtggggccggggaataggttgggcgagccgatccccatatctaaggcccacgaacatattttcggcatggtgttaatgaacgattggtccgcccgggatatacaaaaatgggagtatgtacccctcgggcctttccttgggaaatcgtttggcacgaccgtatctccctgggtggtgccaatggatgccctgatgccgttcgctgtccctaaccctaagcaggacccccggcccctaccatatctttgtcatgacgaaccttacaccttcgacattaaccttagtgtcaatctgaagggggaggggatgagccaggctgccactatttgcaagtccaattttaaatacatgtattggaccatgttgcagcaactgacacaccattccgtcaacgggtgcaacctgcgccctggagaccttttggcatctggaaccatctctggccctgaacctgaaaatttcggctcaatgctcgaactctcatggaaagggactaagcctatcgacctgggcaacggacagacaagaaaattcctgttggatggagatgaggtcattataacgggctactgccagggggatggctatcgaatcggcttcggccagtgtgctggtaaagtactgccagctttactgccctct

SEQ ID NO: 11866 - DNA, 1257 bp, synthetic construct
  misc_feature 1..1257: note = source = /note="Description of Artificial Sequence: Synthetic coding sequence"
  source 1..1257: mol_type = other DNA
atgtcattcatacctgtcgcagaggattcggattttcccatccataacctgccttacggggttttttcaacaagaggcgatcccagaccaaggattggagtcgccattggagatcagatccttgacctgtctatcatcaagcatctgttcactggcccggtcctgagcaagcatcaggacgtgtttaaccaaccaacactgaattctttcatgggactgggccaagcagcgtggaaggaggcccgggttttcttgcagaatctactgagcgtgtcccaggccagactcagagatgacacggaactacgaaagtgtgccttcatatcacaggcttccgcaaccatgcacttgccagctacaatcggggactatacggacttttactcttcccgccagcacgctacaaacgttgggattatgttccgtgataaagagaatgcactgatgcctaactggctgcatctaccagtcggctaccatggccgggcatcgtctgtcgtagtgagtggcaccccaatccgacgcccaatgggccaaatgaagcccgacgactcaaaacccccagtatatggggcttgcaaactgctggacatggaacttgaaatggcgtttttcgtcggcccaggtaaccggctcggggagccgatcccaatctctaaagctcatgagcacatttttggcatggttctcatgaatgattggtcggctagagatatccagaaatgggaatatgtgcccttaggacccttcctaggcaaatctttcgggaccaccgtgagcccatgggtagtgccaatggacgcactcatgccattcgctgtgcctaacccaaaacaggacccgcggccgttgccctatctgtgccacgacgagccatacacattcgacattaacctctccgttaatctcaagggagaagggatgtctcaggcagccacaatttgcaaatcgaacttcaaatatatgtactggaccatgctgcagcagctaacccaccattccgtgaacggctgtaacctgcgccccggagacctgctcgcttctggtacgattagcgggcccgaacccgagaactttggttcaatgcttgagctgtcctggaagggtaccaagcctattgaccttggaaacggccaaactcgcaagtttcttctcgacggagatgaggttattatcacaggttactgtcagggagatgggtaccgcataggctttgggcagtgcgccggcaaggtcctgcccgcacttcttcccagc

SEQ ID NO: 11867 - DNA, 1257 bp, synthetic construct
  misc_feature 1..1257: note = source = /note="Description of Artificial Sequence: Synthetic coding sequence"
  source 1..1257: mol_type = other DNA
atgtcctttatccctgtcgctgaggactctgattttccaatccataacctgccatacggggtcttctcaacccgcggtgaccctcgtcctagaataggcgtggcaatcggcgaccaaatcttggacctgagcattatcaaacatttgttcactggccccgttctgtccaaacatcaagacgtgttcaatcaacccacgctgaattcgtttatgggattaggccaggctgcgtggaaagaagcgcgcgtttttctgcaaaacctgctgtcagtttcacaagcgcgccttcgcgacgataccgaattgcggaagtgcgcgtttatcagccaggcatccgccacgatgcacctgccagcaaccattggggattacaccgacttctattctagccgccaacacgcaacgaatgtcggtattatgtttcgcgataaggaaaatgcacttatgccaaattggctgcacctgccggtgggttatcatgggcgggcgtcgagcgtggtggttagtggtaccccaatccgccgcccaatgggtcaaatgaagccggatgattcgaagccaccagtgtatggcgcatgtaagcttttggacatggaattggagatggcttttttcgtgggtcctggtaatcgtctgggtgagccgatccctattagcaaggcacacgagcatatctttggtatggtcctgatgaacgattggagcgcccgcgacattcaaaaatgggaatatgtgcctttgggaccttttttgggcaagagcttcgggactaccgtgtcaccgtgggttgttccgatggacgctctgatgcctttcgcagtgccgaacccaaaacaggatccgagaccactgccttatctgtgtcacgacgaaccctatactttcgatatcaatctgtcagtcaacctgaagggagaaggcatgagccaagctgcaacgatctgtaagagcaactttaagtacatgtattggactatgctccagcaactgacccaccatagcgtcaatgggtgcaaccttagaccgggtgacctgctggctagcgggactatctccgggccagagccagagaatttcggcagcatgctagaactgagttggaagggcaccaaaccgatcgatctgggcaacggtcagacgagaaaattcctgttagacggtgacgaggttatcattactggctattgtcaaggtgacggttatagaatcgggtttgggcagtgtgccggcaaggttctcccagctcttctcccgtca

SEQ ID NO: 11868 - DNA, 1257 bp, synthetic construct
  misc_feature 1..1257: note = source = /note="Description of Artificial Sequence: Synthetic coding sequence"
  source 1..1257: mol_type = other DNA
atgtcatttattcccgtagccgaagattcagattttcctatccataatcttccttatggcgtgttcagcaccagaggagatccaagacctcggataggggttgcaattggggatcaaatccttgacctctctattatcaagcacctgtttacgggccccgtgctaagtaaacatcaggacgtgttcaatcagccaaccctaaattcgtttatgggcctgggccaagccgcgtggaaggaggcacgggtatttctacagaatctgctgtcagtgtctcaggctcggttgcgagacgacacagagctccgcaagtgcgcctttatcagtcaggcgtccgccacgatgcatttaccggctaccattggcgactataccgacttctatagttcgcggcagcacgctacaaatgttggcatcatgtttcgcgataaggagaatgcgctcatgcccaattggctccatcttccagtcggctaccatggccgcgctagcagtgttgtggtgtctggcacacccatccgacgccccatgggacagatgaagccagatgatagcaaaccaccggtttacggcgcttgcaaactgctagacatggagttagagatggcattcttcgtgggcccaggaaaccgcttgggtgagccaattccgatcagcaaggcacacgagcatatatttggcatggtactgatgaacgattggtctgctcgggacatccagaagtgggagtatgtcccattgggcccctttcttggcaaatccttcggaacaaccgtctcgccttgggtcgtccccatggatgccctcatgcccttcgccgtgccaaacccaaagcaggacccccggcctttaccttacctttgtcatgatgaaccctatacctttgatataaacttgagtgtgaacctcaagggggaaggtatgtcacaggccgccaccatctgcaaatctaactttaagtatatgtactggaccatgcttcagcagctgacacatcattcagtcaatggatgcaacctgcgtcctggcgacctgcttgcatcgggtaccatttcaggccccgagccggagaattttggaagcatgctggaattgagctggaagggtaccaagccaatagacctcggcaacggccaaacaaggaaattcctactggatggggacgaggtcattataacaggctattgtcagggggatggctatagaatcggttttggccagtgcgctgggaaagtgctccctgctttgctcccttca

SEQ ID NO: 11869 - DNA, 1176 bp, synthetic construct
  misc_feature 1..1176: note = source = /note="Description of Artificial Sequence: Synthetic coding sequence"
  source 1..1176: mol_type = other DNA
atggcagccctccggcaacctcaagtagccgagcttctggcagaagcacgcagggcatttagagaagaattcggggcagaacctgagcttgccgtgtcagcaccaggaagagtgaacctgatcggcgaacataccgactacaaccaggggcttgtccttcccatggctcttgaattgatgactgtgcttgtcggctcgccaaggaaagatggactcgtttctcttctgactacctccgagggggctgacgagccacaacgtctgcagtttcctcttcctactgcccaaaggtcgctggaaccaggaacgcccagatgggctaattacgtgaagggagtgatccaatactaccctgcagctcctcttccaggattttccgcagtcgtggtttcttccgtgccgctgggcggaggactctccagctccgcaagcctcgaagtcgcaacttacactttccttcaacaattgtgccctgattccggaaccattgcagctcgggcacaggtctgccaacaagcagaacactccttcgcaggcatgccgtgtggtattatggaccagtttatctcccttatggggcagaagggtcatgcgcttctcattgactgccgctcgcttgagacttcgctggttccactgagcgatcccaaactcgccgtgttgattactaatagtaacgtgagacattcacttgcatcctcggagtaccctgtcaggcgcaggcagtgtgaagaggtggcacgtgccctcggaaaggagtcactcagggaagtgcagctcgaagaacttgaggcggcgcgtgacctggtgtccaaggagggatttcgccgggctaggcacgtcgtcggggaaataagaaggactgcacaagcagcggctgcgcttcgcaggggtgattaccgggcctttggaagattgatggtggagtcacatcgaagcctccgagatgattacgaagtgtcgtgtcctgaactggaccagttggtggaggcggctctcgccgtgcccggagtgtacggatcgaggatgactggtggaggatttggcgggtgtacggtgactctcctggaggccagcgcagcaccacatgcaatgcgccacatacaagaacattacggagggacggctactttctacctgagccaggccgcggatggtgccaaagttctctgcctg

SEQ ID NO: 11870 - DNA, 1176 bp, synthetic construct
  misc_feature 1..1176: note = source = /note="Description of Artificial Sequence: Synthetic coding sequence"
  source 1..1176: mol_type = other DNA
atggccgcgctgcggcagccacaggtagcagagctcctggccgaggcacggcgggcgtttcgggaagagttcggtgccgaacctgagttagctgtctctgccccaggaagagtgaacctgatcggagagcacacagactataatcagggacttgtgcttccgatggcactggaactgatgactgtgttagttggctccccccggaaagacggcctggtcagtctgctcacgacctccgagggcgcagatgagcctcagcgactgcagtttcccctgccaacagcacaacgctcattggagccaggcactcctcgctgggcgaattacgtcaaaggcgtgatacagtactatcccgcagcaccgttgccaggcttttcggccgttgtcgtgtcttctgttccactcggtggtggactgtcctcctcagcctcgctggaggtggctacatatacctttcttcagcaactgtgcccagacagcggtacgatcgccgcaagggcacaagtctgtcagcaagctgaacacagtttcgccggaatgccttgtggaataatggaccaatttatcagtttgatgggtcagaagggacatgcactgctgattgattgtcgctccctagaaacttctctggtgcccctgagcgatcccaagctcgccgtcctgatcaccaatagtaacgttaggcatagtttagcgtcttctgaatatccggttaggaggcgtcagtgtgaagaagtggcgcgggctctgggcaaagagtccctcagagaagtgcagctcgaagaactagaagcagcaagggatctagtttcaaaggaggggtttcgtagagcacggcacgttgtgggcgagattcggaggaccgcgcaggccgctgccgctctccgcaggggggattatcgggccttcggaagactgatggtagagagtcatcggtcgttgcgcgacgactatgaggtgagttgccccgagctcgaccagctcgtagaggcggcattggctgtacctggcgtgtacggttcgcgtatgacaggtggtgggttcggaggctgtaccgtgacactactggaagcctcagctgctcctcatgcaatgaggcacattcaagaacattatggaggcaccgccactttttatttgagtcaggccgctgacggcgccaaggtactgtgcctc

SEQ ID NO: 11871 - DNA, 1176 bp, synthetic construct
  misc_feature 1..1176: note = source = /note="Description of Artificial Sequence: Synthetic coding sequence"
  source 1..1176: mol_type = other DNA
atggccgcccttcgtcaaccacaagtagctgagttattggctgaagctcgtagggcttttcgtgaagagtttggtgctgaacctgaattggccgtctcagcaccagggcgtgtgaacttaattggagagcacactgattataatcagggtcttgtcttgcctatggcactggaattgatgactgtacttgtggggagtccacgtaaggacggacttgtgtcgttgttgacaacctctgaaggtgctgatgagccacaacgccttcagtttccattgccaaccgcgcaacgtagtctagagcctggaacacctcggtgggccaattatgttaagggggtgatccagtactatccggctgctcctttgccagggttttccgctgtcgtcgtgtcctctgtgcccctcggaggaggactttcttcatcggcatccttggaggttgccacttacactttcctccaacagctgtgcccggattctggaactattgcagctagggctcaagtgtgtcagcaggctgagcacagtttcgcgggaatgccctgtgggataatggatcagtttatctccctcatgggtcagaagggccacgcccttctgattgattgtagaagcctggagacctcccttgtaccgcttagtgatccgaaactggctgttttaattactaacagcaacgtgagacactctctggctagttcagagtacccagtgagaagacgccaatgcgaagaagtcgcgagggcgctcgggaaggaatctttacgtgaggtacagctagaagaactagaagcagcaagagatctagtgagtaaggaaggtttccggcgtgcacgtcacgttgtaggtgagatcagaagaactgctcaggctgctgcggcactgaggaggggtgattatagggctttcggaaggctcatggtcgaatcgcataggagcttgagggacgactatgaggtttcttgcccggagctggatcagctcgtcgaggccgccttggccgtccctggggtttacggatcacgcatgaccggggggggcttcggtggctgcactgtgaccttacttgaggctagcgcagctccacatgctatgagacacattcaggagcattatgggggtaccgctacattctacctctcccaggccgctgacggagccaaagttctctgcctt

SEQ ID NO: 11872 - DNA, 1176 bp, synthetic construct
  misc_feature 1..1176: note = source = /note="Description of Artificial Sequence: Synthetic coding sequence"
  source 1..1176: mol_type = other DNA
atggctgcccttcgccagcctcaagtggccgaactactggccgaggcccgacgggcgtttcgagaagagttcggagccgaacccgaactcgctgtgtctgcccctggaagagttaatcttatcggggaacatactgattacaaccaggggttagtgctccctatggcactagaattaatgactgtactggtggggtctcccaggaaggacgggttagttagtctcctaacaacttcagagggagcagatgaaccccagcggctccagtttcctcttccaacagcccagaggtcactggaaccagggactcctaggtgggcaaactatgtcaaaggagttatacagtattatcctgctgctcccctcccagggttctccgcagtggtggttagttctgtgcccctaggaggaggattgagttcttctgcaagtctcgaagtcgccacttatacattcctgcagcagctatgtcctgatagtggaactatagccgccagagctcaggtgtgccaacaggccgaacattcgttcgctggaatgccttgtggaataatggaccagtttataagtcttatgggacagaaagggcacgctctactcatagactgtaggtctctagaaacatcactagtgcctctgtctgatcctaaattagcagtgcttataactaattctaatgtccgccactctctcgcctcctctgaatatcctgtcaggcggagacagtgtgaagaggtggctcgagcactcggaaaagaatccctgcgagaagtgcagctagaagaactagaagctgccagagacctggtgtctaaagaagggttcagacgggctaggcatgtggtgggggaaattaggcgaacagctcaggctgcagcagcgttacggcggggggattatcgagcatttggacggctgatggtggaaagtcacaggtctctgcgggatgactatgaagtgtcctgccccgaacttgatcaacttgtagaagccgcactcgctgtgcccggagtgtatgggagtcggatgacaggaggaggatttggaggatgtacagtgacactcttagaagcttccgccgccccacacgccatgcggcacatccaggaacactatggaggaactgccacgttctatctatctcaggccgctgatggggcaaaagtcctgtgtctt

SEQ ID NO: 11873 - DNA, 1176 bp, synthetic construct
  misc_feature 1..1176: note = source = /note="Description of Artificial Sequence: Synthetic coding sequence"
  source 1..1176: mol_type = other DNA
atggcggcactgcgtcaaccccaggtggcggaactgttggcggaagcgcgcagggcctttcgggaagaattcggcgcggaacccgaactcgccgtgagcgctcctgggcgcgtcaacttgatcggtgagcataccgactacaaccagggactggtgttgccgatggctctggaattgatgaccgtgcttgttggcagcccgagaaaggatggactggtgtccctgttgaccacttcggaaggggcagacgagcctcaaagattgcaatttccactgccgaccgcgcaacgctctttggaaccaggcactccacgctgggcgaactacgtgaagggagtcatccagtactaccctgccgccccgcttccaggattctcggctgtggttgtctcatccgtgccgctcggtggcggactgtcgtcgagcgcctccctcgaagtcgccacttatacttttctgcaacagctgtgccccgactcaggaactatcgcagcacgggcacaggtgtgccaacaagccgagcactcgttcgcaggaatgccgtgtggaatcatggaccaattcatctccctcatgggacagaaaggtcacgcgttgctcattgattgtaggagcctggaaacctcactggtgcccctctccgacccgaaactcgccgtgctcatcacgaactcaaacgtccggcacagcctggctagctcggagtacccggtgcggcgccggcagtgcgaggaggtggcccgcgccctgggaaaggagtcccttcgggaagtacaactcgaggagttggaagctgccagggacctcgtcagcaaggaagggttcaggagagcgcggcacgtggtgggagaaataaggcggaccgcacaagcggcggctgctctccgcagaggagactaccgcgcttttggacggctcatggtggaatcccatagaagccttagggacgactacgaggtgtcgtgcccagagctggaccaactggtcgaggcggcgctggcggtcccaggagtgtacggctcgcgaatgacggggggtggcttcggcgggtgcaccgtgactctgctggaagcctcagcggccccgcacgctatgcggcacatccaggagcactacggtggcacggccaccttctacctgtcacaggccgccgacggagcaaaggtgctctgtttg

SEQ ID NO: 11874 - DNA, 1176 bp, synthetic construct
  misc_feature 1..1176: note = source = /note="Description of Artificial Sequence: Synthetic coding sequence"
  source 1..1176: mol_type = other DNA
atggccgccctgaggcaaccccaggtcgctgagctattagcagaggcccggagggccttccgagaggaatttggggcagagcccgagcttgccgtttccgctcctggccgtgtgaacctgattggagaacacacggactacaatcaaggtctggtcttacctatggccttggaactcatgacagtactagttgggagtccccggaaagacggcctcgtgtcactgctcacgacaagcgagggcgctgacgaaccccagaggctgcaatttccactgccaaccgcacagagatcactagaacccggcacccctcgctgggccaattatgtgaagggtgtgatccagtattacccagcagctccactccctggcttcagcgctgtggtagtatccagcgtgcccctgggtggggggcttagttcgtccgcctcactggaggtagcaacttacacctttctgcagcagttgtgcccagactcaggcactatcgcagcgagagcacaggtatgtcagcaagctgagcactcattcgctgggatgccatgtggaatcatggaccagttcatctcgctgatgggacagaaaggccacgctctgctgatcgactgtcgcagcctcgagacatccctcgtgccactgtccgacccgaagctggcagtgctcattaccaattctaatgtacggcatagtctggcgtcttcagaataccccgttcgccggcgtcagtgtgaggaagtagcccgcgctctgggtaaagagtcactgagggaggtgcagctggaggagctggaagccgcaagggacctcgtatcgaaagagggattccgcagagcccggcacgtggtgggagagatccggaggacagcgcaggccgccgctgcccttcggcgaggcgattaccgtgcgtttgggaggctgatggtagagtcacacaggtcactgcgggatgattacgaagtgtcctgcccagaactggatcagcttgttgaggccgctttggcagttcctggtgtgtatgggtctcggatgacgggtggtggtttcggtgggtgcaccgtaacactgttggaggctagcgccgcaccccacgctatgagacacatccaagagcattatggaggcactgctactttctatctgtcccaggccgccgatggggctaaggttctgtgcttg

SEQ ID NO: 11875 - DNA, 1176 bp, synthetic construct
  misc_feature 1..1176: note = source = /note="Description of Artificial Sequence: Synthetic coding sequence"
  source 1..1176: mol_type = other DNA
atggccgccctgagacaaccgcaggtggccgaacttctcgctgaagccagacgggccttcagagaggagttcggggcggaacccgagctggccgtgtcggcgcctggtagggtgaacctcatcggagagcataccgactacaaccagggcctcgtgctgcctatggcactcgagctgatgaccgtgctcgtcgggtcgccacgcaaagatggtttggtgagcctgctcactacctccgagggagcggacgaacctcagcggctgcagtttccactgccaaccgctcagcggtcacttgagccgggaaccccaaggtgggcgaactacgtcaaaggggtgatccagtactatccggcggcgccactgcctggcttctcagccgtggtggtgtcgtctgtgccgctgggagggggattgtcgtcaagcgcttcgctggaagtggcgacttacactttcttgcaacagctgtgcccagatagcggcaccatagcggcgcgggctcaagtgtgtcaacaggccgagcatagctttgcaggaatgccttgtgggatcatggaccagtttatctcgctgatgggccaaaaaggccacgctctgctcatcgactgccggtccctcgagacttcgctggtcccactgtccgaccccaaactcgccgttctcatcactaactccaatgtgcgccactcactcgcttcctcagagtacccggtgcgccgccggcagtgcgaggaagtggcacgcgcattgggaaaggaaagccttcgggaggtgcagcttgaggaactggaagcggcccgcgacctcgtctcaaaagagggattccgccgcgctcggcatgtggtcggagagattcggcgaactgctcaggccgcggcggcgctgcgcagaggagattacagggcgttcggcagactgatggtggagtcacataggtcccttcgggacgactacgaggtttcgtgcccagagctggatcagcttgtcgaagctgccctcgcagtgccaggtgtgtacggatcaagaatgactggaggaggcttcggagggtgcactgtcacgctgctcgaggccagcgctgccccacacgctatgcggcacatccaagagcactacggcggaaccgccaccttttacctctcgcaagctgccgacggggcaaaggtgctgtgcttg

SEQ ID NO: 11876 - DNA, 1176 bp, synthetic construct
  misc_feature 1..1176: note = source = /note="Description of Artificial Sequence: Synthetic coding sequence"
  source 1..1176: mol_type = other DNA
atggctgccctgagacaaccccaagtggcagagctgcttgcagaggccagacgggccttcagggaggagtttggcgctgaacctgaactggctgtgtccgcacccggcagggtcaacctcatcggcgagcacacagattataaccagggccttgtactgcctatggcactcgaactgatgactgtgttggtaggtagcccacgcaaggacggcctggtctccttgctgaccaccagcgaaggcgctgatgagcctcagagacttcagtttcctctgccgaccgcccagcgctccctggagcccgggacccccagatgggccaactatgtcaagggagttattcagtactatcccgccgctccgctgcccggattctctgctgttgtcgttagcagtgttcctctcggcgggggactcagcagttcagccagtctcgaagtcgctacttatacctttctccagcagttgtgccctgacagcgggactatcgccgccagagcgcaggtgtgtcagcaggccgagcacagcttcgcaggcatgccatgcggcattatggatcagtttatctctctcatggggcaaaagggccatgctctgcttattgattgccggtctcttgaaacaagcttggtgccactgtccgatcccaaactggccgttcttatcacaaattccaatgttcggcatagtttggcatcttcagagtacccggtgcggagaagacagtgcgaagaggttgcaagagctttgggcaaggaatctttgagggaggtacaactggaggagctcgaagccgccagagacttggtgagtaaagagggcttccggcgggcaaggcacgtggtgggtgagattagacggacagcacaagctgctgctgctttgcggcgcggagattaccgggccttcgggagactgatggtcgaatcccatagatccctgagggacgactacgaagtgagctgcccggagctggaccagcttgtcgaggccgccctggcagtacccggcgtgtacggcagcaggatgacggggggaggattcggcggctgcaccgtgaccctccttgaagcaagcgctgcaccacacgcgatgcgccacatacaggagcattatggtgggacagcaactttctatctgtcccaggccgcggacggcgcaaaggtgctgtgcctg

SEQ ID NO: 11877 - DNA, 1176 bp, synthetic construct
  misc_feature 1..1176: note = source = /note="Description of Artificial Sequence: Synthetic coding sequence"
  source 1..1176: mol_type = other DNA
atggcggctctgagacaacctcaggtcgcagaactgctcgccgaggctaggcgtgccttccgcgaggaattcggagcagaaccggagctggccgtcagcgccccgggccgggtgaacctgatcggagagcacaccgattacaaccagggattggtgctcccaatggccctcgaacttatgaccgtcttggtcggttcaccgagaaaggatggcctcgtgtccctgctgacgactagcgagggggccgacgaaccgcaacgcctccagttcccactgccgactgctcagcgctcgctcgagcccggaacccctagatgggcaaactacgtgaagggggtgatccagtactaccccgcggccccactcccaggattttccgccgtggtcgtgtcatccgtcccgttgggtgggggtctgtcctcatcggcatccctcgaagtggccacctacacctttctccagcaactctgccccgactcgggcacgatcgcggccagggcgcaggtctgccaacaggcggagcattcgtttgctggcatgccgtgtggaatcatggaccaattcatcagccttatggggcagaaagggcacgccctgcttatcgactgccgcagcctggagacttcgcttgtgccgctgagcgacccgaaactggcggtgctgataactaatagcaacgtgaggcactccctggcatcatcagaatacccggtccggagaaggcaatgcgaagaagtggctcgcgctctgggcaaggagagcctcagggaggtccagctggaagagctggaagccgctcgcgacctggtgtccaaagaaggattccggcgcgcaagacacgtggtgggagagattaggagaaccgcgcaagctgcggcagctttgcggaggggtgactaccgggcgttcggacgcctcatggtcgaatcgcaccggagcctgcgcgacgactacgaagtctcgtgtcctgagttggaccagcttgtggaggccgctctggcggtgcctggggtgtacgggtccaggatgactggaggagggttcggagggtgtactgtgactttgctggaagcgtcagccgctccgcacgccatgcgccacatccaggaacactacggaggaaccgcgaccttctacttgtcacaggcagcagacggtgctaaggtgctctgcctg

SEQ ID NO: 11878 - DNA, 1176 bp, synthetic construct
  misc_feature 1..1176: note = source = /note="Description of Artificial Sequence: Synthetic coding sequence"
  source 1..1176: mol_type = other DNA
atggcagcactgcggcaaccacaagtcgcggagcttctcgcagaagcgcgacgtgcgtttcgtgaggaatttggtgccgaacctgaacttgcagtgagcgccccaggaagggtgaaccttataggagaacataccgattacaatcaaggactggtgcttcccatggcactcgaactgatgaccgtgctcgtcgggagcccgcggaaggacggtcttgtatccctgcttactactagcgagggggctgatgaacctcaaagactccaatttccccttccaaccgcacaaaggtccctggaacctggtactccccgctgggccaattacgtgaaaggcgtgatccagtactaccctgccgccccgcttccaggattttccgcagtcgtggtgtcatctgtgcctcttggaggtggcctgtcctcctcggcctcccttgaggtagccacttacactttcttgcagcaactctgtcctgactccggtacgattgccgcacgcgcacaggtctgtcagcaggcggagcacagcttcgccggcatgccttgtggtatcatggatcagttcataagtcttatggggcagaagggtcacgcgcttctcattgattgccggagcttggagacgtcgcttgtgcctctctcggaccctaagctggcggtgctcatcaccaactccaacgtgagacactcactcgcatcaagcgaataccctgtgcgacgacggcaatgtgaggaagtcgcgcgggcactcggcaaggaatcactccgggaagtgcaacttgaggagcttgaggcagctagagacttggtgagcaaggaaggatttcgcagggcccgacatgtcgtgggtgaaattcgtagaacggcacaagcggcagcagcgctcagacgaggagactaccgcgcctttggacggcttatggtggaatcccatcgcagcctgagagatgactacgaagtctcgtgtcctgagcttgatcagcttgtcgaagcagcacttgcagtcccgggagtctatggttcgcgtatgactggaggcggcttcgggggatgtactgtgacccttcttgaggcgtcggccgcaccacatgcgatgaggcacattcaagaacactatggcggtaccgcaaccttctacctgagccaggccgctgatggagcaaaagtcttgtgcctg

SEQ ID NO: 11879 - DNA, 1176 bp, synthetic construct
  misc_feature 1..1176: note = source = /note="Description of Artificial Sequence: Synthetic coding sequence"
  source 1..1176: mol_type = other DNA
atggctgcactcaggcagccgcaggtcgccgaattgctggctgaggcccgccgtgccttcagagaagagtttggcgctgagcctgagctcgccgttagtgctcccggccgggttaacctcattggggagcacaccgactacaatcagggcctggtcctgccaatggccctggagctcatgactgtcctggtcgggtcccccaggaaagacgggctcgtttccctactcacaacatctgagggcgccgacgagcctcagcgtctgcagtttcctttacccacagcccagagatcgctagaaccgggaactcctcgatgggcgaactatgtcaaaggagtcatccagtactatcctgctgctcctttgcctggattcagtgccgtggttgtgtcttccgtcccattgggtggaggtctttcttccagtgcgagtctcgaggtggccacttatacgttcctgcagcagctctgtcccgatagcgggactatcgcggctagggcacaggtctgccagcaggcagagcacagcttcgcgggcatgccttgcggcataatggaccaatttatcagtctgatgggccagaaaggccacgcgcttctcatcgattgtcgctctttggagacttccctcgttcccctgtctgatcccaagctggctgtcctgattaccaactcaaacgtgcggcattctctggcaagtagcgaatatcccgtgcgccgccgccaatgcgaggaggtagctcgcgcgttgggcaaggaatctctccgagaggtgcaactcgaggagctcgaagctgctcgcgatcttgtgtcaaaggaagggtttaggagggcccgccatgtcgtaggtgagataaggcggaccgcgcaggcagccgctgcgttgagacgcggcgactacagggctttcggaagacttatggtcgagagccatcgctcactgagggatgattatgaggtgtcctgccctgagctggatcagcttgtcgaggcggccctggccgtgccaggggtctatggtagtagaatgacaggaggcgggttcggtggttgcaccgtcaccttgctggaggcctccgctgctccacacgcaatgagacacatccaggagcactacggagggactgccactttctacttgtcacaggcagcagacggggccaaagtgctctgcctt

SEQ ID NO: 11880 - DNA, 1176 bp, synthetic construct
  misc_feature 1..1176: note = source = /note="Description of Artificial Sequence: Synthetic coding sequence"
  source 1..1176: mol_type = other DNA
atggctgccctcagacaacctcaggtcgccgagctgttagcggaagctagacgggctttcagagaagagttcggtgcggaaccagaattggcagtcagcgctcccgggcgcgtaaacctgattggcgagcacaccgactacaatcaggggctggtcttaccaatggccctggagctgatgaccgtgctcgtcggttccccacgaaaggacggattggtcagccttcttacaacttcagagggggccgacgaaccacaaaggctgcaattccctctgcctacagctcagagaagtctggaaccaggcacaccacgatgggcgaactatgtaaaaggtgtcatccagtattaccctgccgccccactaccaggatttagtgctgtggtggtctcctccgtccctctaggcgggggcctgagttcatccgcaagcttagaagtggcaacttatacatttctgcagcagctgtgccctgattccggcacgattgctgcccgggcgcaagtttgccagcaggctgaacatagcttcgccggcatgccatgcggaatcatggaccagtttataagcctgatgggccagaagggccatgccctcctaattgactgccggagcctggaaacatccttagtgccactctccgaccctaagctcgccgtgctaattactaattcaaatgtgagacactctctagcgtcaagtgaataccctgttagaagacggcaatgcgaggaggtggctagagcgctcggcaaggaaagtctccgagaagtacagttggaggaacttgaagcggccagggaccttgtgtcaaaagagggttttaggcgcgctagacatgtcgtcggggagatccgtagaaccgctcaggcggcggctgcactgaggaggggcgattacagagcttttggacgcctgatggtggagtcacatcgcagcctgcgggatgattacgaggtgtcctgtcccgagctcgaccaactggtcgaagccgcattagccgtgcctggggtctatggtagccggatgacagggggcggatttggcggatgcactgtgactctcctagaagcatcggccgccccgcatgcgatgaggcatatccaggagcactatggtggtaccgctacgttctatctatcccaggcagctgacggcgcaaaggtgctctgcctg

SEQ ID NO: 11881 - DNA, 1176 bp, synthetic construct
  misc_feature 1..1176: note = source = /note="Description of Artificial Sequence: Synthetic coding sequence"
  source 1..1176: mol_type = other DNA
atggcagctcttcggcagccgcaagtggccgaactgctggccgaggcgagaagagcatttcgcgaagaatttggtgcggaaccagaactcgcagtgtccgcacctggacgagtgaacctgattggtgagcatactgattacaaccaaggccttgtgcttcctatggcccttgaactcatgacggtccttgtcggaagcccgcgtaaggatggattggtgtccctgcttaccacctcagagggagcagatgaaccgcaacgcctccaattcccactcccaaccgcccagaggagcctcgagccaggtacgcctcggtgggcaaattacgtcaaaggcgtgatccaatactaccctgccgcgccactgccaggtttttcggcagtggtggtcagctccgtgccactcgggggtggcttgtcatcgagcgcatcccttgaagtggcaacctataccttcctgcaacaactgtgccccgattcgggtaccattgcagcaagggcacaagtgtgtcaacaagcagaacattcgtttgcggggatgccatgcggcatcatggatcagttcatttcgcttatgggtcaaaaagggcacgcacttctgattgattgcagatccctcgaaacttcactggtgcctctttccgacccaaaactcgccgtcctgattacgaactcgaatgtccgccactcgctggcatcgtcagaataccctgttcggcggcgtcaatgtgaagaagttgcacgcgctcttggtaaggaatccctgcgggaggtgcagttggaagagcttgaagcagcaagggatctggtgtccaaggaagggttcagacgagcacgacatgtggtgggggagattcgccgtactgcacaagcagccgcagccttgcgccgcggtgattaccgggcatttggacggcttatggtggagtcccaccgctcactgcgagacgattacgaagtctcatgtcccgaactggatcaacttgtggaagcagcactggcagtgccgggtgtctacggttcccggatgacgggagggggctttggtggatgcaccgtcacccttttggaggcatccgccgctccacacgcaatgagacatattcaagaacattacggaggaaccgccaccttttacctgtcccaggcagcagacggagccaaggtgctttgtctc

SEQ ID NO: 11882 - DNA, 1176 bp, synthetic construct
  misc_feature 1..1176: note = source = /note="Description of Artificial Sequence: Synthetic coding sequence"
  source 1..1176: mol_type = other DNA
atggccgctttgaggcagccacaggtggctgaactgctcgcagaggcccgccgggcattccgcgaagaattcggagcagagcccgaactggcggtgtctgcgccagggcgcgtaaatctcataggcgagcatacggattataaccaggggcttgttctgccaatggccctggagttgatgacagtacttgtgggcagcccgaggaaggatggattggtgtccttgctcaccacctctgaaggagccgacgagccccagcgtctgcaattcccactccccactgcccagcgatcacttgaacctggtacccctcggtgggctaactacgttaaaggggtgatccagtactaccctgcagccccactgcccggtttttccgcggtcgtggtcagctctgtgcctctgggcggaggtctcagcagtagcgcaagcctggaggtggccacttataccttcttgcagcagctgtgtcctgattctggaaccatagctgcgagggcccaagtgtgtcagcaagctgaacatagctttgccggcatgccctgcggcatcatggaccaattcatctccctgatgggacaaaaagggcacgccctgctcatcgactgccggagcctggagacctcacttgtgcccctgtccgatcccaaactggccgtgcttatcaccaactcaaatgtgcggcactctctagcgtcctccgaatatcctgtgcgccgtagacagtgcgaggaggtggccagggccctgggcaaggagtctctgcgggaggtccagttggaagagctcgaggcggcgcgcgatctcgtatccaaagaaggcttccggcgagctcgacatgtggtgggcgagatcaggagaactgcccaggctgcagccgctctgcgcagaggggattacagggcattcggtagattgatggtggagtctcatcgcagtctgagggacgactacgaggtttcatgtcccgagttagaccagctcgtcgaagctgctcttgccgtgcccggagtgtatggctctcggatgactggcggcgggttcgggggatgcacagtgactctcctagaagctagcgctgccccacatgccatgagacatattcaggaacattatggcggtacagctacgttctacctatctcaggctgcagatggtgccaaggtactgtgtctg

SEQ ID NO: 11883 - DNA, 1176 bp, synthetic construct
  misc_feature 1..1176: note = source = /note="Description of Artificial Sequence: Synthetic coding sequence"
  source 1..1176: mol_type = other DNA
atggccgcccttcggcagccacaagtggccgaactgcttgcggaggcacgtcgggcattccgcgaagagtttggagcggaaccagaacttgcagtgtcggccccagggcgagtgaacctcatcggtgaacacactgactacaaccaaggacttgtgctgcccatggcactcgaactcatgaccgtcctcgtgggttccccaaggaaggacggactggtgagccttctcactacctccgaaggtgcggacgaaccccaacggcttcagttcccacttcctactgcacagcgaagcctggaaccaggaactcctcgttgggcgaattacgtcaaaggagtgatacaatactaccctgcagcaccccttcccggattctcggcagtggtggtgtcatcagtgcctctgggtggaggacttagcagctccgcatcgcttgaggtcgccacgtacacgttcctccaacaattgtgtcctgactcaggaactatcgctgccagagctcaggtgtgtcaacaggcagagcattcctttgcaggaatgccctgtggaatcatggatcagttcatatctttgatgggtcagaaaggccacgccctcttgatcgactgtcgaagccttgagacttcccttgttccactctcagatcctaaactggcggtgctcattactaattccaatgtccgccattcacttgcatcatctgaatacccagtcaggcggagacaatgtgaagaggtggccagggcattgggcaaagaatccctccgagaagtgcaactggaagaactcgaagcagcgagggatctcgtgtcgaaggagggatttcgtcgagcacgccatgtcgtcggcgaaattcgcagaactgcacaggcagccgcagcactgcgccggggtgattaccgagctttcggacggctcatggtggagtcccatcggtcgctcagagatgactacgaagtctcttgtcccgaactggaccagcttgtggaggcggcactggcagtgcctggagtgtacggaagcagaatgactggaggagggtttggagggtgcaccgtgaccctgctcgaagccagcgcagccccacacgcaatgcggcatatccaggagcactacggcggtactgcaaccttttatctttcccaagctgccgatggcgcaaaggtgctgtgcttg

SEQ ID NO: 11884 - DNA, 1176 bp, synthetic construct
  misc_feature 1..1176: note = source = /note="Description of Artificial Sequence: Synthetic coding sequence"
  source 1..1176: mol_type = other DNA
atggccgcactcaggcaaccacaggtagccgagcttctggccgaagctcgccgcgctttccgagaagaattcggagccgagccggagttggctgtttccgcgccaggacgagtcaacctcatcggggaacataccgactacaaccagggccttgtgctcccgatggccttagagttaatgacggtgttggtaggatccccgagaaaagacggtcttgtttccctactgacgacaagcgagggagcggacgaacctcaacggttacaatttcccctcccaacagctcaacgcagcttggagcctggcacgccacgttgggccaattatgttaagggtgtcatccagtattatccggctgcaccactgcccggattcagcgccgtggtcgtttcatcagttcccctcggcggcggactgtcctccagtgcctcgttggaggttgcaacatacacgttcttgcaacagctatgtccggattctggcaccattgcagcccgagcgcaagtgtgccagcaagcagagcacagcttcgccggcatgccctgcggaatcatggaccagttcatcagcctaatggggcagaagggtcatgctctgctgattgactgtcggagtctagaaacatcattagtcccactgagcgatccgaagttagctgttttgataacgaacagcaatgtgaggcacagcttggcgagctccgaatatcctgttcgcagacggcagtgtgaggaagtcgcacgtgctctgggtaaagaaagcctgcgagaggttcaattggaggaactagaggcggctagagatttggtctccaaggagggcttccgccgggccagacatgttgtcggcgaaattcgccgtacagctcaggccgcagccgcacttcgtaggggcgattaccgggctttcggtcgtctgatggtggaatcgcaccggtccctccgagatgactacgaagtgtcttgccctgagctagaccagctcgtcgaggcggccctcgcggttcccggcgtctacggaagtcgcatgactggtgggggcttcggggggtgcactgtgacactgttagaagctagtgccgcacctcatgcaatgcggcatattcaagaacattacggcggtaccgccacgttttatctgtctcaggccgctgatggggccaaagtactttgtttg

SEQ ID NO: 11885 - DNA, 1176 bp, synthetic construct
  misc_feature 1..1176: note = source = /note="Description of Artificial Sequence: Synthetic coding sequence"
  source 1..1176: mol_type = other DNA
atggctgctttgaggcaaccacaggtggccgaactgctggccgaggccagaagagcgtttagagaggagtttggggctgagcccgagctggctgtttctgcgcctggcagggtgaatctgattggagaacataccgactacaaccagggactggttctgcccatggctcttgagctcatgacagtcctcgtcgggagccctagaaaggatggcctggtcagtcttctgaccacgtctgagggggctgacgagcctcagcgcctacagttcccactgcccactgcccagagaagcctggagccaggcacaccaagatgggccaactacgttaagggagtgattcagtattaccccgccgcccccctgcctgggttttctgccgtggtggtctcgtccgtcccgttgggcggagggctgtcatcctccgcaagtctcgaggtggcgacatatactttcttacagcagctctgcccggattctggcacaatcgccgccagagctcaggtctgtcagcaggccgagcattcatttgcgggcatgccatgcggtatcatggaccagtttatttctctcatgggtcagaagggtcatgctttgctaattgattgtcgatctcttgagaccagcctcgtgccactcagcgatcctaaattggccgtccttattaccaactccaacgtcaggcactctctggcaagtagtgaataccccgtgaggaggaggcaatgtgaagaggtcgcacgggccctgggtaaagaaagcctgagggaggtccagcttgaagagctggaggccgcaagagatctggtgagcaaggagggattcaggcgagccagacatgtggtgggggagataagaaggacggcccaggccgctgccgctcttaggcgtggcgactaccgggcatttggtaggttgatggtggagtcacataggtcattgcgggatgactacgaggtgtcctgcccggagctcgaccagcttgtggaggcggccctggccgtgccgggggtctacggctcaagaatgactggcggcggatttggaggatgcaccgtgaccttacttgaggcctctgccgcgccccatgctatgcggcacattcaagaacactacgggggcacggcgacattttatctgagccaggccgcagatggggcaaaggttttgtgcctg

SEQ ID NO: 11886 - DNA, 1176 bp, synthetic construct
  misc_feature 1..1176: note = source = /note="Description of Artificial Sequence: Synthetic coding sequence"
  source 1..1176: mol_type = other DNA
atggcagccctgcgtcagccacaagtagctgagctcttggcagaggccagacgagcgttccgggaggaattcggagctgaaccggagctcgcagtttccgcccccggccgtgttaatttgatcggcgagcacacggactacaatcaaggtttagtactccccatggctttggaactgatgaccgtactggtgggtagcccgcggaaggacggcctggtgtccttactcactacctccgagggggctgatgagccgcaacggctgcaattccctcttcccaccgcccagcgatctctcgaacccggtacccctcgctgggcgaactatgttaagggcgtcatccagtactaccctgccgctccacttccaggcttctcggccgtcgtagtatctagtgtccccctgggaggaggactgtcgtccagcgcgagcctcgaggtggctacgtacaccttcctgcagcagctttgccccgactccggcaccatcgcggcccgtgcacaggtctgccagcaggcggagcactcgttcgctggcatgccttgcgggataatggaccagttcatctccttgatgggccagaagggacatgccttgctgattgactgccgtagtctggagacgtcactggtgcctttgagtgatcctaagctagccgtcctcattaccaactcaaacgtccggcacagtctcgcaagctcggagtaccccgttcgccgcaggcagtgcgaggaagtggcccgtgcactgggtaaggaatccctgcgtgaggtccagctcgaggagttggaagccgctagggacttagttagcaaggagggttttaggcgggctcgccacgtcgtcggcgagatccggcgcaccgcgcaagccgcagccgcgctaagacgtggcgattaccgggcgttcggccgcctcatggtggagagccatcgttccctgagagacgattacgaggtcagctgcccagaattggaccaattagtggaggccgccctggccgtccccggcgtgtacggaagccgtatgacgggaggcggcttcggaggatgcactgtaacccttctcgaggcaagcgcagctccgcacgcgatgcgccacatccaagagcattacggcggtaccgccaccttctacttatcccaggcggctgacggcgctaaagtcttgtgcctc

SEQ ID NO: 11887 - DNA, 1176 bp, synthetic construct
  misc_feature 1..1176: note = source = /note="Description of Artificial Sequence: Synthetic coding sequence"
  source 1..1176: mol_type = other DNA
atggcggcgctacgtcaaccgcaagtagcggaattattagcggaagcgcgacgagcgtttcgagaagaatttggtgcggaaccggaattagcggtatcggcgccgggtcgagtaaatttaataggtgaacatacggattataatcaaggtctagttttaccgatggcgctagaattaatgacggttctagttggttcgccgcgaaaagatggtttagtttcgttattaacgacgtcggaaggtgcggatgaaccgcaacgtttacaatttccgttaccgacggcgcaacgatcgttagaaccgggtacgccgcgttgggcgaattatgtaaaaggtgtaatacaatattatccggcggcgccgctaccgggtttttcggcggttgtagtttcgtcggtaccgctaggtggtggtttatcgtcgtcggcgtcgctagaagtagcgacgtatacgtttctacaacaattatgtccggattcgggtacgatagcggcgcgtgcgcaagtttgtcaacaagcggaacattcgtttgcgggtatgccgtgtggtataatggatcaatttatatcgttaatgggtcaaaaaggtcatgcgttattaatagattgtcgttcgttagaaacgtcgctagttccgttatcggatccgaaattagcggtactaataacgaattcgaatgttcgtcattcgttagcgtcgtcggaatatccggttcgtcgtcgacaatgtgaagaagtagcgcgtgcgctaggtaaagaatcgttacgagaagttcaattagaagaactagaagcggcgcgagatctagtatcgaaagaaggttttcgtcgtgcgcgacatgtagttggtgaaatacgtcgaacggcgcaagcggcggcggcgctacgtcgaggtgattatcgtgcgtttggtcgtctaatggtagaatcgcatcgatcgctacgagatgattatgaagtttcgtgtccggaattagatcaactagtagaagcggcgttagcggttccgggtgtttatggttcgcgaatgacgggtggtggttttggtggttgtacggtaacgctactagaagcgtcggcggcgccgcatgcgatgcgtcatatacaagaacattatggtggtacggcgacgttttatttatcgcaagcggcggatggtgcgaaagtattatgttta

SEQ ID NO: 11888 - DNA, 1176 bp, synthetic construct
  misc_feature 1..1176: note = source = /note="Description of Artificial Sequence: Synthetic coding sequence"
  source 1..1176: mol_type = other DNA
atggcagcgctccgccagccacaggtggcagagctgctggcggaagcacgcagagcgtttcgtgaggagtttggagccgaaccggaactggccgtgtccgcgcctggccgagtcaatcttataggggaacataccgactataaccagggactcgtgcttcccatggccctcgagctcatgacggtgctggtgggcagcccaagaaaggacgggctggtcagccttctgactacgtcggaaggagccgacgaacctcagcgactccagtttccactgcccaccgcacaaagatcacttgagccgggaacgccccggtgggcaaactacgtgaagggagttattcaatactaccctgcagcacccctgccagggttcagcgcagttgtggtgtcctctgttccactgggtggcggccttagcagctcggcgagccttgaggtggcaacctacacctttctgcaacaactctgcccagatagcggcactatcgctgcacgggcacaagtgtgtcaacaagcagaacacagcttcgcaggaatgccttgcggtatcatggatcagtttatctctttgatgggacaaaagggtcacgccctcctcatagattgtagaagtctcgaaacctctttggtaccccttagcgacccgaaacttgctgtgcttattactaactcgaacgtccgtcattcgctggcgtcctcagaataccccgtgagacgccgacagtgcgaagaagtggcacgtgcgcttggaaaggaatcccttagggaagtccagctggaagagcttgaggctgctcgggacctggtcagcaaagagggattcaggcgggcccggcacgtggtgggtgagatcagaagaaccgcccaagctgccgccgcccttagacggggagattaccgggcttttggtcgccttatggtggaatcacatcgctctctgcgcgatgattacgaagtgtcgtgtcccgaactcgatcaattggtggaagccgcactcgccgtccctggtgtctacggatcacgcatgactggtggaggtttcggcggttgcactgtgactttgctggaggcgtcggcggccccacatgcaatgcggcatatccaagaacactacggtggaactgctaccttttatctgtcgcaagctgccgatggggcaaaggtcctctgcctg

SEQ ID NO: 11889 - DNA, 1176 bp, synthetic construct
  misc_feature 1..1176: note = source = /note="Description of Artificial Sequence: Synthetic coding sequence"
  source 1..1176: mol_type = other DNA
atggccgcactccggcagcctcaggtggcagaactgcttgcagaggctaggcgtgcctttagagaggaattcggagcagaacctgagcttgccgtctccgcacctggaagagtgaatcttataggcgaacataccgattacaaccagggtcttgtgcttcccatggctttggaacttatgaccgtgctggtggggagcccgcggaaggatggactggtgtcgcttctgaccacttcagaaggtgcggacgagccacaaaggctccagtttcccctgcccaccgcgcagcgcagcttggagccgggaacccctaggtgggcaaattacgtcaagggagtgatacagtactatcctgcagccccactgccagggttcagcgctgtggtcgtgtcgagcgtgccactgggcggagggctctcaagctccgcatcccttgaggtggcaacctacacttttctccagcagctgtgtccagattcgggaacgatcgccgctcgtgcccaggtgtgtcaacaagcagaacactcctttgcgggaatgccctgcggaatcatggaccaattcatttccctgatgggtcaaaaggggcatgcacttctcatcgactgccggtcgctggaaacttctctggtccctcttagcgatcctaagttggcagttctgataactaattccaacgtgcgtcactcgcttgcgtcctcagaataccccgtgcgccgtaggcagtgtgaagaagtagctcgtgccttgggtaaggagagcctgagggaagtccagctggaggagcttgaggcagcacgcgatctggtgtccaaggagggattcagacgagcaagacatgtggtgggagagatccgtagaaccgcacaagcagccgccgctttgcgacgcggagactacagagcattcggacggctgatggtggagtcgcatcgaagccttagagatgattacgaagtttcatgccccgagcttgatcagctggtcgaggctgcactggccgttcccggtgtgtacgggtcgcggatgaccgggggaggattcggtgggtgtactgtgactttgctcgaagcctccgcagcgcctcatgcaatgcgccatattcaggagcactacggcggtaccgcgactttctacctctcccaggcggcagatggagcaaaagtgctctgtctt

SEQ ID NO: 11890 - DNA, 1176 bp, synthetic construct
  misc_feature 1..1176: note = source = /note="Description of Artificial Sequence: Synthetic coding sequence"
  source 1..1176: mol_type = other DNA
atggccgcactgcggcagcctcaggttgcagaactccttgcagaggcgcggagagcttttcgagaagagtttggagcagaaccagaacttgccgtgtcggcccctggacgtgtcaacctgataggagagcatactgattacaaccaggggctggtgcttcctatggcacttgagctcatgactgtgctcgtgggctctccgcgcaaagatgggcttgtttcactccttactacttcggaaggagccgatgagccccaaaggcttcagtttccactgccaaccgctcagcggagcctggagcccggaaccccaagatgggcaaactacgtgaaaggtgtcattcaatactaccctgcggctcccctgccgggattttcagcagtggtggtgtcctccgtcccactcggaggcgggctgtcctctagcgcatctctggaagtggctacttacaccttccttcaacagctttgtcccgactccggcaccatagctgccagagcccaagtgtgtcaacaggcagaacactccttcgctggtatgccatgcggtataatggatcaattcatctcactcatgggacaaaagggacatgcactgcttattgattgcaggagccttgaaacttccctggtgcctctgtccgaccctaagctggcagttcttattaccaacagcaacgtgcggcactcactggccagctcagagtacccggtgaggaggcgccagtgtgaggaggtcgctagggcattgggtaaggaatcgctcagagaggtgcaacttgaagaactggaggcagcacgggacctcgtcagcaaggaaggctttagaagagcacgacacgtcgtgggcgaaattcgccgaacggcccaagcggccgccgcgttgcggagaggggattacagagcatttggtcgcctgatggtggaatcgcataggtcactgagagacgattatgaggtgagctgccctgaacttgatcaacttgtcgaggcagcacttgcagtccccggagtgtacggatccagaatgaccggtggtggcttcggcggctgtactgtgacgcttcttgaagcatcagctgctcctcatgcgatgcgtcatatccaggagcattacgggggtaccgcaactttctatctttcccaagcagcagatggggcgaaggtcctctgcctc

SEQ ID NO: 11891 - DNA, 1176 bp, synthetic construct
  misc_feature 1..1176: note = source = /note="Description of Artificial Sequence: Synthetic coding sequence"
  source 1..1176: mol_type = other DNA
atggccgcacttcggcaaccacaagtagcagagctgctggcagaagcacgaagggcatttcgggaggaatttggggctgagcctgagctggccgtgtcagcgccagggcgggtgaatctcatcggagaacacactgattacaatcagggcctcgtccttcctatggcgctggaacttatgactgtcttggtcggatcaccaaggaaggatgggttggtgtcgcttcttactacttcagaaggagccgacgagccacaaagactccaattccctcttcctaccgcgcagagatcgctggaaccagggacccccagatgggctaactacgtgaaaggtgtgattcagtactacccagcagcaccccttccaggattttcggcagtcgtggtcagcagcgttcccctcggcggcgggctgtcgtctagtgcatccctcgaagtggccacctacacgttcttgcagcaactgtgtccggattccggtactattgcagcacgcgcccaggtctgtcaacaagcagaacattcatttgcaggtatgccatgtggtattatggatcaattcatctccctgatgggtcagaagggacatgcacttctgatcgattgcagaagccttgaaacctcattggtgcctctgtcagaccctaagctggccgtgctgattaccaacagcaacgtgcggcattccctggcgagctctgagtaccctgtgagacgtcggcagtgcgaggaagtggcgcgagctcttggtaaggaatcgctgcgcgaggtgcagctggaagaactcgaggcggcacgggacttggtgtcgaaagagggttttcggagggccaggcacgtggtgggtgagatcagaagaaccgcacaggcagctgccgccctgcggcgtggagattacagggcatttggccgcttgatggtggagtcacaccgctcccttcgcgatgattacgaagttagctgtccggaactggatcagctggtcgaagcagcacttgcagtgccaggagtgtacggttcgaggatgaccggtggagggtttggagggtgtaccgtgacgcttttggaggcgtccgcggcgccccatgcaatgaggcacattcaagaacactacggaggaaccgcaaccttctacctgtctcaagcagcagatggagccaaagtgctctgtctg

SEQ ID NO: 11892 - DNA, 1176 bp, synthetic construct
  misc_feature 1..1176: note = source = /note="Description of Artificial Sequence: Synthetic coding sequence"
  source 1..1176: mol_type = other DNA
atggctgcgttgagacaaccacaagtagctgagctactcgcggaggcaagacgagcctttagggaggagttcggcgcagaacccgaactggccgtgtccgcaccaggacgagtgaacctcattggtgaacacactgactacaatcaggggctagtgctgcccatggcattggaattgatgaccgtgctggtcggaagcccgagaaaggacggcctcgtcagcctgttgaccacgagcgaaggcgcggacgaaccccagaggctccagtttccactgcctaccgctcagcggtcactcgaacctggcaccccccgatgggctaattacgtgaagggcgtaatccaatattatcctgcggcaccccttcccggcttctccgctgtagtggtgagcagtgtcccattgggcggggggctttcaagcagcgcgagtctggaggtggctacttatacatttctgcagcaactgtgcccagatagcgggaccattgctgccagggcgcaagtatgccagcaggccgagcattcattcgcgggaatgccttgtggtataatggaccagtttataagcctgatgggtcagaagggacacgcattgctgatcgactgccggagtctggagacatcattggtccccctctccgatcccaaacttgcagtcctgattactaattcgaacgtccgtcactccttggcatcgagcgagtatcccgtgcgcagaaggcagtgtgaagaagtcgcacgtgccctcggaaaggaaagtcttcgggaagttcagctagaggagcttgaagccgccagggacctggttagcaaagaggggtttagacgtgcacgccacgtcgtaggagagattcgtcggaccgcacaggcagccgcagcactccggagaggcgattaccgagcattcggccggctgatggtggaaagccaccgaagtctgcgagatgattacgaggtcagctgtcccgaacttgatcagctagtcgaagccgctctggccgtccccggggtgtatggatccaggatgacaggaggaggcttcgggggctgtactgtgacactcttggaggcctcagctgctccccacgctatgagacacatccaggaacactacggaggcacagctactttctacctatctcaggccgcagatggagccaaggtactgtgcctg

SEQ ID NO: 11893 - DNA, 1176 bp, synthetic construct
  misc_feature 1..1176: note = source = /note="Description of Artificial Sequence: Synthetic coding sequence"
  source 1..1176: mol_type = other DNA
atggccgccctgcgacagcctcaagttgccgaacttctggccgaggccaggagggcatttagggaagaatttggagccgaacctgagctcgctgtaagcgcaccaggacgcgtgaatctgattggggaacacacggattataaccagggcttggtgctgccaatggcacttgaactcatgaccgtcctggtgggatctcctcgaaaagatggcctggtatccttgctgacaaccagcgaaggagctgacgagccccagaggttgcaattcccgctgcctacagctcagaggagcctggagccgggaaccccaagatgggccaattatgtgaaaggggtaattcagtattacccagccgctcctctcccgggattttctgctgtggtcgtatcttcagtaccattggggggcggtctgagcagtagcgcctcattggaagtagcaacatataccttcctccagcaactgtgcccggattccggcacgattgcagctcgagcacaagtgtgtcagcaagcagagcattctttcgcggggatgccctgtggtattatggatcaatttatttctctgatgggacagaaaggacacgctctgctcatcgactgtagatctctcgaaacaagcctcgtgccactttctgatccgaagcttgccgtgctgatcacaaattctaacgtgcgacatagtctcgcttcctcagaatacccagtgcggcgacggcagtgcgaggaagtcgcccgggcactcggcaaagaatcattgcgcgaagtgcagctggaagagcttgaggcggcccgcgatctcgtgagtaaggaaggtttcagaagggcgcggcacgttgtgggcgaaatcagacgcacagcacaggccgctgcagccctgagacgcggtgattatcgcgctttcgggcgcttgatggtcgaaagccacagatctctgcgagacgactacgaggtgagttgccccgaactggaccagctcgttgaggccgccctcgccgtccctggggtctacggatcaagaatgacaggaggcggatttggtggctgcactgtgactctgctggaggctagcgcagccccacacgcgatgaggcacattcaggagcactacggggggactgccacgttttatctcagtcaagcggcagatggcgccaaggtgctctgtttg

SEQ ID NO: 11894 - DNA, 1176 bp, synthetic construct
  misc_feature 1..1176: note = source = /note="Description of Artificial Sequence: Synthetic coding sequence"
  source 1..1176: mol_type = other DNA
atggcagctttgcggcagccacaggtcgccgaactgctcgctgaagctcgtcgcgctttccgggaagagttcggtgctgaaccagagctggccgtcagtgcgcctggcagggtgaacctgataggggagcatactgattataatcaaggacttgtgctgccaatggcgcttgaactgatgactgtgttggtcggaagccccagaaaggatggactcgtttctctgttgacaacctccgagggggcagatgagccacagaggttgcaattcccgctcccaactgctcagaggagtctggaaccggggactccccgctgggccaactacgtgaaaggtgttatacaatactacccagctgccccgctgcctggcttcagtgccgtagtcgttagctctgtccctctgggcgggggacttagcagctccgcttccctggaagttgccacttacactttcttacagcagctctgccccgactctggcaccattgccgctagggcccaagtgtgtcagcaagcagagcattcgttcgctggtatgccttgcggcatcatggaccagtttattagcctgatgggtcaaaaaggccacgcactgctcatcgactgccgcagcctggagactagcctggttcctctttcagatcctaaacttgctgtgttgatcactaacagcaatgtcaggcacagcctcgccagcagcgaatatcccgttaggaggcggcagtgcgaagaggtggcgcgcgctttgggcaaagaaagcctcagggaggtgcagctcgaggagttagaggctgcgcgcgatcttgtgtcaaaggagggcttccgtagggcaagacatgtggttggagagattcgtagaactgcacaggccgccgctgcgctgaggagaggtgactatcgggcttttggccgcctgatggtcgagagccacaggagtcttcgcgacgattacgaagtaagctgtccagagttggaccaactagtggaagcggcactggcggttcctggtgtatacggatcccggatgaccggtggtggctttggaggttgcacagttactctgttggaagcctcagctgctccgcatgctatgcgccatatccaagagcattatggaggaacagctactttttacctcagccaggctgcggatggcgctaaggttctctgtttg

SEQ ID NO: 11895 - DNA, 1176 bp, synthetic construct
  misc_feature 1..1176: note = source = /note="Description of Artificial Sequence: Synthetic coding sequence"
  source 1..1176: mol_type = other DNA
atggccgctctgaggcagcctcaggtagctgagctcctggctgaagcccggagagcgttcagagaagaatttggtgccgagccggagttggcagtctctgcgcccggcagagtaaatcttatcggggagcatactgattataaccagggcctggtccttcctatggctctcgagctgatgactgtcctggtaggatcaccacgaaaagacggactcgtttccctacttaccacatcagagggtgcagacgagcctcagcgtctgcagttccctctacccaccgctcagagaagtctggagccaggcactccccgctgggccaactatgtgaaaggtgtcatccagtactacccagccgcccctttacccgggtttagcgccgtggtcgtgtcaagcgtgccgctcggtggcgggcttagctcgtccgcaagtctggaggtcgctacatatacgttcctgcagcagctgtgccccgattctggcactatagccgctagggcacaggtgtgccaacaggcagagcattcttttgccgggatgccctgtggaataatggaccagttcataagcctcatggggcagaaggggcacgcgctgttaattgactgtaggtccctggaaacttccctcgttccactgtctgacccgaagcttgcagttcttatcacaaacagcaacgtcagacactctcttgcatcttccgagtaccccgtgaggcgcagacagtgtgaagaagttgctagggcactgggcaaagagtctctccgcgaggtgcagcttgaggagcttgaagcggcaagagatcttgtttccaaggaaggcttccggcgagcgcgccacgttgtcggcgagatcagacggactgcacaggccgctgccgcgctcagaaggggagattatcgggcttttgggcgtctgatggtggaatctcacagatcactccgtgacgactacgaggtgtcatgcccggaactagaccagttggttgaggcagccctggccgtccccggcgtgtacggatccaggatgaccggaggcggcttcgggggctgtactgtgacactacttgaggcaagcgctgccccgcatgctatgcgccatatccaagagcactacgggggcacagctactttctatctgtctcaagccgctgacggtgcaaaggtcttgtgtctg

SEQ ID NO: 11896 - DNA, 1176 bp, synthetic construct
  misc_feature 1..1176: note = source = /note="Description of Artificial Sequence: Synthetic coding sequence"
  source 1..1176: mol_type = other DNA
atggcggccctgcggcagccacaggtggccgaattgttggccgaggcacgacgtgcgtttagggaggagtttggggccgagccagaactcgccgtgtctgcccccggccgggttaatttgatcggtgagcatacggactacaaccaaggcctagtgcttccaatggctctggagctgatgacggtgttggtgggcagccctcgtaaggacggcttggtgtcactccttactacatcagaaggtgctgacgagccgcaaaggctccagtttcctctgcccaccgcacagaggtcactggagccaggcactccacggtgggcaaattatgttaagggagtgatccagtattatcccgccgcccccctgcccgggttttctgcagtggtggtctcctctgtgccactgggggggggcctttcgtcctccgccagtttagaggttgccacctacactttcctacagcaactctgccccgactcaggcaccattgcagctcgagcccaggtgtgtcagcaagcagagcactcctttgcaggcatgccttgtggcattatggatcaattcattagtctcatggggcagaaaggccatgccctgctgatcgactgtaggtccctggaaacatctttggtccccctcagcgaccctaaactggccgttctgatcaccaatagcaacgtgcgccactccctcgcaagctcagagtatcctgtgcgacggaggcagtgtgaagaagttgcaagagctcttggcaaggagtctctgcgcgaggtacaacttgaagagctggaggcggcccgagatctggtctctaaggagggcttccgacgggctagacatgtcgttggagagatccggaggacggcccaggcagcggccgccctacgacgaggcgactatcgagcgtttggtagactgatggttgagtctcaccgatccctgagagacgattatgaggtctcctgcccagagttggaccagctggtggaggccgctctggctgtgcccggagtgtatggcagtaggatgacgggcgggggcttcggcggctgcaccgtgactctactcgaggccagcgcggcgccgcacgcaatgaggcatatccaggaacattacggtggcaccgcaacattctacctaagccaggccgctgatggcgccaaggtgctctgtctg

SEQ ID NO: 11897 - DNA, 1176 bp, synthetic construct
  misc_feature 1..1176: note = source = /note="Description of Artificial Sequence: Synthetic coding sequence"
  source 1..1176: mol_type = other DNA
atggccgctctgcgccaacctcaggtggccgaactcttggcggaggctagacgggctttccgggaagaattcggagcagaaccagagctcgctgtgtccgcgccgggtagggttaacctgatcggagagcatactgattacaatcagggccttgtgctccctatggccctggaattgatgactgtgctggtgggatccccgcgcaaggacggactcgtctccctgctcactacgtccgagggtgcggatgaaccgcaacggctgcagttcccgcttccaaccgcccagagaagcctggaaccagggacccctagatgggccaactacgtgaaaggggtgatccaatactatcccgcggcaccactgccaggtttttctgccgtggtggtgtcctcggtccctctggggggaggcctgtcaagctcggcgtcgctggaggtggccacgtacaccttcctgcaacagctctgcccggacagcggcaccattgccgcgagggcccaggtgtgccaacaggccgagcactcgtttgccggaatgccctgcggaatcatggaccaattcatcagtctgatgggccagaagggacatgccctgttgatcgattgtaggtcactggagacttcattggtccccctgtcagacccgaaacttgcggtcctgattaccaactccaatgtccgccatagcctggcgtcgtccgagtacccagtgcgccgacgccagtgcgaggaggtcgcaagagcactcgggaaggaatccctgagagaagtgcagcttgaagaactggaagctgcacgggatttggtgtcgaaggaaggattccgtcgggcccggcatgtggtaggagaaatccgccgcactgcacaggcagccgctgctctcagacggggggactaccgggcctttggccgcctgatggtggaaagccaccgatcgctgcgcgacgattacgaggtgagctgcccggagctcgaccaactcgtcgaagccgccctggcggtcccgggcgtctacggctcacggatgaccggaggaggtttcggaggctgcaccgttaccctcctggaagcatcggctgcgccgcacgcgatgcgccacatccaggagcactacggaggaactgcaactttctacctttcacaggctgccgacggagcaaaggtgctctgtctc

SEQ ID NO: 11898 - DNA, 1176 bp, synthetic construct
  misc_feature 1..1176: note = source = /note="Description of Artificial Sequence: Synthetic coding sequence"
  source 1..1176: mol_type = other DNA
atggcagcactgcgtcagccccaggtcgctgaactgctggcagaagcccgcagggccttccgcgaggaattcggcgcagaacctgaactggcagtgagcgctcctggacgcgtgaacctgatcggggagcatacagactataaccagggcttagtgctacccatggcattagagcttatgaccgtgctagtgggaagccctagaaaggacggactcgtgtccctgctaacaacctccgaaggcgccgatgaaccacaaaggctgcagtttccccttccaaccgctcagagaagtctggaacctggcacaccaaggtgggcaaattacgtgaagggcgtgatccagtactatccagccgcccctctgcctgggtttagtgccgttgtggtttcaagcgttcccctgggtggcgggctgtcaagtagcgccagcctggaggttgccacatatacattcctgcagcaactatgtcctgattctggtaccatcgcagcccgggcccaggtctgtcagcaggccgagcacagcttcgctggaatgccatgtgggattatggatcagtttatttccctgatgggacagaagggacacgccctgctgattgactgtcgtagtctggaaacctctctggtgccattaagtgaccccaaattggctgttttgattactaacagtaatgtgaggcactcattggcctcctccgagtaccctgttagaaggcggcagtgcgaagaagttgccagagccctgggtaaggagtcccttagagaagtgcaattggaagagttagaagccgcccgcgatctggtgagcaaggaaggatttcgacgagcccggcatgtcgttggggagattcgaagaaccgctcaggctgcagccgcactgaggagaggagattatagggcattcggcagactcatggttgagtcacataggagccttcgagatgactatgaagtcagttgtccagaattagatcagctggtcgaggcagctctggcagtgcccggggtctacggcagccggatgacaggggggggcttcggcggttgtaccgtgactcttctggaggcctccgccgcccctcacgccatgagacatattcaggagcattacgggggcactgccaccttttatctatctcaagctgccgatggtgcaaaagttttgtgtttg

SEQ ID NO: 11899 - DNA, 1176 bp, synthetic construct
  misc_feature 1..1176: note = source = /note="Description of Artificial Sequence: Synthetic coding sequence"
  source 1..1176: mol_type = other DNA
atggctgcactgcgacagccacaggtggccgaactcctcgcagaagcacgacgggcgttccgggaagaatttggggcagagcctgagctggcagtctcggctcctggaagagtcaaccttatcggggagcacaccgattacaaccaaggactggttcttcccatggcattggagctcatgactgtgctggtgggatcgccaagaaaggacggacttgtgagccttctgaccacttcagaaggcgcagacgaaccccaacggcttcagttcccacttcctactgcacagcgcagcctggagcctggcaccccaagatgggcaaactatgtcaaaggtgtgatacagtactacccagccgcacctctgcctgggttctcagcagtggtcgtgtcgtccgtacctcttggaggcggactttcaagctccgcctcccttgaagtggcaacgtacacctttcttcagcaactgtgtccagacagcggtaccatcgccgcaagagcccaggtgtgccagcaagccgaacattcatttgccggtatgccatgcggcatcatggatcagttcatatcactgatgggccaaaaaggtcatgccttgttgattgattgtcgaagccttgaaacttcgctggtgcccctttccgaccctaagttggccgtcctgattaccaactcgaacgtgcggcattcgctcgcatcttccgaataccccgtcagacgccggcagtgtgaggaagtggcaagggcactgggaaaggaaagccttagggaagtgcaactcgaagaactggaggcagcgagagatctggttagcaaggaaggattccgtcgcgcccgccacgtggtcggtgagattagacggaccgcgcaagcggcagcagcacttcggagaggcgattaccgcgccttcggacgtctcatggtggagtcccaccgctctctccgagacgattacgaagtctcttgcccagaattggaccagctggtggaagcagcgcttgccgtacctggagtgtacggttcccggatgaccggtggtggtttcggtggttgcactgtgacccttctggaagcctcagcggcgccgcacgccatgcggcacatccaggaacattacggaggcacggctactttttacctttcacaagctgccgatggagcgaaagtgctgtgtctt

SEQ ID NO: 11900 - DNA, 1176 bp, synthetic construct
  misc_feature 1..1176: note = source = /note="Description of Artificial Sequence: Synthetic coding sequence"
  source 1..1176: mol_type = other DNA
atggccgccctgagacaaccacaggtggcggaactcctcgcggaggcacggcgcgccttccgggaggagtttggcgctgagcctgagctggcggtgtccgcccctggacgcgtgaaccttattggagaacatactgattacaatcaggggctcgttctccccatggcactcgagctgatgaccgttctggtcggctccccacgcaaggacggactggtgtcgttgcttaccacctcggagggagccgatgagccgcaaaggcttcagtttcccttgcctaccgcccaaagaagcctggagccggggactccacggtgggctaactacgtgaagggggtgattcagtattacccagcggcgccactgccgggcttctccgccgtcgtggtgtcatcagtgccactcggtggaggtttgagcagttccgcctcactcgaggtggcaacttacacttttctgcagcagctctgcccagattctggtactatcgcggccagggcccaggtatgccaacaagctgaacactcgttcgcaggaatgccttgcggcataatggaccagttcatcagcctcatggggcagaagggccacgctctgttgatcgactgtcgctccctggaaacgtcactcgtgcccctgagcgaccctaaactggcggtgctgatcactaattccaacgtgcggcatagcctggcgtcaagcgagtacccggtcaggagaagacaatgcgaagaagtggcccgcgcgctcggtaaagaatcactgagagaagtccagctggaagaactggaggcagcgagggacctcgtcagcaaggaagggttccggcgcgcaagacatgtggtgggtgaaattcgcagaaccgcccaggccgcggccgctctccgcaggggagattatagagcgttcggacgcctgatggtcgaatcacatcggtccctgcgcgacgactacgaggtgtcgtgcccagagttggaccaactggtggaggccgctttggccgtcccgggggtttacgggagccgtatgaccggcggtggattcggaggatgtactgtgactctgctcgaggcttcggcagccccacacgctatgcggcacatccaagagcactacggaggaaccgcgacgttctacctgagccaggcagcagacggtgcaaaagttctctgcctc

SEQ ID NO: 11901 - DNA, 1176 bp, synthetic construct
  misc_feature 1..1176: note = source = /note="Description of Artificial Sequence: Synthetic coding sequence"
  source 1..1176: mol_type = other DNA
atggccgcactgaggcagccgcaggtagcggagctgctcgctgaagcacggagggcctttagggaggagttcggcgccgagccggaactagcagtctcagcccccgggagagtgaatctaattggagagcatacagattacaatcagggattagtgttgcccatggctctcgagcttatgacggtgctggtggggagtcctcgcaaagacggattggtctccctcctgacaaccagcgaaggggctgatgagccccaacgactgcaattccccttgcccactgcccaacggagcctcgagccgggaacgccccggtgggcaaactacgtaaagggtgtcatccaatactatcctgccgccccattgcccggtttcagcgctgtcgtagtcagctcagtgccccttggaggcgggctgagcagctcggcatcgctagaggtggccacttacacattcctccagcagttatgtccagattccggaaccattgcagcgcgcgcacaggtttgccagcaggcagaacacagcttcgctgggatgccatgtggcatcatggatcagttcataagcttaatggggcagaaaggacacgcgctgctaatagactgccgctctttagaaacatccctcgtgcccctctccgaccccaaattggccgtgctaatcaccaactcaaacgttcgccactccttagcttcttcagaataccccgttcgccggaggcagtgcgaggaagtggcacgggccctcgggaaggaatcactgcgtgaggtacaattggaggagctggaagcggccagagatctggtgagtaaagagggcttccgccgcgcgagacatgtggttggcgaaattagacggacagcccaggcagccgccgccttgagacggggggattatcgagccttcggccggcttatggtggagagccataggtccctcagagacgattacgaggtctcatgcccagaactggatcaactagtcgaggcagctctggccgtccccggtgtgtatggctccagaatgactggcggggggtttggtggctgcactgtgaccctgctcgaggcctctgcagcgccccacgccatgcggcatatccaggaacattatggtgggactgcaactttttatctcagccaggccgctgacggtgccaaggttctgtgctta

SEQ ID NO: 11902 - DNA, 1176 bp, synthetic construct
  misc_feature 1..1176: note = source = /note="Description of Artificial Sequence: Synthetic coding sequence"
  source 1..1176: mol_type = other DNA
atggcagccctccggcagccccaagtcgcagaattgctcgccgaagctcggagggcctttcgtgaggagttcggcgccgaacctgaattagccgtgtctgcccccggccgcgtgaacctaataggtgagcatacggactacaatcagggtctcgtcttaccgatggccctggagttaatgacggtgctggttggcagcccgaggaaggacggcctggtatccctgctgacaactagtgagggagccgacgagccgcaacgtctgcagtttcctcttcccacggcacagcgcagcttagagcccggtacaccgcggtgggccaattacgtgaagggagtcatacagtactatccggccgcgccactgcctggattttccgccgtggtcgtgtcgtccgtccccttgggtggcggattgagttcgtcggctagcctggaagtcgcgacgtacaccttcttgcagcaactgtgtcccgacagcggcacgatcgctgcccgagcacaagtctgccaacaggcggagcattcatttgccggaatgccgtgcggcattatggaccagttcatttcccttatgggtcagaaaggacacgccttactgattgactgccgctctctagagaccagtctggttccattatccgatccaaagctggccgtgttaatcacgaattccaatgtgcggcactccctagcgtcgtcggagtacccggtgcgccgacgtcagtgtgaagaggtagccagagccttgggcaaggagtctctgagagaggtgcagttggaggagctagaggccgctcgcgacctggtctcgaaggaaggattccgcagggcccgtcacgtggtcggcgaaattcgccgcacagcgcaggcagcagcggctttgcggcggggagattatcgtgcgttcggccgtctgatggtcgaatcccataggagtttaagggacgactacgaggtgagctgccctgagttggatcagctggtagaggccgcgctggctgtgccgggtgtttatggttcccgcatgacgggtggaggctttggaggttgcactgtgaccttgttggaagccagcgctgccccccacgcgatgagacatatccaagagcactacggagggacagcgaccttctacctgtcccaagccgctgatggcgccaaggtgctgtgtctc

SEQ ID NO: 11903 - DNA, 1176 bp, synthetic construct
  misc_feature 1..1176: note = source = /note="Description of Artificial Sequence: Synthetic coding sequence"
  source 1..1176: mol_type = other DNA
atggccgccctacggcagccccaggttgccgaactcctggcagaagcgcggagagcgttcagagaagagttcggtgcagagccagagctcgcggtctcggcccccggtcgggtaaatctgattggcgagcacacggactataaccagggtctggtgctgccaatggccttggaactgatgacagtgctggtgggctcaccacgcaaagacggactggtgtcgttgcttaccactagcgagggggctgacgaaccccagagactgcagttccccttgcctaccgcccaaagatccctagaacctggcacacctaggtgggcgaattatgtgaagggggtcattcaatactatccggccgcaccgctgcctggattcagcgccgtcgtagtgagcagtgttccactgggcggggggcttagttcatctgcgtctttagaggtcgctacctacaccttcctccagcagttgtgccccgattccggtaccattgctgctagagctcaggtctgccagcaggcagaacatagcttcgccggcatgccttgcggaatcatggatcagtttatcagcttaatggggcagaaagggcatgccctactgatagactgtagaagtctcgagacatcattggtgcccctgagcgatccaaagctcgctgttctcatcacaaacagtaatgtgaggcactcactggcttcctcagagtaccccgtcagaagacgccagtgcgaagaagtggcccgagccctaggcaaagagtccctgcgcgaggtgcaactggaggagctcgaggccgcacgcgacctcgtcagtaaggagggatttcgccgtgcacgacacgtggtgggcgagattcgaaggacagcccaggccgccgctgctttgcgccgcggcgactatagggctttcgggcgactgatggtggaatctcatcggagcctgcgggacgactatgaagtgtcttgcccagagctagatcagctagttgaggcagccctggctgtgcctggcgtgtacgggtccagaatgacgggcggtggcttcgggggttgcactgtgactttacttgaggctagtgccgcgccccacgccatgaggcacattcaggagcattacggcgggacggccaccttttacctgagccaggccgccgatggagctaaggtgctatgcctc

SEQ ID NO: 11904 - DNA, 1176 bp, synthetic construct
  misc_feature 1..1176: note = source = /note="Description of Artificial Sequence: Synthetic coding sequence"
  source 1..1176: mol_type = other DNA
atggcagctttgagacaaccccaggttgcggagctgctggccgaagcaaggagagccttccgcgaggagtttggtgcagagcctgaattggctgttagtgctccaggaagagtgaacttgataggtgagcatacagactataaccagggactggtcctgcctatggccctggagctgatgaccgtcttggtgggtagccccaggaaggacggcttggttagtctgcttacaaccagtgagggtgcagatgagccacaacgcctgcaattccccctgccgaccgctcagaggagcctggaaccgggcactcccagatgggctaactacgtaaagggtgttatccagtactaccccgcggcccccctcccgggcttcagcgctgtggtcgtgagctcagtgccgctgggaggcggccttagcagctcagccagcctggaggtggcaacgtataccttcctgcagcagctgtgccctgacagcggtaccatagccgctagggctcaagtgtgtcagcaggctgaacacagcttcgctggaatgccttgtggcatcatggaccagttcatctccctgatgggacaaaaaggccatgctttgctcattgattgcaggtccttggaaacgtcactggtgcccctgtccgatcccaagctcgcagttttgatcaccaactctaacgtcaggcatagtctcgcaagttcagagtatccagtgcgcaggagacaatgcgaagaagtggccagagccctgggcaaggagagtctgagagaagtccagctggaagaactggaggccgccagggacctggtttccaaggagggcttcaggagagctaggcatgtggtgggagagattcgcagaactgcccaggccgctgccgcactcaggcgcggtgattaccgcgcctttggtagactgatggtggagagccacagatctcttagggacgattacgaggtgtcatgccctgagctggaccaactggtagaggcggccttggctgtgccaggtgtgtacggttcccgcatgactggcggaggattcggtggttgcacagtcacgctgctggaggcaagcgccgcaccacatgccatgaggcacatccaggagcattacggtggaacggctacattctacctgagccaagcagccgatggcgccaaagttctgtgtctt

SEQ ID NO: 11905 - DNA, 1176 bp, synthetic construct
  misc_feature 1..1176: note = source = /note="Description of Artificial Sequence: Synthetic coding sequence"
  source 1..1176: mol_type = other DNA
atggctgcactccggcagccccaggtggctgagctgttggccgaggcaagaagggcatttagggaggagtttggagcagagccagagctcgccgtatctgcgccagggcgggtgaacttgatcggagagcacacagattataatcaaggcctagtactgcctatggccttggagctaatgacagtcctcgtgggaagtcctcggaaagacgggctcgtgtccttattaacgacatctgaaggcgctgacgaaccccagagacttcagtttccactgcccactgctcagagaagtctcgaacctggtacccctaggtgggcaaattacgtgaagggtgttattcaatactacccagccgcgcccttacctggcttttcggctgttgttgtgagctcggtgcccctgggtggcggcctgtcatcttccgcaagcttagaagttgctacgtacacctttctccagcagttgtgcccagactctggcactatcgccgcacgcgcacaagtgtgtcagcaggccgaacacagctttgccggtatgccctgcgggattatggatcagttcatctccctcatggggcagaaaggacatgccttgctaattgattgcaggtccctggagacttccctcgtgccactttctgacccgaaactcgccgttttgattactaattcaaatgtaagacatagtctggcaagctctgaataccccgtgcggcgcaggcagtgtgaagaggtggcccgggcccttggaaaggagtctttacgagaggtccagttggaagagctcgaagcagcaagggatctggtctccaaggagggctttagacgagctcgacacgttgtcggcgaaattaggaggacagcccaggctgctgcggcacttcgtcggggcgactatagggctttcggtcgcctgatggtcgaatcccataggtcgcttagggatgattacgaagtctcctgtccagaactcgatcagctcgttgaggcggcgctagctgtccccggggtttatggctccagaatgacagggggcggatttggcgggtgtaccgtcacattgctcgaagcttccgccgctccgcatgccatgagacatatccaagaacactatggtgggactgccactttttacctatctcaggctgccgatggcgcaaaagttttgtgcctg

SEQ ID NO: 11906 - DNA, 1176 bp, synthetic construct
  misc_feature 1..1176: note = source = /note="Description of Artificial Sequence: Synthetic coding sequence"
  source 1..1176: mol_type = other DNA
atggccgcactccggcagcctcaagtcgccgagctcctggcggaagcgcgcagagccttccgggaagagtttggagccgaaccggaacttgcggtgtcagcccctggccgcgtgaatctcatcggtgagcacaccgactacaatcaagggctggtcctgcccatggcccttgagctgatgaccgtgctcgtcggatcgccacgcaaagacggcctggtttcgctgttgaccacctcggagggcgctgacgagccccagcgcctccagtttccactgccgacggcccagcgctcgttggaaccgggaactccgaggtgggctaattacgtgaagggagtgatccagtactacccagccgctcccctccctggattttcagcagttgtagtctcatcggtgccactcggtggcggactgagctcctcggcctcactggaagtggcaacgtacactttcctccaacagctgtgcccagattccggcaccatcgccgcgcgcgcccaggtctgtcagcaggctgagcattcgttcgccggcatgccatgcggaatcatggaccagtttatcagcctgatgggacaaaaagggcacgcgctgctcatcgattgccggtcgttggagacgtcgctggtcccgctgtcagatccgaagttggcggtgctgatcacgaactcaaacgttagacactcccttgcgagctcagagtaccccgtgaggcgaaggcaatgcgaagaagtggcccgcgccctgggaaaggagtccttgcgcgaagtgcaactcgaagaactggaggcagcccgggacctggtgtcgaaagagggattccgcagggcaaggcacgtggttggcgagatccgccggacggcccaggccgctgcggctctgagacgcggagactaccgagccttcggaagattgatggtggagtcccaccgctcactgagagacgactacgaggtgagctgcccagaactggatcaactggtggaggcggcgctggcggtgccgggagtgtacggatcgaggatgactggcggagggttcggcggatgtactgtcaccctgctcgaagcctctgctgctcctcacgccatgcgccacatccaagaacattacggcggaaccgcgaccttctatctttcgcaagctgcagacggagccaaggtgctgtgcctc

SEQ ID NO: 11907 - DNA, 1176 bp, synthetic construct
  misc_feature 1..1176: note = source = /note="Description of Artificial Sequence: Synthetic coding sequence"
  source 1..1176: mol_type = other DNA
atggcagcgcttcgacagcctcaggtggctgagctactggcagaggcccgaagagccttcagggaggagttcggagccgaacctgagcttgctgtctccgccccaggccgagtcaatctgattggcgagcacaccgattacaaccagggattggtgctgccaatggccctggaactcatgacagtgctggtgggctccccccgcaaggacggcttagtgtctctcctcacgacatctgagggggccgatgagcctcaaaggctccagttcccactacccactgcccagaggtcactggagcccgggactcctcgatgggcaaactacgtcaaaggcgtgattcagtactacccggctgcccctctccctggcttttccgcagtggttgtgtcctcagtccctctgggggggggcctgtcatcctcagcaagcctggaggttgccacttacaccttcttgcagcaactgtgccccgatagtggcactatcgccgctcgagcacaggtttgtcagcaagccgagcattctttcgctggaatgccctgtggtattatggaccagttcatttctttgatgggtcagaaagggcatgccctgctgatagactgtagatctctggagaccagcctcgtaccactgagtgatcccaaactggcggttcttataaccaattctaacgtgcgacattcgcttgcaagctcagaatatcctgtgcgacgtaggcagtgcgaggaagtggctagggcactggggaaggagtctcttagggaagtccaactggaagaactggaggctgccagagacctggtgtcaaaggaggggttcagaagagccaggcacgtggtcggtgagattcggaggacagcacaggccgcagcagctcttcgtcggggcgactacagagcttttggccgtctgatggtggagagtcaccgatccctccgggacgactatgaagtgtcttgcccggaactagatcaactggtggaggcggctctcgcggtgcccggagtgtacggttcccgcatgaccggcggcgggttcgggggctgcactgtgaccctgctagaagccagcgccgcgccccacgctatgcgacatatacaagaacactacgggggaactgccacattttatttgagtcaagccgcagatggcgccaaagtcctttgtctc

SEQ ID NO: 11908 - DNA, 1176 bp, synthetic construct
  misc_feature 1..1176: note = source = /note="Description of Artificial Sequence: Synthetic coding sequence"
  source 1..1176: mol_type = other DNA
atggctgccctcaggcagccccaggtagcagaactgttggcagaagcacggcgcgccttccgagaggagttcggcgccgaacccgagctggccgtgtccgcccccggacgagtgaacctgatcggcgaacatacagattataatcagggattggtcctgcctatggcactggagctcatgactgtcttggtgggctctccgcgcaaggatgggcttgtcagcttgctgactacctccgaaggagctgatgaacctcagagactgcagttccccctccccactgcgcagcgctcccttgagccgggcactccaagatgggcgaactatgtcaagggcgtaatccagtactaccccgcagcgcctctgcctggcttttccgccgtggtagtgtcctctgtccctcttggtggtggcctgagttcaagcgcgtccttggaagtcgcgacttacacctttctgcagcagctctgcccggacagcggcacgatcgctgctagggctcaggtgtgtcagcaggctgaacatagtttcgcgggcatgccatgcggtataatggaccaatttattagcctcatgggccagaaaggccacgcccttcttatcgactgccggtccttggagacttctctggtgccgcttagcgaccccaaacttgccgttcttataactaattcaaacgtgagacactcactcgcctcttccgagtaccccgtccggaggagacagtgcgaggaagtggccagggcccttggcaaggagtcactgcgggaggttcagctggaggagcttgaagcagctagggacctggtgtctaaggagggattcagacgcgcccgccatgtggtgggggaaatccggaggacagcccaagccgcagctgccctgaggagaggggattaccgggcgttcggtaggcttatggtggaaagccacagaagccttcgagatgactacgaggttagctgcccagagctggatcaactggttgaggcggcactggcagtccctggagtttacggaagtagaatgaccgggggaggttttggcggttgtaccgtgaccctgctcgaggcgtccgccgcacctcacgccatgcgccacatccaggagcattacggtggaaccgctactttctatctctctcaggcagccgacggtgccaaggtgctgtgtctg

SEQ ID NO: 11909 - DNA, 1176 bp, synthetic construct
  misc_feature 1..1176: note = source = /note="Description of Artificial Sequence: Synthetic coding sequence"
  source 1..1176: mol_type = other DNA
atggccgcactgcggcagccacaagtggctgaactgctggcggaggccagacgggcgtttcgagaggagtttggagctgagcctgagttggctgtttccgcgccgggtagagtgaatctcatcggagaacacaccgactacaaccaaggccttgtcttacccatggcactggaactgatgactgtgctggttgggtctccgagaaaagacggcttagttagccttcttaccacttccgagggcgcagatgagccgcagcggctgcagttcccattgcctacagcccagcgcagcttggaaccaggcacaccaaggtgggccaattacgtgaaaggggttattcagtactatcctgcagcaccactgccaggattctccgccgtcgttgtctccagcgtccccctggggggggggctgagctcgagcgcctctctggaagtggccacatacacctttcttcaacagctctgtccagattcaggaacgatcgccgcgcgggcccaggtgtgccagcaagcggagcatagtttcgccggtatgccatgcgggatcatggatcaattcatctccctgatgggccagaagggccacgctttgctgattgattgcaggagccttgaaacctccctggtgccgttgtcagaccctaaactggccgtcctgattactaatagcaacgttcgccacagcctcgctagcagtgaatatcctgtaagacggagacagtgtgaagaggttgccagggccctgggaaaagagagtctgcgggaagtgcaactggaagagttagaggccgctcgggatctcgtaagtaaagaaggctttcgccgagccaggcatgttgttggagagatccggcgtacggcccaggctgccgcagctctgaggcgcggcgactatagggcttttggacggctgatggtggaatcccatcgaagcctgagggatgattatgaagtgtcttgtccagaattggaccaactggttgaggccgccctggctgtccctggagtttatggaagtcgtatgactggcggaggtttcggcggctgtaccgtgaccctccttgaagctagtgccgccccacatgctatgcgccacatacaggaacattacggtggcacagccacgttctatctgtctcaagctgctgacggagccaaagtcctgtgtctg

SEQ ID NO: 11910 - DNA, 1176 bp, synthetic construct
  misc_feature 1..1176: note = source = /note="Description of Artificial Sequence: Synthetic coding sequence"
  source 1..1176: mol_type = other DNA
atggccgcactgcgccagccgcaggttgctgagctcctcgccgaggcccgcagagcctttcgggaggagtttggcgctgaaccggaacttgcggtgtcagcccccgggcgtgtgaatctcatcggggagcacacagattacaatcagggcctggttctgccaatggcactagagctcatgacagttttggtcgggtcaccgagaaaagacgggctggtgagcctgctgacaactagtgaaggtgcagatgaaccgcagcggctacagttccccttgcccacagcacagagaagcctggaacccggcacaccccggtgggccaactacgtcaaaggggtcattcagtattatcctgccgccccactccccggtttctcagccgttgttgtttccagcgtaccacttggcggaggcctttcttcatccgctagtcttgaggtggccacatacactttcttgcaacagttgtgcccagactccggaacaatcgcggccagggctcaggtatgtcagcaggcagaacactcattcgccggtatgccctgtggtattatggaccagttcatcagtttgatgggtcagaagggccacgcgctgctcatcgactgtcgttctcttgaaacatcactggtgcctttgagcgacccgaagctagctgtgcttattacgaattctaacgtccgccactccctggcatcgagcgaataccccgtccggagacggcagtgcgaagaggtggcccgcgccctggggaaggaatcgctgcgcgaagtgcagctcgaggagttagaagcagctagagatttggtctccaaggagggttttcgtcgcgctcggcacgtcgtgggggaaattaggcggacagcgcaagccgctgccgcattgcggcgaggtgattatcgagcatttgggcgattgatggtagagtctcatagatcactcagagacgattatgaagtgagttgtcctgagcttgaccagctggtagaagctgcccttgcagtccccggagtgtacgggtccaggatgactggaggggggtttggaggctgcacagtgaccctcctggaggcaagcgcagccccacatgctatgcgacacatacaggagcactatggaggtaccgccaccttttacctgagtcaggccgccgatggcgccaaagtcctgtgtctg

SEQ ID NO: 11911 - DNA, 1176 bp, synthetic construct
  misc_feature 1..1176: note = source = /note="Description of Artificial Sequence: Synthetic coding sequence"
  source 1..1176: mol_type = other DNA
atggcagcactgcggcagccacaagtcgccgagctccttgcggaggcgaggcgtgccttcagagaagagtttggtgcagaaccggaacttgccgtgtcggctcctggcagggtgaacttgattggagaacacaccgactacaatcagggtcttgtgctccccatggccctggagttgatgactgtgttggtcggtagcccaaggaaagacggtctggtgagcctgctcaccactagtgagggtgcagatgaaccacagaggctgcaattcccgcttcctaccgcacagcgaagcctcgaacccggcacgccaaggtgggctaactacgttaagggagtgattcaatactatcctgcagcccctctgcctggtttttcagcggtcgttgtctcctcagtgccacttggtggaggcctgtcgtcctcggcatcgctggaagtggcaacttacacctttttgcaacagctgtgccccgatagcggcaccatcgcagcgcgggcacaggtctgccaacaagcagagcattcgttcgcgggtatgccatgcggaattatggatcaattcatttcactgatgggccagaagggacacgctcttcttattgactgtcgatcccttgaaacctcccttgtgcctctgtccgatccaaaactggcggtccttattactaacagcaacgtgcgccattcactggcatccagcgaatatccagtgcgtcgacgccagtgtgaagaagtggcccgcgcattgggaaaggaatccttgcgagaggtccaactggaggaacttgaagctgcaagggatctcgtgtctaaagagggctttagaagggcacggcatgttgtgggagaaatccgccgcacggcacaagcagcagcagccctcagacggggagattatcgagccttcggacgtcttatggtggagtcgcatagatcactcagagacgattatgaagtgagctgtccagaactcgaccaactggtggaggcagccctggcagttccgggggtctacggatcccgaatgaccggtggaggattcggtggatgcaccgtgactctgctggaagcatcggcagcgccgcatgcaatgaggcacattcaagagcactacggtggaactgcaaccttttacctgagccaggctgcggacggtgcaaaggtgctgtgtctg

SEQ ID NO: 11912 - DNA, 1176 bp, synthetic construct
  misc_feature 1..1176: note = source = /note="Description of Artificial Sequence: Synthetic coding sequence"
  source 1..1176: mol_type = other DNA
atggctgcactgcggcagccacaggtggcagagctcctcgctgaggccagaagagcattccgggaggaattcggagcggaaccggaactcgccgtctccgcgcctgggagagtcaacttgatcggtgagcacaccgactataaccagggactggtgctgccgatggcacttgagctgatgactgtgttggtcggctcaccaaggaaagacggactcgtgtcactcctgactacttcagaaggagcagacgaaccacaacggctgcaattcccactccccaccgcccagcggtcactggagcctggtacgccacggtgggcaaactacgtcaagggtgtgatccaatactaccctgccgcgccattgccggggttctcggccgtcgtggtgtcatccgtgccgctgggaggcggactctcgagctccgcctccctggaagtggcgacctacactttccttcaacaactctgtccggattcaggaaccatcgcggcccgggcacaggtgtgccaacaggccgagcactcgtttgcgggaatgccttgtggaatcatggatcagttcatctcactgatgggacagaagggccacgcgttgctcatcgattgccgctcgctcgagacttccctggtgcctctgagcgacccgaagctggcagtgctgatcaccaacagcaatgtccggcactcgctcgcatcaagcgagtaccctgttcgccgccggcagtgcgaggaagttgcccgggcgctggggaaggaatcgcttcgcgaagtgcaactggaagagctggaagccgcccgcgatctggtcagcaaagagggcttccgtcgcgcgcggcacgtcgtgggagaaattaggcgcaccgctcaggctgctgctgccctcaggcggggagactacagagccttcggccggcttatggtggaaagccacaggtcgctgcgggatgattacgaggtgtcgtgcccagagctggaccagctggtggaagccgcacttgccgtcccgggagtctacggatcccggatgacgggaggcggatttggaggatgtactgtcactctgctcgaagcgtcggctgcaccgcatgctatgaggcatatccaggaacactacggaggcactgcaactttctacctctcccaagcagcagacggggcaaaagtgctgtgtctg

SEQ ID NO: 11913 - DNA, 1176 bp, synthetic construct
  misc_feature 1..1176: note = source = /note="Description of Artificial Sequence: Synthetic coding sequence"
  source 1..1176: mol_type = other DNA
atggctgccctgaggcaaccgcaggtggccgaactgctggccgaagctcgtcgcgcgttcagggaagagttcggggcagagccggaactggcggtgagtgcgcctggacgggtgaacctgatcggcgagcacaccgattacaaccaggggttggtcctgcccatggccctcgaactgatgactgtcctggtgggaagcccgcggaaagacggactcgtgagccttctcaccacttccgaaggcgccgatgagcctcagcgccttcagttcccgttgccaaccgcgcaacgcagcctcgaacctggaaccccgcggtgggcaaactacgtgaagggagtgattcagtactatccggcggcgccgctcccaggatttagcgccgtcgttgtaagctcggtgccactcggaggcggcctcagcagcagcgcgtcactggaagtggctacgtacactttcctgcagcagctttgccccgactccggtaccatcgccgccagggcccaagtgtgccaacaggcggaacactcatttgctggtatgccgtgtgggatcatggaccagtttatctcgctcatgggacagaaaggccacgcactgctcatcgactgccgttcactcgaaaccagcctggtgccactcagcgatcccaagctcgcggtgctgattactaactcgaatgtgcgccactcgctggcatccagcgaatacccggtgcgccgccgccaatgcgaggaagtcgcgagagcactcggaaaagaatcactgcgcgaggtgcagcttgaggagctggaagcggccagagatttggtcagcaaggaaggattcagaagggctcggcacgtggtgggagaaatcagacgcacggcgcaagccgcggccgcactgaggcgcggcgattaccgggccttcggacgcctcatggtggagtcccacaggtccctgagagacgactacgaggtgtcctgtcctgaactcgatcagctggtggaagccgcactcgcggtgccgggagtgtacggttcgaggatgaccggaggtggattcggaggatgcaccgtgactcttttggaagctagtgctgctccgcatgccatgcgccatattcaggagcattacggtggaactgcaaccttttacttgtcgcaagctgccgatggagctaaggtcctgtgcttg

SEQ ID NO: 11914 - DNA, 1176 bp, synthetic construct
  misc_feature 1..1176: note = source = /note="Description of Artificial Sequence: Synthetic coding sequence"
  source 1..1176: mol_type = other DNA
atggccgccttgaggcagccacaggtggctgaactgctcgccgaagcgcggcgcgcctttcgggaggagttcggagccgagccggagctggcagtgtcagcgccgggaagggtgaatctgattggagaacacaccgattacaaccagggactcgtgctcccgatggcgctggagctcatgactgtcctcgttggatcgccgcgaaaagatggattggtgtcgctgcttaccacttcagaaggagcggatgaaccacaacgcctgcagtttccgcttccaaccgcacaacggtccctggaacccggcacccctcgctgggccaactacgtcaaaggcgtcatacagtattacccagcggcccccctgcccgggttctccgccgtggtggtttcgagcgttccactgggaggaggactctcttcgtccgcatccttggaggtcgccacctacactttccttcagcagctgtgccctgactcaggcaccattgctgctagagcccaagtgtgtcagcaggccgaacattcgttcgcgggcatgccgtgcggcatcatggaccagttcatctcactgatggggcaaaaagggcatgcacttttgatcgactgcagaagccttgagacgtctctggtcccgctgtcggaccctaagttggcggtcttgatcactaattcgaacgtgagacactccctcgcatcctcagaatatcctgtccgtaggcggcaatgcgaagaggtcgctcgggcgttgggaaaggagagcctccgggaagtgcagctggaggaactcgaagcagccagagatctcgtttcgaaggagggattccgtagagcacgccacgtcgtgggtgaaatccggcggactgctcaagcggccgccgccctccggagaggtgactacagagcctttgggcgccttatggtggaaagccaccggtcactgagagacgactacgaagtctcgtgtccggagctggatcagctggtcgaagcggccctggcagtgccgggagtgtacggctcgcggatgactggagggggtttcggcggatgcacggtcacgctcctcgaggcatccgccgcgcctcatgctatgcggcacatccaggaacattacggcggcaccgccacgttttacctcagccaggctgcagacggtgctaaggtcctgtgcctc

SEQ ID NO: 11915 - DNA, 1176 bp, synthetic construct
  misc_feature 1..1176: note = source = /note="Description of Artificial Sequence: Synthetic coding sequence"
  source 1..1176: mol_type = other DNA
atggcagcgctccgccagcctcaagtggcggagctgctcgccgaagcacgccgggcgtttcgagaagaatttggggcagaacccgaactggccgtgtcggctccaggacgcgtaaacctgattggggagcataccgattacaatcaaggactcgttcttcccatggcccttgagctgatgaccgtgctggtgggcagcccaaggaaggacgggcttgtgagcctgcttaccacctcagagggagcagatgagcctcaacggctccagttccctcttcctacggcacaacgctcgctggaaccaggcaccccacgctgggcaaactacgtgaagggtgtcattcaatactaccctgcagcaccacttcctggcttctcggcagtcgtggtgtcaagcgtgccacttggcggaggactgtcatcaagcgccagtttggaagtggccacctacacctttctccaacagctgtgtcccgactccggcactattgcagcccgggcacaggtgtgtcaacaagcagaacatagcttcgctggtatgccctgcggtataatggaccagtttatctccttgatggggcaaaaggggcatgcactgttgattgactgtagaagcctcgaaacttcgcttgtgcctctttccgatccgaagctcgctgtgctcattaccaactccaatgtgcggcattcgctggcaagctccgaataccctgtccggagacgccagtgtgaggaagtcgctagagcgctgggaaaggaaagccttcgggaagtgcagctcgaagaactggaggcagcacgtgatctggtgagcaaagagggttttcgcagagcaagacatgtggtgggcgagattcgtcgtacggcccaggcagccgcagcccttcgacgcggggattaccgcgcctttggacggctgatggtcgaaagccatagaagccttcgagatgactacgaggtgtcatgtcctgagcttgatcagctcgtggaagcagcccttgcggtgcccggcgtgtacggctccaggatgactggaggaggttttggaggttgtactgtgactctgctggaagcgtcggcggcacctcatgcgatgagacacatccaggaacattacggaggcaccgccacgttttacctcagccaggccgcggatggagcaaaggtgctctgcctt

SEQ ID NO: 11916 - DNA, 1176 bp, synthetic construct
  misc_feature 1..1176: note = source = /note="Description of Artificial Sequence: Synthetic coding sequence"
  source 1..1176: mol_type = other DNA
atggctgccctgaggcaaccgcaagtggcagagctcttggccgaggcgagacgggccttcagagaggagttcggcgctgaacccgagctcgcagtgtcggccccgggtcgcgtcaatctgataggcgagcatactgactacaaccaaggattggtgcttccgatggccttggaacttatgactgtacttgtggggtccccgaggaaagacggactcgtgtccctgcttactaccagcgaaggggcagacgaaccgcagagactccaatttccgctcccaaccgctcaacgatcactggagcccggcacgcctagatgggcaaactatgtgaaaggagtcatccagtactacccggcggcaccgctgccaggattttccgccgttgtcgtgtcatctgtgcccctgggtggcgggctgtcgagctccgcatccctggaagtagccacctataccttcctgcaacagctctgccccgactcaggcaccatcgccgcccgcgctcaggtctgccagcaggcggagcactctttcgcaggaatgccatgcggcattatggatcagttcatctcactgatgggtcaaaagggccatgccctgctgatcgactgccgctcgctggaaacttcactcgttccgttgtctgaccccaagttggctgtgctcatcaccaattccaacgttagacacagcctggcaagcagtgaatacccagtgagacggaggcagtgcgaagaagtcgcccgggctttgggaaaggaatccctcagagaagtgcagctcgaagagctggaagccgcccgcgatctggtgtccaaggaaggttttcggagagcgcggcacgtggtcggagagattcgcaggactgctcaggccgcggccgcgctgcgcagaggagattaccgagcgttcggtcgcctgatggtggaatcacatagatcactcagggatgattacgaagtttcgtgtccagaactggatcaactggtggaggccgccctggcagtgccaggcgtctacggatcgaggatgactggcggagggtttggagggtgtaccgtgacgctgctggaggcctcggctgcacctcacgccatgcgccacatccaagagcattacggaggaacggcaaccttctacctctcccaggcagcggacggagccaaagtgctgtgtctc

SEQ ID NO: 11917 - DNA, 1176 bp, synthetic construct
  misc_feature 1..1176: note = source = /note="Description of Artificial Sequence: Synthetic coding sequence"
  source 1..1176: mol_type = other DNA
atggcagcgctgcgtcaaccgcaagtggctgaactgcttgccgaggcccggagggcctttagagaagaatttggtgcggaaccagagctcgcagtgtcagcacctggtagggtcaacctgataggggagcacactgactacaaccaaggtttggtgctgccaatggcactcgaattgatgaccgtccttgtgggatccccacgtaaagacggacttgtctcccttctgacgaccagcgaaggagcggatgagccccagaggctccagtttcccttgcccaccgcacagcggtcacttgaaccgggaacccccagatgggcaaactacgtcaagggagtcatacaatactacccggcagcacccctgccaggatttagcgcggtggtcgtgtcgagcgtccctctgggcggcgggctttcgtcctcagcatctctcgaagtggccacctacacgttcctgcagcagctttgtcctgactcaggaacgattgcagcgagggcacaggtgtgccaacaagcagaacactcattcgcagggatgccttgtggaattatggatcaattcatctccctgatggggcagaagggccatgctcttctgattgattgtagatcgctggagacttcgctcgtgccgctctcggaccctaagctggcggtgctcatcaccaattccaacgtgcggcatagccttgcctcctcggaatacccggtgagacgccgccagtgcgaagaagtggcaagagcactgggtaaagagtcactgcgcgaggtccagctcgaagaactcgaagccgctcgcgacctcgtctcaaaggagggttttcggcgagcgcgccatgtcgtgggtgagattcggaggacggcacaagccgcagccgcgttgagacgtggagactatcgggcctttggacgtctcatggtcgagtcacatcggagcctgagagacgattacgaggtgtcgtgcccagagctcgatcagcttgttgaagcagcactcgccgtcccgggcgtgtacggtagccggatgacgggtgggggctttggaggctgtaccgttactctgctcgaagcatccgcagctccacacgccatgaggcatatccaggaacattatgggggtactgccactttctacctctctcaggcagcggacggcgccaaagtgctgtgcctt

SEQ ID NO: 11918 - DNA, 1176 bp, synthetic construct
  misc_feature 1..1176: note = source = /note="Description of Artificial Sequence: Synthetic coding sequence"
  source 1..1176: mol_type = other DNA
atggcagctctgagacaacctcaggtggcagaactgcttgctgaggcccggagagccttccgcgaggaattcggagcagaaccggagctggctgtgtctgcaccgggacgcgtaaatctgatcggcgagcacaccgactacaatcaaggcctcgtgctcccgatggccctcgaactcatgactgtgttggtcggttcccccaggaaagacggcctggtgagcctgctgaccacgagcgaaggagcggatgaaccgcaaagacttcagttcccgctgccaaccgcccaacggtccctcgaaccaggaacgccgcgctgggcgaactacgtgaagggagtgattcaatactaccctgcagcacctctcccgggcttctccgcagtggtggtttcgtcggtccctctgggcggtggactgtcgtccagcgcctcactcgaggtcgcaacttacacgttcctgcagcagctctgcccagatagcggcactatcgcagcgcgcgcccaggtttgccagcaggccgaacattcgttcgcaggcatgccgtgcggtataatggaccagtttatcagcctgatgggacaaaaggggcatgccttgcttatcgactgccggtccctggaaaccagtctggtgcccctctcagatcccaaacttgccgtcttgatcactaactccaacgtgcggcactcgttggcatcgtccgagtaccccgtgcgaaggaggcagtgtgaggaagttgctagggccttgggaaaggagtcactgcgcgaggtacaactggaggaactggaagcggcccgcgacctcgtgtcaaaggagggctttagaagagcacggcacgtggtaggggaaatcagacgtactgctcaggcggcagccgcccttcgccgtggcgactacagagcatttggacgactcatggtggagtcccatcggtcgctccgcgatgactacgaagtgtcgtgtccggaactggatcaattggtggaggccgccctcgccgtcccaggggtgtatggatcgcggatgaccggaggcggcttcggcggatgcactgtcaccctgctggaagcatctgctgccccacatgcgatgcgccacatccaggaacactacggaggtactgccactttctacctgtctcaggcagcggatggagccaaggtcctgtgcctt

SEQ ID NO: 11919 - DNA, 1176 bp, synthetic construct
  misc_feature 1..1176: note = source = /note="Description of Artificial Sequence: Synthetic coding sequence"
  source 1..1176: mol_type = other DNA
atggctgccttgagacagcctcaggtggccgaactcttagcagaagcccgtcgagcctttagggaagaatttggggctgagcccgaactggccgtcagtgcacctggacgggtgaatttaatcggggaacacaccgactacaaccagggtctggtgcttcccatggcactagaattgatgacggtgctggtggggagtccaaggaaggacggcctggtttcactgttgaccactagcgaaggagcagatgagcctcagaggttacagtttccgctccctactgcgcagagatctctcgaacctggcactcccagatgggcaaactacgtaaagggagtgattcagtattatcccgccgctcccctgcccggctttagtgctgtggttgtttctagcgtgcccctgggtggaggattatccagtagtgcatccttggaggtcgcgacatacacttttctgcaacagctctgcccagatagcgggacgattgcggctagggctcaagtgtgtcagcaggccgagcactcctttgccgggatgccctgtggaattatggatcagtttatttccctgatggggcagaagggtcacgccctgctgattgattgccgatccctggagacatccctggtgcctctttctgatccaaagctcgcagtgctgatcactaattctaatgtccgtcatagcctggcctccagcgaataccctgtgcgaaggagacagtgtgaggaggtcgcgcgagccctcgggaaagagtctctccgggaagtgcagctggaggaactagaggctgcaagagatctggtgtccaaggagggttttcgtcgagcccgccacgtggtgggagagatccgcaggacagcacaagcagccgccgccctgaggcgaggagattatagagcttttggccggctcatggttgagtctcatcgctctctgcgggatgattacgaagtttcatgtcccgagctggaccagctcgtggaggcggctctggccgtgccgggcgtctacggatcacggatgaccggaggtggctttggcggctgtaccgtcacactgcttgaggccagcgcagcccctcatgccatgagacatattcaggaacactatggtggtactgcaactttttacctgagtcaagctgcggacggcgctaaagtgttgtgccta

SEQ ID NO: 11920 - DNA, 1176 bp, synthetic construct
  misc_feature 1..1176: note = source = /note="Description of Artificial Sequence: Synthetic coding sequence"
  source 1..1176: mol_type = other DNA
atggctgcgctgcgccagccacaggtggccgaactccttgcagaagcccgcagagccttccgggaagaatttggagctgagcccgagctggcagtgtcagcgccgggacgcgttaatctcattggagagcacaccgactataatcagggactggtgctgccgatggccctcgaactcatgaccgtcctggtgggttcgccacgcaaggacggacttgtgtctctcctgactacttcggagggagcagacgagccacaacgcctgcagttccccttgcctaccgcccaaaggtccttggaacctgggaccccgcggtgggcaaactacgtcaagggcgtgatccaatactacccggctgcacctctgccgggattctcggctgtggtggtgtcgagcgtcccgcttggcggtggactcagctcctcggcgagcttggaggtggccacttacactttcctccagcagctctgcccagactcaggcaccattgccgcgcgcgcccaggtgtgtcagcaggccgaacacagctttgcggggatgccgtgcgggatcatggaccagttcatctccctgatgggtcagaagggccatgcgctgctgattgattgcaggtcgctcgaaacttcacttgtgccgctcagcgacccaaaacttgcggtgctgatcaccaacagcaacgttaggcattccctcgcatcgtcggaatacccggtgcggcggcgtcaatgtgaagaggttgcccgcgccctcggaaaggagtccctgcgtgaggtccagcttgaagaattggaagcggcccgcgatttggtgtctaaggaaggattccgtagagcccggcatgtggtgggggaaatccggagaaccgcgcaggccgcggcagccctgcgacgaggggactaccgcgccttcggccggcttatggtcgagtcccataggagcttgcgggatgactacgaggtgtcatgccccgagctggatcaacttgtggaagcagctctggcggtccctggggtctacgggtcacggatgacgggaggaggatttggtggctgcacggtcactctgttggaggcatcagccgctccccacgccatgagacacattcaagaacactacgggggcaccgcgacgttctatctgtcccaagcggcagatggagccaaagtcctgtgcctg

SEQ ID NO: 11921 - DNA, 1176 bp, synthetic construct
  misc_feature 1..1176: note = source = /note="Description of Artificial Sequence: Synthetic coding sequence"
  source 1..1176: mol_type = other DNA
atggcagcattgcggcagccacaggtggcagagctgttggccgaggccaggcgggccttccgtgaggagttcggtgcagagcctgagctggctgtttccgctcctggtagggttaatctcattggggagcatactgactataatcaggggctcgtgcttcccatggccctggagctgatgactgtgttagtaggctccccccgcaaagacgggttggtgagcctcctgaccacctccgagggcgccgatgaaccgcagcgccttcagttcccactccctactgcccagcgcagcctagagcctggtaccccccgctgggccaactatgtaaagggcgttatccagtattacccagccgcgcccctgcccggtttctcagcagttgtggtctccagcgtgcccttgggggggggcctctccagctcagcctccctcgaagtagccacttacacctttctccaacaactgtgtcccgatagcggaaccatagccgctagagctcaggtgtgccaacaagccgagcatagtttcgccgggatgccatgcggtatcatggatcaatttatctctctgatggggcagaagggccacgcgttgctaattgattgccgtagtctcgaaacgtcactcgtcccactgtcggatcccaagctggccgtgctcatcacaaatagcaatgtcaggcattccttggctagttccgagtacccagtacgcagaaggcagtgcgaggaggtggccagggccttggggaaagagagtctgcgggaagtgcagctggaagagttagaagccgcacgagatttggtgtccaaagagggctttagaagggcccgacatgttgtgggggagatccgcaggactgcacaggctgcagccgctttgaggcgcggcgattacagagcatttggcaggctcatggtagagagccaccgcagccttcgagacgactacgaagtgtcctgccccgagttggaccagctggtggaagccgccctggcggtcccaggcgtttatggctcacgtatgacgggtggtggatttgggggctgcaccgtcacacttttggaagcctctgctgctcctcatgcgatgcgccacattcaggagcattatggagggaccgccacattctatttgagtcaggcggctgatggggccaaggtcctgtgctta

SEQ ID NO: 11922 - DNA, 1176 bp, synthetic construct
  misc_feature 1..1176: note = source = /note="Description of Artificial Sequence: Synthetic coding sequence"
  source 1..1176: mol_type = other DNA
atggctgctctaagacagccacaggtagccgagcttttggcggaggccaggcgggcttttcgggaggagtttggcgcggaacctgagctcgcggtgtccgcgcctggccgcgtgaatcttattggtgagcacactgactacaatcagggcctggttttgccaatggctttagaactgatgacagtgttagttggctcaccacgaaaggatggacttgtgtctctgctgactacgtccgagggcgctgatgagcctcagcgcttgcagttccctctacctaccgctcagagatcattagaacctggcactccgcgttgggctaactatgtgaagggggtcattcaatattacccggctgcacccctccccggattctcggcagtggtggtgtcttctgtgcccctcgggggtggattgtcatcatctgctagtttggaagtcgccacctacacttttttgcaacagctgtgccccgacagcggaacaatagctgcccgagctcaggtatgtcaacaggccgagcactccttcgcaggcatgccgtgcgggatcatggaccaatttatctcgcttatgggccagaagggacatgccctactgatcgactgccgctctctcgagacatccttagttcccttatctgacccaaagcttgctgtgctcattaccaacagtaatgtccggcactcactggcttcctcagagtaccccgtgcgccgccgtcagtgtgaagaagtggctcgtgccttgggaaaggagagcttacgcgaggtgcagctggaggagttggaggctgcacgagatctggtgagtaaggagggcttcaggcgggctcgccatgttgtgggtgagattagacggacagcgcaggccgcagcagccctcagaaggggagattacagagccttcgggagactgatggtggaaagccaccggtcacttagagacgattacgaggtctcttgcccggagctcgatcagctggtggaggcggcgctagctgtgcctggagtctacggctctcggatgaccggggggggcttcggtggctgcaccgtgacgctcctggaagccagtgcggccccccacgctatgagacacatccaggagcactatggcggaaccgccacattttaccttagccaggcagccgatggagccaaggtgctctgcctg

SEQ ID NO: 11923 - DNA, 1176 bp, synthetic construct
  misc_feature 1..1176: note = source = /note="Description of Artificial Sequence: Synthetic coding sequence"
  source 1..1176: mol_type = other DNA
atggctgctttacgacaaccacaagttgcagaacttcttgctgaagcaagaagagctttcagagaagaattcggagctgaacctgaacttgctgttagtgcaccaggaagagtaaatttaataggtgaacatacagattataatcaaggtttggttttaccaatggctttagaacttatgacagttttagttggaagtccaagaaaagatggacttgtttcactattaactacttcagaaggtgctgatgaaccacaaagacttcaatttccattaccaactgctcaaagatctcttgaacctggaactccacgttgggccaattacgttaaaggtgttattcaatattacccagctgcacctcttccaggatttagtgctgttgttgtatcaagtgttccattaggaggaggtttaagttcgagtgcatctttagaagttgcaacttatacatttcttcaacaattgtgtccagattcaggaactattgccgctagagctcaagtttgtcaacaagcagaacatagttttgcaggaatgccatgtggaattatggatcaatttattagtttaatgggacaaaaaggacatgcattattgatagattgtagaagtcttgaaacatcattagtcccactttctgatccaaagttagcagttttaataactaattccaatgtaaggcattcattagcatcatctgaatacccagttagaagaagacaatgtgaagaagttgctcgagcattgggaaaagaaagtttacgagaagttcaacttgaagaattagaagcagctagagatttagtttcaaaagaaggatttagacgagctagacatgttgttggagaaatacgtagaacagcacaagcagcagctgcattaagacgaggagattatcgagcatttgggagacttatggtcgaatcacatagaagtcttagagatgattatgaagttagttgtccagaattagatcaattagttgaagctgctcttgccgttccaggagtctatggatcaagaatgactggtggagggtttggaggttgtactgttacccttttagaagcttcagctgcaccacatgcaatgaggcacattcaagaacattatggaggaacagctaccttctatttaagtcaagcagcagatggagcaaaagtattatgtctt

SEQ ID NO: 11924 - DNA, 1176 bp, synthetic construct
  misc_feature 1..1176: note = source = /note="Description of Artificial Sequence: Synthetic coding sequence"
  source 1..1176: mol_type = other DNA
atggccgcactccgccaaccgcaggtcgccgagctcctggcagaggcacgaagggccttccgcgaggagttcggtgcagaaccggagctggcggtgtcagctcccggaagagtcaacctcatcggggaacataccgattacaaccagggcttggtgttgccaatggctctggagttgatgaccgtgctcgtcggatcaccgcggaaagatggacttgtgagcctcctgaccacgtcggagggtgccgacgaaccgcaacgtctgcagttcccactcccaactgcccaacggtccctggagcctggaacgccacggtgggccaactacgtcaagggagtgatccagtactaccctgcagcccccctcccgggattttcggcagtggtggtgtcgtcggtcccgttgggcggcgggctttcgtcctccgcatcgctggaggtggcaacgtacactttcctccagcagctctgcccggactcgggtaccatcgcggcgagagcacaggtgtgccaacaagccgagcactcgtttgcgggaatgccgtgtggtattatggaccaattcatttcactcatgggacagaagggacatgcattgctgatcgactgcaggtcgctggaaacttcacttgtgcctttgtcggacccgaagttggcggtcctgatcaccaactccaacgtgaggcactccctcgctagcagcgaatacccggtgcggagacgccagtgcgaagaagtcgcgcgggccctgggcaaggaatcactgcgcgaagttcaacttgaagagcttgaggcagcacgcgatcttgtgtcgaaggagggattcagacgcgcgagacacgtggtgggcgaaatccggcggactgctcaggccgcggccgcgctgcggcgcggggattaccgggcattcggtagactcatggtcgaatcgcatcgatctctcagagacgattatgaagtgtcatgccctgaactcgatcagctcgtggaggccgcgttggccgtcccgggagtgtacggttcgaggatgaccggcggtggattcggaggatgcactgtcaccctgctggaagcctcggcagccccgcatgccatgcggcatatccaggaacattacggcggaaccgctactttctacctctcacaagcagcggacggagcaaaggtcctgtgcctg

SEQ ID NO: 11925 - DNA, 1176 bp, synthetic construct
  misc_feature 1..1176: note = source = /note="Description of Artificial Sequence: Synthetic coding sequence"
  source 1..1176: mol_type = other DNA
atggcagcccttaggcagccccaggtggcagagctgctggcagaagcccggcgcgcatttagggaagaatttggcgcagaacccgagctggctgtgtccgcaccaggtcgtgtgaatttgatcggggaacatactgattacaaccaagggctggtgctgccgatggcactcgaacttatgaccgtccttgtgggatcacctcggaaggacggccttgtgtcactgcttactaccagcgaaggcgcagatgaaccacaacggctgcagttccctcttccaaccgcacaacggagccttgagcctgggacccctaggtgggcaaactacgtgaagggtgtgattcagtattatcccgcagcacctctgcctgggtttagcgcagtggttgtgtcatccgtccccctgggcgggggactttcgagctcggcctcgctggaagtggccacctatacctttctccaacaattgtgccctgattccggtactatagcagcgagagcacaagtgtgtcaacaagccgaacatagctttgcggggatgccttgcggcatcatggaccagtttatctcgctcatgggacaaaaaggtcatgcgctccttattgattgtaggtcccttgaaacctcgctggtgccattgagcgatccaaaacttgcagtcctcataaccaactcaaatgtgcgccatagccttgcctcctcggagtaccctgtccgtagacgccaatgtgaagaagtcgcaagagcactcggtaaggagtcgcttcgcgaggtgcaactggaagaactcgaagccgcgagggatctcgtctctaaggaggggtttcgccgggccagacacgtggtgggtgaaattagacgcaccgcacaagcggccgcggcacttagaagaggcgactacagggcatttggaaggctgatggtggaatcacacagatctctgagggacgattacgaagtgtcgtgtcctgagctggaccagcttgtcgaggcagcccttgcagtcccaggcgtgtacggatcgagaatgaccggaggaggttttggcggctgcactgtgacccttcttgaagcctccgcagcaccccatgcaatgagacacattcaagagcattacggaggaaccgccactttctacctttcccaagccgctgatggagcaaaggtgctttgtctt

SEQ ID NO: 11926 - DNA, 1176 bp, synthetic construct
  misc_feature 1..1176: note = source = /note="Description of Artificial Sequence: Synthetic coding sequence"
  source 1..1176: mol_type = other DNA
atggccgcacttcggcaaccgcaagtcgccgagcttctggccgaagcgcggcgggcttttcgcgaagagttcggagctgagcctgaactcgcggtgtcggctccgggccgcgtgaacctgatcggagaacatactgactacaatcaggggctcgtgcttccgatggccctggaactcatgaccgtgctggtgggctcaccgagaaaggacgggctggtgtccctcctgactacctctgagggagcggacgagccgcagaggctgcaatttcctctgccgacggcccaacgctcactggaacctgggactccgagatgggctaactacgtcaagggtgtgatccagtactaccccgcagcaccactcccgggcttctccgcggtggtcgtgtcctcggtgccgctcgggggcgggctgtcgtcgtcagccagcctcgaagtggctacttatactttcctccagcagctgtgtcctgattcaggaaccatcgcagctcgggcgcaagtgtgccagcaggcagaacattcatttgccggtatgccttgcgggatcatggaccagttcatcagcctgatgggacagaaagggcacgcgctgttgatcgactgtagaagtcttgagacttcgctcgtgcctctctccgacccgaagttggccgtgttgatcaccaatagcaacgtccgccacagccttgcttcgtcagagtacccagtccgacgccgccaatgcgaagaggtggcaagggcactcggtaaagaaagtttgcgagaggtccagctcgaagaactcgaagccgctcgcgacctcgtgtcgaaagaaggcttcaggagagcccggcatgtggtgggagagattcggcgcaccgcccaggcggccgcggcgctgcggcgaggagactaccgtgcgttcggacggctcatggtggaatcgcatcgctcgctgagggacgattacgaagtgtcatgcccagaacttgaccaactggtggaagccgcactcgccgtgcccggagtctacggctcccggatgaccggtggcggcttcggaggctgcactgtgacgttgctcgaagcgtcagcagcacctcacgcgatgcgccatatccaagagcactacgggggaactgccaccttctacctgtcgcaagcggctgatggcgcgaaagtcctgtgcctc

SEQ ID NO: 11927 - DNA, 1176 bp, synthetic construct
  misc_feature 1..1176: note = source = /note="Description of Artificial Sequence: Synthetic coding sequence"
  source 1..1176: mol_type = other DNA
atggctgccctgaggcagccacaggttgccgagctgctcgccgaggctcgcagggcattcagggaggaatttggagcagaacccgagcttgcggtatccgccccaggcagggtaaaccttattggcgaacacacagactacaatcagggccttgtcctacccatggcactggagctgatgactgttctcgtgggttcgccccggaaggatggtttggtctccctactgaccactagcgagggcgcagatgaaccacaaagattgcagttcccactgcccacagcccagcgatcactcgaaccaggcacgccccggtgggccaattatgtgaagggcgtgatccagtactaccctgccgcaccgctccctggcttttccgcagttgtcgttagctctgttcccctgggaggggggctgtcctcctctgcatcactcgaagttgccacctatactttcctccagcagctctgtcctgactctggcacaatcgctgcccgtgcccaggtatgccagcaagccgagcactccttcgcgggaatgccttgtgggataatggaccagttcatttcgttaatgggtcagaaaggacacgctctcctgatcgactgccgctccctggaaacttctctcgtgcctctgagcgatcccaagctcgccgtgttgataacgaactcgaacgtacgtcactcgctcgcatcttctgagtatcccgtacgccgtaggcagtgtgaggaagtggcacgggccttgggcaaggagagtttacgagaggtccagcttgaggagctggaggctgccagggatctggtcagcaaggaaggatttaggagggcccggcatgtggtgggcgaaatccggaggactgctcaagccgctgcagccttacgcaggggcgactaccgtgccttcggccggctgatggtagagagtcaccgctctttacgtgacgattatgaggtctcctgccctgagctggatcagctggtggaagcagcgcttgcagtcccaggggtctacggcagcaggatgaccggtggcgggttcggcggttgtacagtcactctgctggaagcttcagccgcaccccacgccatgcgacatatccaagagcattacggcggaacagcgaccttctacctttctcaggctgctgatggagcaaaagttctatgttta

SEQ ID NO: 11928 - DNA, 1176 bp, synthetic construct
  misc_feature 1..1176: note = source = /note="Description of Artificial Sequence: Synthetic coding sequence"
  source 1..1176: mol_type = other DNA
atggcggccctgcgccagccacaagtggccgagctcctcgccgaggcccgccgcgctttcagagaggagttcggcgcggagccggagctggccgtgtcagcccctggacgcgttaatctgatcggcgagcataccgactacaatcaaggacttgtcctgcctatggccctggagctgatgactgtactggtgggatcaccacgcaaggatggcctggtgtcgttgctgactactagcgagggagccgacgaaccacagagactccagtttcctctgccaactgcccaacgctcgctcgagcctggcaccccgcgctgggccaattatgttaagggcgtgatccagtactacccagccgcgcccctccctggattctccgcggtggtggtgtccagcgtcccgctgggcggtggactgtcgtcctccgcatcactggaagtcgccacgtacacctttctgcaacaattgtgcccggactcaggcaccatcgctgccagagcacaggtgtgccaacaggcggaacacagcttcgccggaatgccttgtggaattatggatcaattcatcagcctgatgggacagaagggccacgccctccttattgactgccgctcgctcgaaactagcctggtgcccctgtccgatcccaagttggcagtgctgatcacgaactccaacgttcgccattctctcgctagctcggagtacccggtgaggcgcaggcagtgcgaggaggtggccagggcactgggcaaggaatcgttgcgggaagtgcagctggaagaactcgaggcagccagagatctcgtgtcaaaggagggattccggcgcgcacgccacgtcgtcggagaaatccggcggactgcgcaggcggcagctgcgctgaggcgtggtgactaccgcgcattcggaaggctgatggtcgaatcccacaggagtctgcgggatgattacgaggtgtcgtgtccggaactggatcagctggtcgaggccgctctggccgtgcctggcgtctacggttcccgcatgacgggaggaggcttcggaggttgcaccgtcaccctcctggaggcttccgcggccccgcatgccatgcgccacatccaagaacactacggcggtactgcgactttctacttgagtcaagctgctgacggtgccaaggtcctttgcctt

SEQ ID NO: 11929 - DNA, 1176 bp, synthetic construct
  misc_feature 1..1176: note = source = /note="Description of Artificial Sequence: Synthetic coding sequence"
  source 1..1176: mol_type = other DNA
atggccgctcttcgccagcctcaggtcgctgaactcttggccgaggctcgcagggcttttcgtgaggaattcggcgctgagccagagctcgccgtaagtgccccaggccgtgtaaacctgattggagaacatacagattataaccagggcctcgtcctgccaatggcactggaactcatgactgtactggtcggctctcctaggaaagatggactggtcagtctcctgacaacaagtgaaggagctgacgagccacagagactccagtttccactgcccaccgctcagaggagtctcgagccaggcactcctcgctgggccaactatgtcaaaggtgtcatacaatactatcctgctgcccccctgccaggcttcagcgcagtagtcgtgtcaagcgttcccctcggcggaggcctcagttctagcgcaagcctggaggttgctacctacacatttctccaacagctgtgccccgactccggaaccattgctgcaagagcccaggtgtgccagcaagcagagcatagcttcgccggaatgccttgcggcatcatggaccagttcatctccctgatgggccagaaaggccacgccctccttatcgattgccgctcccttgagacctctctggtcccactgtctgaccctaagctcgccgtgctgattacaaactccaacgtgagacactctctggcctccagcgagtatccagtgcgccgccgccagtgcgaggaagtggctcgtgctttgggcaaggaatctttgcgcgaagtacagctcgaggaactggaggccgctcgcgacctggtatccaaggagggtttcagaagggccaggcatgttgtcggcgaaattagaagaaccgcccaggcagcagccgccttgagacgtggtgactacagggcttttggaaggttgatggtggagtcccacagaagtctcagggacgactacgaggtttcttgccccgaattggaccagctcgtggaagcagccctcgccgttccaggtgtttatggatcccgcatgaccggcggtggtttcggaggatgtactgtgacattgctggaggcctccgctgctcctcacgccatgcgtcacatacaggaacactacggcggaaccgcaaccttctatttgtcacaggccgcagatggtgcaaaggttctttgcctc

SEQ ID NO: 11930 - DNA, 1176 bp, synthetic construct
  misc_feature 1..1176: note = source = /note="Description of Artificial Sequence: Synthetic coding sequence"
  source 1..1176: mol_type = other DNA
atggctgctcttagacaaccgcaggtggccgagctgcttgccgaagcgcgacgcgcgtttagagaggagttcggagccgaaccggagcttgcagtgagcgcccccgggcgggtgaaccttattggagagcacaccgactacaatcaaggcttggtgctgcctatggcacttgagcttatgaccgtgcttgtcggatcacccagaaaagatgggctcgtgagcctgctgactacctccgaaggagcggatgaaccacaaaggcttcaatttcccctgcctacggcgcagcgatctctcgaaccgggcactcctagatgggcgaactacgtgaaaggcgtgattcaatactacccagcagcaccgctccctggattctccgcagtggtcgtgtcgtcggtccctctgggaggaggtctttcttcgtccgcttcacttgaagtggcaacttacaccttcctgcagcaactctgtcctgactctggaactatcgcagcacgggctcaggtgtgccagcaagctgaacactccttcgcggggatgccctgtggtataatggaccaattcatctccctgatgggacaaaaggggcatgcactgctgattgactgtaggagcctcgagacgtcgttggtgcccctctccgatcccaagctggccgtcctcatcaccaatagcaacgtgcgccactcattggcaagctcggaatacccagtgcgaaggcgacaatgcgaagaagtcgcccgtgctcttgggaaggagtccctccgcgaagtgcagctggaagagcttgaagcagcacgcgatctcgtttcgaaggagggttttcgccgtgcgaggcatgtcgtgggtgagatcagaaggacggctcaggcagccgcagcacttaggagaggtgattatagggcgtttggtcgcctgatggtcgaatcacaccgttcccttagagacgactacgaagtcagctgccctgagctggatcagctcgtggaagcagcgcttgcagtgcctggcgtctacggctcgcgtatgactggtggaggctttggcggttgtactgtcacccttcttgaggctagcgcagcccctcatgccatgagacatattcaggaacattacggcggtacggcaaccttttacctttcgcaagcagcagatggtgcgaaggtcttgtgcttg

SEQ ID NO: 11931 - DNA, 1176 bp, synthetic construct
  misc_feature 1..1176: note = source = /note="Description of Artificial Sequence: Synthetic coding sequence"
  source 1..1176: mol_type = other DNA
atggcagcactacggcagccccaggtcgcggaacttttggcggaagctaggcgcgcctttagagaagaatttggagccgagcctgagttagctgtctccgccccaggacgtgtgaacctcattggggagcatacagactacaatcagggactagtcctacccatggccctggagctgatgaccgtactggttgggtctcctagaaaagacgggctggtgagtcttctgacgactagcgaaggggcggacgaaccgcaaaggttgcagtttcccctcccaacggcacagaggagtttagagccaggtacccccaggtgggcaaactatgtgaaaggcgtgatccagtattaccccgcggcacctttgccgggtttctcagcagttgtcgtgtcctcagtaccgctcggcggcgggctttcatctagtgcatcacttgaagtggcaacatacacattcctgcagcagctctgccctgacagtggaacaattgcagctagagctcaggtgtgccagcaggcagaacattcgtttgctggcatgccctgcggaattatggatcagtttatctctctgatgggacagaaggggcatgccctgcttattgactgccgctctctggagacaagcttggtcccgctttccgatcccaagctggccgtcctgatcactaattctaacgtgaggcattcgctggcctctagcgagtaccccgtccgcagaagacagtgtgaagaggtcgcacgggcactcggcaaggagtccctgcgtgaggttcaactggaggaacttgaagcagctcgagacttagtgtctaaagaaggcttccgcagggccaggcatgtggtgggcgagatcaggagaactgcccaggccgcagcagcactgcgcaggggcgattatcgcgcatttggtcgtctgatggtggaaagccatcgaagtctgcgcgatgactatgaggttagttgcccagagttggatcaactagtggaggctgcgctggccgtgcccggcgtgtatggctctcgcatgacggggggcgggttcggtgggtgcacagtaacgctacttgaagcatctgcggcccctcatgccatgagacatattcaggagcactatggagggacagctacattctacctctcacaggcagccgacggggcaaaagttctatgtctg

SEQ ID NO: 11932 - DNA, 1176 bp, synthetic construct
  misc_feature 1..1176: note = source = /note="Description of Artificial Sequence: Synthetic coding sequence"
  source 1..1176: mol_type = other DNA
atggctgctcttcggcagccacaggtggctgaacttcttgcagaagcaagaagggccttccgagaggagtttggggccgaacccgaactcgctgtaagtgcccccggaagagtaaacctcataggagaacacactgattataaccaggggctcgtgctgcctatggctctagaactcatgacagtactggtcgggagtcccagaaaggatgggctcgtatctcttctgacaacttctgaaggagccgatgaacctcagaggctgcagttcccactacccactgctcagcgctcgcttgaacctggaacacccaggtgggccaattacgtcaaaggggtgatacagtattaccctgcagccccacttcctgggttctctgcagtggttgtaagttcagtgcccctcggaggaggactgtcctcgagtgccagtcttgaagtcgctacatatacttttcttcagcagctatgtcccgatagtggaactatcgcagcaagagcccaggtctgtcagcaggccgaacattcatttgccgggatgccatgtggaatcatggatcagtttatcagtctgatgggacagaaagggcacgccctccttattgattgtagatccttggaaacttctcttgtccccctcagtgaccccaagctggctgtgttgataacaaatagtaatgtgcgccactctctcgcttcctcggaatatccggtgcgcaggcgccagtgcgaagaggtcgcccgcgccctcgggaaggaatcccttagagaagtgcagctagaggagttggaagctgctcgagatcttgtatcaaaagagggatttaggcgtgctagacacgttgttggggagattagacgaacagctcaggcagccgcagcgcttagaagaggggattatcgagcgttcgggagattgatggtggaatcacaccgctcacttcgcgatgattatgaagttagttgtccggaactcgaccagctcgtagaagccgccctcgcagtgcctggagtctatggatcacggatgactggaggggggttcgggggatgtactgtcacactcctggaggccagtgcagctccacatgctatgagacatatccaggaacattatggggggactgccactttctatctgtcccaggcagccgatggagccaaggtgctatgcctg

SEQ ID NO: 11933 - DNA, 1176 bp, synthetic construct
  misc_feature 1..1176: note = source = /note="Description of Artificial Sequence: Synthetic coding sequence"
  source 1..1176: mol_type = other DNA
atggcagctctgcggcaaccacaggtcgcggagctgctcgccgaagcccgccgcgccttcagggaagagtttggggccgagccagaactcgcggtctcagcacctgggagagtcaacctgatcggcgaacacacagactacaaccaggggctcgttcttcccatggctctggagctgatgactgtgctggtgggcagtccgcgaaaagatgggttagtctctctgcttacaacatcagagggcgccgacgagccacagaggctgcagttcccgttaccaactgcccagcgatccctcgaacccggcaccccccgctgggctaactatgtgaaaggtgtcatacagtactacccggccgccccactgccagggttttccgccgtggtcgtctcatccgttccattaggggggggtctgtctagcagcgcctcactcgaagtggctacctataccttcctacagcaactctgtcctgacagtggaaccattgccgccagagcgcaggtttgccagcaggccgagcactcctttgctgggatgccatgcgggatcatggatcagttcatctccctgatgggacagaaggggcacgcactcctcatagactgcaggagcctcgagacaagtctggtccccctgtcagatccaaagctagccgtcctgattacaaattcaaacgtgcgccactctcttgcctcttccgaataccccgttagacgcaggcagtgcgaggaggtggctagggcgctcggtaaagaatccctgcgggaggtgcagctggaggaactcgaagccgcccgggatctcgtttctaaagaaggctttagacgcgcccgccatgtggtgggagaaatacgccggacggcacaggctgcagcagcacttcggcggggcgattatcgcgcattcgggcgattgatggtggagtcacatcggtccctgcgggacgactacgaggtatcctgcccggagctcgatcaacttgtggaggctgcattagcggtccccggggtgtacggctcccgcatgaccggtggcgggttcggggggtgtactgtaacattattggaggctagcgcagcgccgcacgcgatgcgacatatccaggagcattacggaggaacagcaacattctatttgtcccaggcggctgacggagcgaaggtgctgtgcctg

SEQ ID NO: 11934 - DNA, 1176 bp, synthetic construct
  misc_feature 1..1176: note = source = /note="Description of Artificial Sequence: Synthetic coding sequence"
  source 1..1176: mol_type = other DNA
atggcagctctgcggcagccgcaagtggctgagttgctggccgaagcgagacgggcgtttcgtgaagagtttggtgcggaacctgaactagcggtgagtgccccaggaagagtgaacctcatcggggagcacacagactataaccaaggactagtccttcccatggcccttgaattgatgacggtccttgtcggctctcctagaaaagatggcttagttagcctgctgacgacaagcgaaggtgccgacgaaccccaaagactccagtttcctttgccaacagcacagcgctccctggagccgggtacgcctcgatgggcaaattacgttaagggagtgattcagtactatcctgcggcgcccttaccgggcttcagcgcagtggtagtgtcatccgtcccgctgggtggcggactgtcttcatctgcaagcttggaggttgcgacgtatacgtttctgcagcaattatgccctgacagcggtacaattgcggctagggcacaagtatgccagcaagccgaacattcctttgccggtatgccttgcggcattatggatcagtttatttcattgatgggacagaaaggacatgcacttctgattgattgtagatcactggaaacatctctggtgccgctcagcgacccaaaattggctgtgctgatcaccaattctaacgttcgtcattcattggcgtcttctgagtatcctgtcagaagaagacaatgcgaagaggtggcacgtgcactagggaaagaaagcttgcgggaggtacaacttgaagagcttgaagcggctcgggatctggtctcgaaagaaggtttccgacgtgcccgtcacgtcgtcggggaaattaggaggacagcccaggccgctgcggcgcttcgccgcggcgattaccgcgcttttggtagactcatggtggagagccatcgaagcctacgtgacgattacgaagtatcatgtccggaactggatcaactggttgaggcggctttggcggtgccaggtgtatacggcagcaggatgaccgggggcggatttggcggttgtactgtgaccttacttgaggcctcggcggcaccacacgcgatgaggcatatccaggaacattacggcggcacagctactttttacttaagccaggccgcagatggggccaaagtactctgcctt

SEQ ID NO: 11935 - DNA, 1176 bp, synthetic construct
  misc_feature 1..1176: note = source = /note="Description of Artificial Sequence: Synthetic coding sequence"
  source 1..1176: mol_type = other DNA
atggccgcacttcgccaaccacaggtcgcagaactcttggcagaagcaagacgggcatttagggaagaattcggtgcagaaccagaactcgcagtctcggcccccggaagagtcaatctcattggtgagcacactgattacaaccaaggactggtgctgcctatggcacttgaactgatgaccgtgcttgtgggatccccacgcaaggacggactcgtgtccctcttgactacttccgaaggtgccgatgaacctcagcggctgcaatttccacttcccaccgcacagagatccctggaaccaggtactcctcggtgggcaaactacgtgaaaggagtcatccaatactaccctgcagcgcctcttcctggtttttcggcagtggtggtgtcgtccgtccctcttggaggaggtctttcgtcgtccgcatcgctggaagtggcaacttacacctttcttcagcaactgtgccctgacagcggcaccattgccgcgagggcgcaagtgtgtcagcaagcggagcacagctttgctgggatgccttgcggtattatggatcagtttatctcgctcatgggacagaaaggccacgcactcctgatcgactgtcgtagcctcgaaacctcccttgtgccactgtccgatccaaaactggccgtgcttattacgaattcaaatgtgagacattcgctggcctcttcggagtaccctgtgcgaaggcgacaatgtgaggaagtggcaagagctctgggaaaagagtcgctccgagaagtccagctggaggaactggaagctgcaagagatctcgtgtccaaggaaggattccgcagggcacgacacgtcgtcggtgagatacgcagaactgcacaagccgcagcagccttgagacggggagactaccgagcatttggtcgacttatggtggagagccatagaagccttagagatgactatgaagtgtcttgcccagaacttgatcagctggtggaagcagcgctcgcagtccctggagtgtatgggtcaaggatgaccggaggcggatttgggggatgtaccgtgaccctccttgaagcctccgcagctccgcatgcaatgaggcatattcaggaacattacggggggactgcaaccttttacctttcccaggcagccgacggagcaaaagttctgtgtctg

SEQ ID NO: 11936 - DNA, 1176 bp, synthetic construct
  misc_feature 1..1176: note = source = /note="Description of Artificial Sequence: Synthetic coding sequence"
  source 1..1176: mol_type = other DNA
atggcggctctgcgacaaccacaggttgctgagctgcttgcggaagcccgcagagctttccgggaggaatttggtgccgagccggaactggctgtcagcgccccgggcagagtgaacctgatcggcgaacacaccgactacaaccaaggactggttctgccgatggcgctggaactgatgaccgtgctggttgggtctccgcgcaaagatgggctggtcagccttctgacgacctccgagggggcagacgaaccgcagcggctccaattcccgttgccgacggcgcagcgttcactggaaccaggcactcctcggtgggccaattacgtcaaaggtgtcatccaatactacccggccgcacctctgccaggttttagcgccgttgttgttagctcagtgccactgggcggcggattatcctccagcgcttcattagaagtcgcaacttatacgtttctgcagcagctgtgtccggactctggcactatcgctgctcgcgcacaggtctgtcaacaggcggagcatagcttcgcaggcatgccttgtgggatcatggaccaatttatttctctgatgggacaaaagggtcatgccttgctgatagactgtcgttcattggaaacttctctggtccccctgtctgacccaaagttggcggttctaatcactaattctaacgtccgccattctctagcgagctctgagtacccggtacgccgtcgccagtgtgaggaggtggcgcgcgcactgggcaaggaaagcctgagagaggttcagctagaggagctggaggcagcgcgagacctcgtaagcaaagaaggcttcagacgcgcccgccacgtcgtaggcgaaatccgccgcaccgcgcaggcagctgcggccttacgccggggggactatcgcgccttcggtcgcctgatggtagaaagccatcgttccctgcgcgacgattacgaagttagctgtccagagctcgaccagctagtagaagcagccctggctgttcctggtgtctacgggtccagaatgactggcggaggtttcggcggttgtacagtcacgttgctcgaggcctcggccgcccctcatgcaatgagacacattcaagagcattatggcggtacggcaaccttctacctgagccaggcagccgacggagctaaggtcctctgcctg

SEQ ID NO: 11937 - DNA, 1176 bp, synthetic construct
  misc_feature 1..1176: note = source = /note="Description of Artificial Sequence: Synthetic coding sequence"
  source 1..1176: mol_type = other DNA
atggcagccttgcgacagccacaggtggctgagcttctagcagaagcccgacgcgcattccgggaggagttcggcgcggagcctgagctcgccgtcagtgcccccggccgagttaacctgattggcgagcataccgattacaatcaggggctggtcctgccgatggcgctggaacttatgactgtgctggtgggatccccaaggaaggatggcctcgtgtcccttctaacgacaagcgaaggggcagacgagcctcagcgtcttcagtttccgctccccacagcccagaggtctctcgagcctggcacgcctagatgggcgaactatgtaaagggcgtgatccaatactatccggcagcccccctgccaggctttagtgctgtggtagtgtcttcggtaccattaggcgggggtctctcaagctcggccagtctggaagtggctacatacaccttccttcagcagctgtgtcctgatagcggcactatagcagcacgcgctcaggtttgccagcaggccgaacatagttttgccgggatgccttgtggaatcatggatcagtttatcagcctcatggggcagaaaggacatgccctcttgattgactgcagaagcctcgagaccagtctggtccccctgagtgaccctaagctcgccgtactcatcactaatagcaacgttagacactctctcgcgtcctccgagtaccccgttcggcgccgacagtgcgaagaagtggcacgggccctcgggaaggagtctctgcgggaagtccagctggaggagctggaggccgccagggacctggtttcaaaagagggatttaggcgggcaagacacgtggtgggcgaaataagaagaactgcccaggccgcggcagccttacgacgaggggactatagagcgttcggccgcctaatggttgagtctcatcggagcttaagggatgattacgaggtctcgtgccctgaactggaccagctggtcgaggccgcgttggcagtgccgggggtttatggcagccgtatgacaggtggtgggtttggcgggtgcacagtgacgctcctggaggcctcagctgccccacatgcaatgcgacatattcaggagcattatggagggactgcgactttttatctctcgcaggccgccgacggtgccaaagtcttatgcctc

SEQ ID NO: 11938 - DNA, 1176 bp, synthetic construct
  misc_feature 1..1176: note = source = /note="Description of Artificial Sequence: Synthetic coding sequence"
  source 1..1176: mol_type = other DNA
atggccgccctccggcagccccaggtagcagagcttctggccgaggccaggcgtgcttttagggaggagttcggtgccgaacctgagctggcagtatcagcgcccggccgtgtcaatctcatcggtgagcataccgactacaaccagggcttggtgcttccgatggctctggagcttatgaccgttttggtgggctcgccaagaaaagacggcctcgtctctttgctgaccaccagtgagggagcagacgaaccacagcgactccagttccctctgcctacagcgcagcgaagtctggagccgggtaccccaagatgggccaattatgtcaagggagtgatccagtattatcccgctgcacctttgcctggattcagtgctgtggtggtgtcttcagtacccttaggtggaggactcagcagttccgcttccctggaggtggcgacctatactttcctccaacagctctgtccagatagtggcacaatcgccgcccgcgcccaggtgtgccaacaggccgagcattcgttcgcgggaatgccgtgcggcatcatggatcagttcatttccctgatgggacagaaaggccatgctctcctgatcgactgtcgatccctggaaacaagtctggtgccactgtctgaccctaaacttgccgtactgatcactaactccaatgtgcggcattcactggcctcaagcgaataccccgtcaggaggcggcagtgcgaggaagtggctcgcgccctgggcaaggagtctcttcgcgaagttcagctggaggaactcgaagctgctcgggatctggtctccaaagagggattccgtcgtgcacgtcacgtcgtgggggagatacggcgcactgcacaggccgctgccgctctccgccgtggcgactatcgagcattcggccgactcatggtagagtcacatcgctctctcagagatgattatgaggtcagctgcccagaactggatcaactggttgaggcagccttggctgtgcccggcgtctacggtagccgaatgaccggggggggttttggagggtgtaccgtgaccctgctcgaggcaagtgctgccccccacgctatgcgacatatccaagagcactatggagggaccgccaccttttacctgagccaagcagccgacggcgccaaggttctgtgtctc

SEQ ID NO: 11939 - DNA, 1176 bp, synthetic construct
  misc_feature 1..1176: note = source = /note="Description of Artificial Sequence: Synthetic coding sequence"
  source 1..1176: mol_type = other DNA
atggcagccctgcggcagcctcaggtcgcagagctccttgcagaggcgcggagggcatttcgcgaagagtttggcgccgagccggagcttgccgtgtcagccccaggtagagtgaatctgatcggtgaacacaccgactataatcaaggactagtactaccgatggccctggaactaatgacagtcctggtgggaagcccgcggaaagatggcctcgtgagcctgctcaccacaagcgaaggtgccgacgaaccccagcgcttgcagtttcccttaccaactgcccagcgaagcctcgagccgggcacgccccgctgggctaactatgtgaagggagtgatccagtattaccccgcagcaccgttgcctggcttctccgcggtggttgtgtccagcgtcccgctcggtggggggctgtcctctagcgcatcactagaggtcgcaacatatacttttctgcagcagctgtgtccagatagcgggaccatagctgcccgtgcccaggtctgtcagcaggcagaacactccttcgctggtatgccatgcggaatcatggaccagtttatatccttaatgggccagaagggccacgcgctgctgatagattgtcggagtctcgaaacttcactggtgccgctcagcgatcctaagctggctgttctcataactaacagcaatgttcgccacagtttggcgtcctccgaatacccggtgcggcgcagacagtgtgaggaggtggcccgcgccttgggcaaagagtctctccgcgaagttcagcttgaggagctggaggctgcccgcgacctggtttccaaggagggttttcgtagagccaggcacgtcgtcggcgagattagaaggaccgcccaggcggctgcggctttgagaagaggggactacagggcctttgggcgcctgatggtggaatctcacaggagcctgagggatgattatgaagtgtcatgtccggaactagatcaattagtggaggctgcacttgctgttccgggagtgtatggaagccggatgactgggggaggattcggtggctgcacagtaacccttttggaagcatccgccgctccccacgctatgcggcacatccaggaacactatggtggcactgctacgttttatctaagccaggccgctgacggcgcaaaggtgctgtgcctg

SEQ ID NO: 11940 - DNA, 1176 bp, synthetic construct
  misc_feature 1..1176: note = source = /note="Description of Artificial Sequence: Synthetic coding sequence"
  source 1..1176: mol_type = other DNA
atggccgctttaagacagcctcaagtagctgaactgttggctgaagccagaagggcatttagagaggagttcggagctgaacctgaattggcagttagcgctccaggaagagtgaatctcatcggcgaacacactgactacaatcagggcctggttctgcctatggccctggagctgatgaccgtgctggtaggttctccccgcaaggacggtcttgtcagcctgttgaccacctccgagggagctgatgagccccaacgcctgcagtttcccctaccaacggctcagcgcagcctggaaccagggacccccaggtgggctaactacgtgaagggagtcatccagtactacccagcagcccctttacctggattctcagcagtggtcgtaagcagtgtccccttaggcggaggcctgagcagctccgcgagtctggaggttgccacctacacctttctgcagcagctgtgtccagacagcgggacaatagcagctagagcccaggtctgccagcaagctgaacactcattcgctggcatgccttgtggaattatggatcaattcatctcattgatggggcaaaagggacacgccctcttgattgactgtcggagtcttgaaacctcactcgtcccactgagcgatcccaagctcgctgtcctgatcactaacagcaacgtccgccacagtcttgcctcatcagagtaccctgtgagacgcagacagtgcgaagaagtcgcccgtgctcttgggaaagaaagtttgagggaggtgcaactggaggaattagaggcagctagggacctggttagcaaagagggattcaggcgcgcccgtcatgtcgtcggagagatccgcagaacagctcaggcggcagctgctctgagacgcggggactaccgggcattcggtagactgatggtcgaatcacatagaagtctccgtgatgattacgaggtgtcgtgccccgagctggaccagctcgtagaggctgccctggctgtgcctggagtttatggctccagaatgaccggcggcggtttcggaggatgcactgtgaccctcctcgaggctagcgctgcacctcacgctatgcgacatatccaggagcactatgggggtactgccaccttttatctgtcccaagcagccgatggagctaaggtcttgtgcctg

SEQ ID NO: 11941 - DNA, 1176 bp, synthetic construct
  misc_feature 1..1176: note = source = /note="Description of Artificial Sequence: Synthetic coding sequence"
  source 1..1176: mol_type = other DNA
atggccgccctgcgccagcctcaggtggcggaactcctggcagaagcgcggcgcgcattccgggaggaatttggtgccgaaccagaattggcggttagcgcacctgggcgcgtgaatctgattggcgaacacaccgactataaccaggggctggtgctgccaatggcactggaactgatgacggtgcttgtcgggtccccgagaaaggatggactggtgtcgctcctcaccacttcggaaggagccgatgaaccgcagcggctgcagtttccgctccctactgcccaaagatcgctggaacccgggactccgagatgggccaactacgtgaagggtgtcatccaatactatccggccgcaccgctgccgggattttcagccgttgttgtgtcgagcgtcccgctgggtggtggactctcgtcctcagccagcctcgaagttgctacctacacctttctgcaacagctgtgcccagactccggcactatcgcagctagagctcaggtgtgtcagcaagctgaacactctttcgccggcatgccttgtggaattatggaccagttcatctcactcatgggacagaaaggccacgcccttctcatcgactgtcggtcgcttgaaacctcattggtgccactgtcggatccgaagctcgccgtgctgatcaccaatagcaatgtaagacactccctcgcgtcatcagaatacccagtgcgcaggcggcaatgcgaagaagtggcgcgcgccctgggaaaggagtcgctccgggaagtgcagctcgaggaactggaagccgcgcgggacctcgtgtcgaaggagggcttccgccgggctaggcatgtcgtcggagaaatccggcgcacggcccaagcagccgcagcactgcgccggggtgactaccgagcgttcggacggctgatggttgaatcccaccggtcgcttcgggatgactacgaagtctcgtgcccagagttggaccagttggtggaagctgcattggccgtcccaggagtgtacggatcgagaatgaccggtggcggatttggcgggtgcacggtgactctgctggaggcgtccgccgccccgcacgcgatgaggcacatccaggaacactacggcggaaccgcgactttctacctctcacaagccgctgacggcgccaaagtcctgtgcctc

SEQ ID NO: 11942 - DNA, 1176 bp, synthetic construct
  misc_feature 1..1176: note = source = /note="Description of Artificial Sequence: Synthetic coding sequence"
  source 1..1176: mol_type = other DNA
atggccgcattgcgacaacctcaagtcgctgaattgcttgctgaggctagaagggccttcagagaagaatttggagcagaaccagaacttgccgtttctgcaccaggccgagtaaatctgatcggagagcatactgactataatcaaggactggtcctgccgatggcattggaactgatgaccgtactggtgggatcacctagaaaagatggacttgtatctttgttgaccacttcggaaggagcagacgaacctcaaaggttgcagtttcctcttcctacagcgcaacgctctttggagccgggcactccacgttgggcgaattacgtaaaaggagttattcaatattatcctgcagccccattgccaggattcagtgccgtggttgtcagctctgtgccgctaggaggcggcttaagttcgtctgcttcattagaagtagccacatatactttcttacaacaattgtgtccagattcaggaacaattgccgccagagctcaggtttgccaacaagctgaacattcatttgcgggcatgccatgtggaatcatggatcaattcatttcgttaatgggtcagaaaggacacgccctgctcattgattgtcgctctcttgagacatctctggttcctctaagtgacccaaagctcgcagttcttattactaactcgaacgtgcgacattcacttgctagctcagaatatccggttcgacgtcgacagtgcgaagaagtcgcacgggcccttggtaaagaatcactgcgagaagttcaactggaagagctcgaagcagcccgagatttggtctcaaaagagggcttccggagagcacgccacgttgtcggagaaatccgtagaacagcacaggccgctgctgctcttcgtaggggagactacagagcctttggacgtttgatggtcgaatctcatcggtctctccgggatgactacgaagtctcttgtccagagcttgaccaattggtggaggccgcacttgccgtcccgggagtttatggctctcgcatgactggtggaggattcggcggatgtacagtaacgttgttggaagcttcagcagctccgcatgctatgcgacatatccaagagcactacggaggtacggcaaccttttatctaagtcaagctgcagatggagcaaaagtgttgtgtctt

SEQ ID NO: 11943 - DNA, 1176 bp, synthetic construct
  misc_feature 1..1176: note = source = /note="Description of Artificial Sequence: Synthetic coding sequence"
  source 1..1176: mol_type = other DNA
atggccgcacttcgccagccccaggtggccgaattactagctgaagctcggagagccttccgcgaagagttcggagctgaacctgagttggcagtctccgcccccgggagagtgaatctgataggcgaacatactgattataatcaaggcctcgttcttcctatggctcttgagctcatgaccgtgctggtaggctctccccgcaaggatggactggtgtcattgctgacaacctccgagggagccgatgagccccagcgcttgcaattcccacttcctacagcccagagaagtcttgaaccagggactccccggtgggccaattatgttaaaggagtcatccagtattatcctgcagccccattaccgggattcagtgcagtggtcgtgtcttcagtcccattaggaggcggacttagcagctccgcatccttggaagtcgcaacctacacttttctgcagcaactctgcccagactcagggaccatagccgctcgggctcaggtgtgccagcaggctgagcacagcttcgctgggatgccttgtggcatcatggaccagtttatcagcctgatgggtcagaaaggtcacgctcttctaatcgattgccgctcattagaaacaagcctggtcccgctgtcagaccctaaactcgcagtactcatcaccaatagcaacgtgcgccatagcctggcttctagcgagtacccagtccggcgaagacagtgtgaggaagtagcaagagctctaggtaaggaatccttaagagaggtgcagcttgaggagctcgaagctgctcgggatctggtttctaaggaagggtttcgccgagcacgacatgtggttggcgagatacgcaggacggcccaggccgccgctgctctgcgtcgcggggactaccgtgcattcggccgcctcatggtggagtcccataggtcacttcgggacgattacgaggtgtcttgcccagagttggaccagctcgttgaggccgccctggcagttccaggcgtgtacggctcacgcatgactggaggaggtttcggcgggtgcactgttactctgctcgaagcaagcgctgcccctcatgccatgaggcacatccaggagcactacgggggcaccgctaccttttacctgagtcaggcagcggacggcgctaaggtactgtgcctg

SEQ ID NO: 11944 - DNA, 1176 bp, synthetic construct
  misc_feature 1..1176: note = source = /note="Description of Artificial Sequence: Synthetic coding sequence"
  source 1..1176: mol_type = other DNA
atggcggctctgaggcaaccacaagtcgcggagctgcttgccgaggcccggagggctttccgcgaagaattcggagcagagcctgaactcgccgtgtccgcgccaggtcgggttaatctcattggggaacacacagattacaaccaaggactcgtgctcccaatggctctggagctgatgactgtcctagtgggtagcccccgtaaggatggcctggtgtcactcctgacaacctcagaaggcgctgacgaaccacaaaggctccagttccccttgccgactgcgcagcgctcgctggagccaggaacgccacgctgggcgaactatgtaaaaggggtgatccagtactacccggcagctccactacccgggttctctgcagtagtagtttcttccgtgcccctcggcggcggtctaagttcttcagcctctctggaggttgccacttacacattccttcagcagttgtgtccggactccggcactatagcggctagggcacaggtgtgccaacaggcagagcacagctttgctggtatgccttgtggcataatggaccagtttatcagccttatggggcagaaaggacacgccctgctgatcgattgcaggtccttggagacatctctggttccgctcagtgatcctaaactggccgtgcttatcactaactccaatgtgagacactcacttgcctccagcgaataccccgtccgccgaagacagtgtgaggaggtggcccgtgcgttagggaaggagtcgttgcgtgaggtgcagctggaggaattggaagcagccagagacttggtgagcaaggaaggttttcggcgcgcccggcacgttgtgggggaaatacgcagaactgcgcaggctgctgcagccttgaggcgtggggattatcgggcatttggcagactgatggtggaatcgcaccgctccctccgggacgattacgaagtgtcatgtcccgagttggatcagctggttgaggcagctctagcagtgcctggggtgtatggcagccggatgacagggggtggttttggcggctgtactgtgacgttgctcgaggctagcgctgcgcctcatgcaatgcgtcatatccaggagcactacggagggacagccactttttacctctcgcaagccgccgatggggcaaaggtcctgtgcctg

SEQ ID NO: 11945 - DNA, 1176 bp, synthetic construct; identical to SEQ ID NO: 11931
  misc_feature 1..1176: note = source = /note="Description of Artificial Sequence: Synthetic coding sequence"
  source 1..1176: mol_type = other DNA

SEQ ID NO: 11946 - DNA, 1176 bp, synthetic construct
  misc_feature 1..1176: note = source = /note="Description of Artificial Sequence: Synthetic coding sequence"
  source 1..1176: mol_type = other DNA
atggccgccctccgtcaaccccaagtggccgagttgctggccgaggcccgaagagccttccgcgaggaattcggcgctgagcctgagcttgctgtgtccgcaccaggaagggttaaccttattggcgagcatacagattacaatcagggactcgtgttgcccatggcccttgagctgatgacagtgttagtgggtagcccacggaaggatggcctggtctcactcctgactaccagcgaaggtgccgatgaaccccagagactccagttccccctgccaaccgctcagcgatccttagaacctggcacccccaggtgggccaactacgtcaagggcgtcattcagtactatcccgcagctccattgccgggattttcagcagtggtcgtctcgagtgtcccccttggaggtggactcagcagtagcgcgtcactagaagttgctacatatacctttctgcagcagctgtgcccagactctggcacaattgccgcccgggcacaggtgtgtcagcaagcagagcactcctttgctggcatgccttgtgggattatggatcagttcatctccctcatgggtcagaagggtcacgcgctgctcatagactgtaggtctcttgagacctccctcgtcccactgagcgatcctaaactggcggtgctcatcacaaactctaacgtgcgccactcactggcctccagcgagtaccccgtacggcgccgccagtgtgaggaggtcgctagggccttagggaaagaatccctcagggaagtccaactggaagagctagaagcggccagagatttggtgagtaaagaaggctttcggagggccaggcacgtagtgggagagatccggcgaaccgcgcaagccgctgccgccctgagacgaggtgactaccgtgcattcggccgtcttatggtggaaagccatcggtctctgcgcgacgattatgaagtgtcttgtccagagctagatcagcttgtggaggcagctctggccgtgcctggagtgtacgggagcaggatgactggtggcggtttcggcgggtgcactgttaccctcctcgaggctagtgcggctccacatgctatgaggcatattcaggagcactacggaggcacggctacattctacctgagccaggctgctgacggggctaaagtgctatgtctt

SEQ ID NO: 11947 - DNA, 1176 bp, synthetic construct
  misc_feature 1..1176: note = source = /note="Description of Artificial Sequence: Synthetic coding sequence"
  source 1..1176: mol_type = other DNA
atggcggccctgcggcaaccgcaagtggctgagctgctggcagaagctcggagagcgttcagggaggaatttggcgcggaacccgagttggcagtgagtgcaccgggacgcgtgaatctcatcggtgagcacaccgattacaatcaaggccttgtgctgccgatggcgctggaactcatgactgtcttggtggggtcgcccaggaaggacggactggtgtccctcctgaccacttccgagggagccgacgaacctcaaaggctgcagttcccgttgccaaccgctcaaagatcgctggaacctggcactcctaggtgggcgaactacgtgaagggagtgatccagtactacccagcagcgccactgcccggattctcagccgtcgtagtctccagcgtaccgcttggaggaggactttcgtcgtcagccagcctggaagtcgcaacctacaccttcttgcagcagctgtgcccagatagcggaaccattgccgcgagagcccaggtctgtcaacaagccgagcactcctttgcgggtatgccgtgtggaatcatggatcagttcatctccttgatggggcagaaagggcacgcgttgctgatcgactgtagatcccttgaaaccagccttgtgccgctgtcggacccgaagctcgcagtgcttataaccaactcaaacgtccggcatagcctggcttcctcggaataccctgtccgccggcgccagtgcgaggaggtcgcccgtgccctcgggaaggaatcgctccgggaggttcagctcgaagaacttgaagccgcccgggacctcgtgtcgaaggaaggctttcgcagggccagacatgtggtgggtgaaatccgcagaactgcccaagcagctgccgctttgcggagaggagattaccgagccttcggcaggttgatggttgagagccaccggtccctccgggacgactacgaggtgtcgtgccccgagctcgatcagctcgttgaagcagcactggcggtgccgggcgtgtacggatcacggatgactggaggcggttttgggggctgcactgtcacgttgctcgaggcgtccgctgcacctcatgcgatgcgacacattcaggagcattatggaggaactgccactttctacctgtcgcaggcagccgacggagcaaaggtgttgtgtctt

SEQ ID NO: 11948 - DNA, 1176 bp, synthetic construct
  misc_feature 1..1176: note = source = /note="Description of Artificial Sequence: Synthetic coding sequence"
  source 1..1176: mol_type = other DNA
atggcggccctcaggcagccccaggtcgccgaacttctggcggaggcccggcgagcttttcgcgaggagtttggagctgagccggaactcgccgtttctgcccctggacgcgtcaacctcatcggagaacatacggattacaaccagggccttgtgctgccaatggcactcgaactcatgactgtgctcgtaggaagccccagaaaagatggcctcgtgtcgctgttgaccactagcgagggagccgacgaaccgcaacggctccaattcccgctgccgactgcacagcgctcgctcgagccaggaacgccccgctgggccaactacgtcaagggcgtgatccagtactaccctgccgcaccgctgcccggattttcagccgtcgtggtgtcgtcagtcccactcggaggaggcctctccagttcggcaagcctggaagtcgcaacctatacgttcctgcaacagctctgcccagacagcggaactattgccgcacgggcccaggtctgccaacaggcagagcactcgtttgctggaatgccttgtgggatcatggaccagttcatctccttgatgggccagaaaggtcacgccctcctcatcgactgcagatcgttggaaacctcactggtgccgctgtccgatcctaaactggctgtgctgattacgaattccaatgtccgccacagcctggcctccagcgaatacccggtccggcgcaggcagtgcgaggaagtggcaagagccctgggcaaagagtcactcagggaggtgcagcttgaagagctggaagcagcccgggacctggtgtccaaggagggcttccggcgggcccggcacgtggtcggcgaaattcgccggactgcccaggctgcggcggcacttcggagaggagactacagggccttcggtagactgatggtggaaagccatcggtcgctgagagacgactacgaagtgtcgtgcccggaactcgaccagctggtggaggctgcgctcgccgtgccaggggtctacggctcgcgcatgactggaggcgggttcgggggatgcaccgtgactctgctggaagcatccgcagccccacacgccatgcgccatatccaggaacactacggagggactgccaccttctacctgtcacaggccgccgacggagccaaggtgctgtgcctg

SEQ ID NO: 11949 - DNA, 1176 bp, synthetic construct
  misc_feature 1..1176: note = source = /note="Description of Artificial Sequence: Synthetic coding sequence"
  source 1..1176: mol_type = other DNA
atggcggcacttagacaaccccaagtggccgagctgttggccgaggcccgccgcgctttccgggaggagttcggcgcggagcctgaactcgccgtaagcgcccccggcagggtgaatctgatcggagagcacactgattacaatcagggactcgttctgccaatggcgctggaactaatgacggtgctcgtaggttccccaaggaaggacggcctagtgtctctgttgaccacttcagaaggggctgacgagcctcagaggctgcagtttcctctcccaaccgcgcaacggagtctggagcctggcacaccacggtgggccaattatgttaaaggcgtgatccagtactatcccgcagcacctctgccagggttctccgccgtagtcgtttccagtgtacccctgggcggcgggttgagcagctctgcatccttagaggtggccacttatacatttcttcagcagctctgccccgactcaggcaccattgcagcccgggctcaggtgtgccagcaggccgaacacagtttcgctggaatgccatgcggcattatggaccaattcatcagtctaatgggccagaagggacatgctctattaattgactgtaggtcgctcgagacttcccttgttcccctaagcgatcccaaattggccgtactgattacaaacagtaatgtgcggcactccctggcaagttcagagtatccagtccgccgcaggcaatgtgaagaggtcgcacgggcccttgggaaggagtccctgagggaagttcagctagaagagctggaggcggcccgggacctcgtcagcaaggaaggatttaggagggccagacacgtggtgggagaaatccgtaggaccgcgcaagctgcagcagccctgaggaggggtgactatagagctttcggaaggctgatggtcgagagtcatagatcactgcgcgacgattatgaagtgagctgccccgagctggaccagctggtcgaagccgcattggcagtgcctggggtgtacgggagtcggatgacgggtggagggttcggcgggtgtactgtcaccttactcgaagcatctgctgctcctcacgcaatgcggcacatccaggaacattatgggggtaccgctacgttctacttatcgcaggcagcagatggagcaaaggtgctgtgtttg

SEQ ID NO: 11950 - DNA, 1176 bp, synthetic construct
  misc_feature 1..1176: note = source = /note="Description of Artificial Sequence: Synthetic coding sequence"
  source 1..1176: mol_type = other DNA
atggcagcccttagacagcctcaggtggctgaactactcgccgaagctcggcgagcgtttcgtgaggaattcggcgctgaacctgagctggccgtatcagcacccgggagggtgaatctaatcggagagcatacagactacaatcagggcctggtcctgccaatggctctggaactcatgaccgtgctcgttggttctccccggaaggacggcctggtgtcactgctgaccactagcgagggagcggacgaaccccaaaggctgcagttcccattaccaactgctcaacgttcactggaacctggtactccaaggtgggccaattacgtaaagggcgttattcagtactaccctgccgctcccctgccagggtttagcgccgtggttgtctcttcggtgccactgggcgggggcctgagctcatctgcaagcctcgaagttgcaacttacacgttcctccaacagctgtgtcctgacagtggcacgatcgcggcccgggcacaggtgtgccaacaagcggagcattccttcgcagggatgccctgtggaatcatggaccaatttatctccctcatgggccagaaaggccacgccctgctgattgactgccggagtctggagacctcactggtgcccctttctgatccaaagctggccgtccttattaccaacagcaacgtaagacactcccttgcctcatcagagtatccggttcgccggagacagtgtgaagaagtagcccgggccttggggaaggaatcattgagagaagtccagctcgaagaactggaagccgcaagggacctggtgtccaaggaaggattcagacgggccaggcatgtggtcggtgagattagacggactgctcaggcggcagcagctctaagaaggggtgactacagagccttcgggcgactcatggtggaatcccaccgttccctgcgggatgactatgaggtcagctgccccgagctggatcagctcgttgaagcggccctggcagtcccaggggtgtatggtagcaggatgactggcggaggattcggcgggtgtaccgtgaccctgctggaagcgtccgcggccccacatgctatgaggcacattcaggaacactacggggggaccgcaacattctatctaagccaggcagccgacggggcaaaggtgttgtgtctc

SEQ ID NO: 11951 - DNA, 1176 bp, synthetic construct
  misc_feature 1..1176: note = source = /note="Description of Artificial Sequence: Synthetic coding sequence"
  source 1..1176: mol_type = other DNA
atggcagcgcttcgacaaccacaggtggccgaactgctcgcagaagcacggagagcttttagggaagagtttggcgcggaaccagaactcgccgtgtccgcgccaggaagagtgaacctgattggggaacacactgattacaaccaagggctcgtcctccctatggcactcgaacttatgacggtgctggtgggaagcccccggaaggatggacttgtgtcgctgctgaccactagcgaaggagcagatgaacctcaacgcctccagttccctttgcccaccgcacaacgctccctggagcccggaacccctcggtgggcaaactacgtgaagggcgtgattcaatactaccctgccgcaccactccccggattttcagcggtggtcgtgagctccgtgccacttgggggcggcctttcgtcctcggcatcgctggaagtggcaacttacaccttcctgcagcagctttgtccagattcggggactatcgcagcaagggcacaggtgtgtcaacaggcggaacacagctttgccgggatgccatgtggaataatggatcaattcatttcgctcatgggtcagaagggtcatgcactgcttatcgactgtcggagtcttgaaacctcgctggtccctctgtcagatccaaagttggccgtgctcatcacgaattccaacgtgcggcattcgcttgcctcatcggaataccccgtcagacgcagacaatgtgaagaagtggctagagcccttggtaaggaatcacttagagaagtccaactcgaagaactggaagcagcaagggatctggtgtctaaggaaggttttaggcgcgctaggcatgtcgtcggtgagattagacgcactgcacaagcagcagcggcactgagacgaggagattatagggcatttggccgcctgatggtggaaagccacaggtcgcttagagacgattacgaagtgtcatgcccggaacttgatcaacttgttgaggcagcactggcagtcccgggagtgtacggttccagaatgaccggtggaggttttggaggctgtactgtgactcttctggaagcatcagcagcaccgcatgcaatgcgacacattcaagagcattacggtggaaccgcaactttttacctgtcacaagctgcagatggggcaaaggtgctgtgtctc

SEQ ID NO: 11952 - DNA, 1176 bp, synthetic construct
  misc_feature 1..1176: note = source = /note="Description of Artificial Sequence: Synthetic coding sequence"
  source 1..1176: mol_type = other DNA
atggccgcacttaggcagccccaggtcgccgaactgctcgctgaggctcgtagggcattccgtgaagaatttggcgccgagcctgagcttgccgtgtcggcgcccgggcgcgtcaatctgatcggtgaacatactgattataaccaaggtctggttctgccaatggctctggaacttatgacagtgcttgttggctctcctcggaaagacggactggtgagtctgttgaccacgtccgaaggtgctgacgaacctcagaggctccagttccctcttccaacagcccaaagatccctagagccaggcactccaaggtgggccaactacgttaagggcgttattcagtattatcctgccgcccccctgcccggattttcggctgtcgtggtgagctccgtaccactggggggggggctcagctcctccgccagcctggaagtggccacctatacattcctgcagcaattgtgtcctgattctggaaccattgctgccagggctcaggtttgccagcaggcagaacatagctttgctggaatgccctgtggcataatggaccaattcatatccctgatgggtcagaaagggcacgcccttctgatcgattgccgatctttggagacatcattagttcccctgagtgatccgaagttagcggtactgattacaaacagtaatgtgcgacactcattggcctcgagcgagtacccagtcagaagaagacaatgtgaagaggtggcccgcgcactcggaaaagaatccttgagagaagtacaacttgaagaactcgaagcggcccgggatctggtgagcaaggaggggttcaggcgagcaaggcacgtggtgggcgagatcagaagaactgcacaggcggccgccgctctccgaagaggggattacagggccttcggaagactgatggttgagtctcataggtcgctcagggatgactatgaagtatcatgtcccgaactggatcagctggtcgaagctgcactggctgtcccaggagtgtacggttccagaatgaccggaggggggttcggcggctgtacggttactttgctggaagcgagcgccgccccccatgccatgagacacattcaggagcactacgggggcactgcaacattctacttatctcaggctgccgatggcgcaaaggtcttgtgtctg

SEQ ID NO: 11953 - DNA, 1176 bp, synthetic construct
  misc_feature 1..1176: note = source = /note="Description of Artificial Sequence: Synthetic coding sequence"
  source 1..1176: mol_type = other DNA
atggccgctcttagacagccacaagtcgcagaattgctggcggaggcaagacgagccttccgcgaagaatttggtgccgagcctgaactggcggtgtcggccccgggcagagttaacctcatcggggaacacaccgattacaaccaaggattggtgctgccaatggccctcgaactgatgacggtcttggtggggtcccctcggaaggacggactcgtgtccctcctcactacttcggaaggagcggacgaaccgcagagactccaattccccctgccaaccgctcaaagatcgcttgagccggggacgccaaggtgggccaactacgtgaaaggagtcatccagtactacccggctgcgccattgccggggttttcagcagtggtggtttcgtccgttccgctgggtggaggcctgtcctcctctgcgtccctcgaggtggcgacttacactttcctccagcagctgtgcccggatagcggaactattgcggcacgggcacaggtctgccaacaggctgaacacagcttcgctggcatgccctgcggcatcatggatcagttcattagcctgatggggcaaaaagggcatgcgctgctgatagactgtaggtcgcttgaaaccagtctcgtgcctctgagcgatcccaagctggcagttcttatcacgaattcgaatgtgcgccactcgctggccagctctgaatacccggtgagacggcggcagtgtgaagaggtagcgcgggcgctggggaaagaatccctgcgggaagtgcagctggaggaactggaggcggcacgcgacctcgtgtccaaagagggatttcgccgcgcccggcatgtggtgggggagatcagacggaccgcacaggccgcagccgcgctgcgacggggtgactacagagctttcggaaggttgatggtggagtcacatcggtcactgcgtgatgactacgaggtcagctgcccagagctcgaccaactggtggaggcagcactggccgtccccggagtttacgggtcccgcatgacgggaggaggcttcggtggatgcaccgtgactctcctggaagcctcggcggccccgcacgccatgaggcacattcaggaacattatgggggaactgcaaccttctacctgtcgcaggctgctgacggagcaaaggtgctctgcctg

SEQ ID NO: 11954 - DNA, 1176 bp, synthetic construct
  misc_feature 1..1176: note = source = /note="Description of Artificial Sequence: Synthetic coding sequence"
  source 1..1176: mol_type = other DNA
atggcagcactccgacagccgcaggtggcggagctcctggcggaagcaagaagagcatttcgggaagaattcggtgcagagccagaacttgccgtgtcggcccctggaagagtgaatttgattggtgaacatacggattacaatcaaggcctggttctgccaatggcactggaactgatgactgtgctggtgggatccccgagaaaggatggtcttgtgtccctgctgaccacctccgagggggcagatgaacctcagcgtctgcaattccctctgcccaccgcacagcggtcactggagcctggcacccctagatgggcaaattacgtgaagggagtgattcagtactacccagcagcccctctcccgggattctcggcagtcgtcgtgtcgtccgtccccctcggcggaggactgtcatcatcggcctcgcttgaagtggcaacctacacctttctgcaacaactctgtccagattcgggaaccattgctgctcgcgcacaagtgtgtcaacaggcagaacactcattcgcaggaatgccatgcgggattatggaccagtttatctccctgatgggacaaaagggtcacgcgcttcttattgattgtcggtccctcgagacttcactcgtgccactctccgacccgaaacttgcggtgcttattactaatagcaatgtgaggcattcattggcgtcgtccgaatacccagtccggaggagacagtgtgaggaagtcgccagagcactcggaaaggaaagccttagagaagtgcaactggaggaactggaagccgcaagggacctggtgtctaaggaaggattcagaagagccaggcacgtcgtgggcgaaattagacgtaccgcccaggcagctgcagcgctccgacgaggagattatagagcatttggacgtctcatggtcgagtcgcatcgcagcctgcgcgacgactacgaggtcagctgtcctgagctggaccaactggtggaagcagcgttggccgtgcctggggtttacgggagcaggatgaccggcggaggttttggaggatgcactgttaccctccttgaagcctccgccgctccacacgcaatgaggcacatacaagaacattacggcggaactgctacgttctacttgagccaggcggcagatggagcaaaggtcctttgtctg

SEQ ID NO: 11955 - DNA, 1176 bp, synthetic construct
  misc_feature 1..1176: note = source = /note="Description of Artificial Sequence: Synthetic coding sequence"
  source 1..1176: mol_type = other DNA
atggccgcccttcggcagccacaggtagccgagcttctggccgaagctagacgagcatttagggaggaattcggggctgaacctgagctggccgtgtccgctccagggcgggtgaacttgataggagagcacaccgactacaaccaagggttagtgttgcccatggccctggagctcatgaccgtgctggtggggtctccacgcaaagacggactggtgtccctcctaacaacgtcggagggagctgatgagccacagcgacttcagttcccattgcctacagctcagcgctctctagaaccaggaacaccccgttgggccaattacgtgaagggcgtgattcagtattatccagctgccccactccctgggttttccgctgtggtagtgtcctctgtgccattggggggaggcctgagcagttcagcttctctggaagtggcgacatacacctttttgcagcagctttgtccagacagtggaacaattgcagctagggctcaggtgtgtcagcaggctgagcactctttcgccggcatgccttgtggcataatggatcaattcatttcactgatggggcagaagggacatgcccttctgattgactgtcgttccctggaaactagcctggtgccactttctgatcccaaacttgccgtattaatcacgaattctaacgtgaggcattctctggcctctagtgaatacccagtccgacgccgacagtgtgaggaggtggcaagagctctcggtaaggagagtctccgggaagtgcagctggaagagctcgaggcggctcgtgatcttgtctccaaagaggggttccgaagagcccgacacgttgttggcgagattcgaagaaccgcccaggccgccgcagcactccgcaggggtgactaccgtgccttcggacgcctcatggtggagagccaccggtccctaagagacgattatgaagtgtcgtgcccagagttggatcagctggtagaggccgctctggctgtacctggagtttacggctccagaatgaccggtggtggcttcggtggttgtacggtgacactgttggaggctagcgctgcgccccatgccatgcggcatattcaggagcactatggcggtaccgcaaccttctacctgagtcaggcagcggacggagcaaaggttctgtgtctc

SEQ ID NO: 11956 - DNA, 1566 bp, synthetic construct
  misc_feature 1..1566: note = source = /note="Description of Artificial Sequence: Synthetic coding sequence"
  source 1..1566: mol_type = other DNA
atggcagcggtggtggcagcgacgcggtggtggcagttgcttttagtcctttctgcggctgggatgggagccagcggcgcgcctcagcctccgaatattttactactgcttatggatgacatgggatggggggatttaggagtctatggtgaaccttctcgggagactccgaaccttgaccgcatggcggctgaagggcttctgtttccgaacttttacagtgcaaatccgctttgctccccctctcgtgcggctctcttaactggaagattgcctatacggaatggcttttacacgacaaacgctcatgcaagaaatgcatacacgccgcaggaaattgttggagggatcccagactcagaacaactgcttcctgaattacttaaaaaagcagggtatgtttcgaagatagtgggaaaatggcatctgggccatcggccgcaatttcacccactgaagcatggattcgatgaatggtttggatccccaaattgtcactttggaccgtacgataataaagcccggccaaatattccggtatatcgcgactgggaaatggtaggaaggtattatgaagagtttccaatcaatctcaaaacgggcgaagctaatttaacgcaaatatatttacaagaggcgttagattttattaagagacaagcgaggcatcacccgttttttttgtattgggctgttgatgcgacgcacgcgccagtctatgcaagcaaaccgtttcttggcacgtcacagcgtggccgctacggcgatgctgtgagagaaattgatgattcaattggaaagatattggaattattgcaggatcttcatgtcgctgataacacatttgtcttttttacgtcggataacggagctgctctgattagcgcaccggaacagggaggatcaaacggaccatttttatgtggcaagcagacaacctttgagggcggtatgcgcgaacctgccttagcgtggtggccgggtcatgtaacggcaggccaagtatctcatcaattaggttccatcatggatttgtttactacctcactggccctggctggtttgactccgccgagtgatcgtgcaattgacggccttaatttgctgccaaccttactacaaggccggctgatggatcgtccgattttctactacagaggcgacacacttatggcagccacgcttggccaacataaggcccatttttggacatggaccaactcatgggaaaattttagacaaggcattgatttctgccctggccagaatgtttctggagtaacgacgcataacttagaagaccataccaaacttccgttaattttccatttaggtcgggaccctggagaaagattcccactgagttttgctagtgcagagtatcaggaagcgctcagtcgcattacatccgtggtccaacagcatcaggaggcactggtgcccgcgcaacctcagttgaatgtgtgcaattgggcggtcatgaactgggccccaccaggttgtgagaagctgggaaaatgtcttacgcctcctgagagtattcctaaaaagtgtctatggagccac

SEQ ID NO: 11957 - DNA, 1566 bp, synthetic construct
  misc_feature 1..1566: note = source = /note="Description of Artificial Sequence: Synthetic coding sequence"
  source 1..1566: mol_type = other DNA
atggccgcggtcgtggcagcgacccgttggtggcagctgctgctcgtcctttccgccgcaggaatgggcgcttcgggcgccccccagccccctaatatcctccttcttctgatggatgacatgggatggggagatctcggagtgtacggagaaccttcgagagaaacccctaacctggatcgtatggccgccgagggacttctgtttcctaacttctactcggcaaacccactttgttctccatcacgggcggcactgcttaccggtaggctccctatcaggaatggattttacaccactaatgcacatgctagaaacgcatacacccctcaggaaattgtgggtgggatcccagattcggagcagctgctgccggagttgcttaagaaagcaggatatgtgtccaagattgtgggtaagtggcatttgggacatcgacctcaatttcatccgctgaagcatggatttgatgaatggtttggtagcccgaactgccactttggaccctacgacaacaaggcccgccctaacattccggtctaccgcgattgggaaatggtgggacgatactacgaagagttcccgattaacctgaaaacgggagaagcaaaccttactcaaatctacctccaggaggcactggatttcatcaagagacaggcaagacaccatccatttttcctttattgggcagtggatgcgacgcacgccccagtgtacgcatcgaagccatttcttgggacttcgcagcgcggtcgctacggtgatgccgtccgggaaattgacgactcgattggtaagattcttgaactgctccaggatcttcacgtggcagataataccttcgtgtttttcaccagcgataatggtgcggcgcttattagcgcaccagaacaaggtggttccaacggccctttcctttgtgggaagcagactacttttgaagggggaatgagagaaccagcccttgcctggtggcccgggcacgtgacggcaggacaggtgtcgcatcaacttggttcaatcatggatctctttaccacttcgttggcactggctggtcttacgccacccagcgatcgggccattgacgggcttaatcttctgcctaccctgctccagggacgccttatggaccgtcctatcttttactatcgcggcgatactctcatggccgcaacgcttggtcagcataaggcgcatttttggacctggactaactcgtgggagaactttcggcaaggcattgacttttgtcccgggcaaaacgtgtctggcgtgaccactcacaatttggaagatcacaccaagttgcccctcattttccatcttggacgggatcccggtgagcgatttccgctctcgttcgcaagcgcagagtaccaagaagccttgtcgcgaatcacctcggtcgtgcaacagcatcaggaagcactcgtgcctgctcaaccccagcttaacgtctgcaattgggccgtgatgaactgggcacctcctggatgcgaaaaactcggtaaatgcctgacgccccctgaatcaattccaaagaagtgtctttggagccat

SEQ ID NO: 11958 - DNA, 1566 bp, synthetic construct
  misc_feature 1..1566: note = source = /note="Description of Artificial Sequence: Synthetic coding sequence"
  source 1..1566: mol_type = other DNA
atggccgcagtcgtggccgccacccggtggtggcaacttctgcttgtgctgtcagcagccggtatgggtgcgtcgggggccccgcagccccccaatatccttctcctgctgatggacgacatgggttggggcgacctcggtgtctacggcgaaccctcccgtgaaacccccaacctggatcgcatggcggcagaaggtttgttgtttcctaatttctactcggcaaacccactgtgctctcctagccgcgcagctctgctcacgggaaggctgcctatacgcaatggattctataccactaatgcccatgcccggaacgcatacaccccccaggaaatcgtggggggaattccagattccgaacaattgctccccgaactgctcaaaaaagccggctacgtctccaagattgtgggaaaatggcacctggggcataggccacagtttcatccacttaagcatggttttgatgaatggtttggatcccccaattgccattttggtccttacgataacaaggcacgacctaacatccctgtctaccgagactgggagatggtcggaagatactacgaagagtttcccataaacttgaaaaccggcgaagcaaaccttacccaaatctacctgcaggaagcgctcgatttcatcaagagacaggcaagacaccacccattcttcctgtactgggctgtggacgcaacgcatgcgccagtgtacgcatccaagccatttctgggtacgagccagagaggtcgctacggcgatgcagtgcgcgaaattgacgatagcatcggcaaaattctcgaactcctgcaagaccttcatgtggccgacaacaccttcgtctttttcacttccgataacggtgcagcgttgatttccgctccggaacagggtggatccaatgggccattcctgtgcgggaagcaaactacctttgaaggcggaatgcgcgaaccagcacttgcatggtggcctggtcacgtgactgcaggccaagtctcacatcaactggggagcattatggacctttttacgacttcacttgcccttgccggactcactccaccctccgatagagcaattgatggacttaaccttcttcccaccctcctgcaaggcaggctcatggataggcccattttctactaccggggagatactctcatggcagctaccctgggtcagcataaagctcatttttggacgtggactaactcatgggaaaactttaggcaggggatcgatttctgccccggacagaacgtgtcgggagtgaccacccataacctcgaggatcatactaagctgcctcttatctttcatcttggcagggatccaggggaacggttcccactgtcgttcgcctccgcagagtaccaagaggcgctgagccgcattacctctgtggtgcaacaacaccaggaagcgcttgtgccagcacagccccagctgaatgtgtgcaattgggcagtgatgaattgggcacctccaggctgtgaaaagctgggaaagtgtctgaccccgccagagagcatccctaagaagtgtctttggagccac

SEQ ID NO: 11959 - DNA, 1566 bp, synthetic construct
  misc_feature 1..1566: note = source = /note="Description of Artificial Sequence: Synthetic coding sequence"
  source 1..1566: mol_type = other DNA
atggcagctgtcgtggcagctaccagatggtggcagctccttctggtgctcagcgcagcaggtatgggagcttcaggagcaccacaacccccaaacatccttctcttgctgatggatgatatgggctggggcgacctgggtgtgtacggtgagcccagccgtgaaacccctaaccttgatcggatggccgcagaaggactgttgtttccaaacttttactcggcaaaccccctttgtagcccatcacgggctgcacttctcaccgggcgcctgccaattagaaatggcttttacactactaacgcacatgcacgcaacgcttacactccgcaagagattgttggaggtatcccagactccgaacaacttttgccagaacttttgaagaaggccggctacgtgagcaagatcgtgggtaaatggcatctgggccatcgtcctcagtttcatccccttaagcatggtttcgatgaatggttcggatcaccaaattgtcactttggaccttacgacaataaggcaagacctaacattccagtgtatcgtgattgggagatggtgggtcgctactatgaagagttcccgattaatctgaaaaccggagaagccaacctgacccagatttacctccaagaagcacttgactttatcaagcgccaagccagacatcatccatttttcctttactgggctgtcgatgcaacccacgcccctgtgtacgcatcgaaacctttcctgggtacctcgcaacggggccgctatggagacgccgtgcgggagatcgatgactcaattggaaagatactcgaactccttcaagatcttcatgtcgctgacaacacttttgtgttcttcacctcagacaacggggctgcactcatctctgctcctgagcagggaggctccaacggaccctttctttgcggaaagcaaaccacctttgaaggcggaatgagggagcctgccttggcctggtggcctggtcatgtgactgcagggcaagtctcgcatcagttgggatcgatcatggatctgtttaccacttccctggcattggcagggcttacccctcccagcgatagggcaatagacgggcttaacttgctgcccacgctcctccaaggacggctgatggatcgaccgattttctactaccggggtgatactcttatggcggcgaccctgggtcagcacaaggcacacttttggacttggacgaactcatgggagaattttcgacagggaattgacttttgcccaggacaaaacgtctcgggagtcactactcacaacttggaggatcatactaaacttccgctgatttttcaccttggtcgggatcccggtgaaaggttccctctcagctttgcctccgctgaataccaggaagcactgtccagaatcacttccgtggttcagcaacaccaggaagccctcgtgcctgcacaacctcaactcaatgtgtgtaactgggccgtcatgaactgggccccacctggctgtgaaaagctcggaaagtgtctgacgccgccagaatccataccaaaaaagtgcttgtggtcccat

SEQ ID NO: 11960 - DNA, 1566 bp, synthetic construct
  misc_feature 1..1566: note = source = /note="Description of Artificial Sequence: Synthetic coding sequence"
  source 1..1566: mol_type = other DNA
atggccgccgtggttgccgcaacccgctggtggcagctgttgctggtgctctcggctgccggcatgggagcgtccggagcgcctcaaccacccaatattctgcttctgctgatggacgatatgggatggggagatctgggcgtgtacggagaaccatcaagagagacgcccaacctcgacagaatggcagctgaagggctgctgttcccaaatttctactccgccaacccactgtgttcaccttcgcgagctgccctgctgaccggtagactcccaattcggaacggattctacaccaccaatgcccacgcccgcaatgcatatacccctcaggagatagtgggaggaattccagattcggaacagctcttgccggagctcctgaagaaggcgggatacgtgtcaaaaatcgtgggtaagtggcatctggggcacaggccgcagttccacccactcaaacacggtttcgacgaatggttcggttcaccaaactgccacttcgggccctacgacaataaggcccggcccaacatccctgtgtaccgcgattgggaaatggtcggaagatactacgaggaatttcctatcaacctgaaaactggagaagccaatctgacccagatctatcttcaggaggccttggatttcattaaacgccaggcgagacatcacccgtttttcttgtactgggcagtcgatgcaacccacgcacctgtgtatgcctccaaaccgttcctgggaacttcccagagaggtcgctacggagatgccgtccgggagatcgacgactccatcggaaagatcctggaattgctgcaagatctgcacgttgccgacaatacgttcgtctttttcacctccgacaacggtgcggcactcatctcggcgccggaacagggaggatccaacggaccatttctttgcggaaagcagactacctttgagggcggaatgcgcgaaccagccctcgcttggtggcctggccacgtgaccgcgggccaggtgtcgcaccaactggggtcgatcatggacctgttcactacttccctggctctcgccggtttgacgccaccctccgatcgggccatcgatggactcaatctgctgccgacgctgctccaaggacgcctgatggaccgccccattttctactaccgcggcgacactctcatggccgcaaccctcggacaacataaagcgcacttctggacttggacgaattcgtgggagaactttcgccagggcatcgatttctgcccgggacagaacgtctcaggagtcaccacgcacaacctggaggatcataccaaactcccgctgatcttccacctgggtcgggaccctggagaacgctttccgctgagctttgcgtcagcggagtaccaggaagccctgagtcgcatcacgtcggtggtgcaacagcatcaagaagcgctggtgcccgcccagccgcagctgaatgtgtgcaactgggccgtgatgaattgggcgccgccgggatgtgagaagctggggaagtgcctcaccccgccagagtcaatcccgaagaagtgtctttggtcacat

SEQ ID NO: 11961 - DNA, 1566 bp, synthetic construct
  misc_feature 1..1566: note = source = /note="Description of Artificial Sequence: Synthetic coding sequence"
  source 1..1566: mol_type = other DNA
atggccgccgtggtcgctgcaactcgctggtggcagctcttactggtgctaagtgccgcaggcatgggcgccagtggagccccccaacctcccaacatcctgctgctgctgatggacgacatggggtggggggacttgggcgtatacggtgaaccctccagagaaacccccaatctggatagaatggcggccgagggtcttctcttcccaaatttctacagtgctaatcctttgtgcagcccaagtagggcggccctgctgaccggtagactgcccattcgcaatggcttctacactaccaacgcgcacgcccgtaacgcctacactccccaggaaattgtgggggggattccagactccgaacagctgctgcccgagctcctgaaaaaggccgggtacgtcagtaaaattgtgggcaaatggcatctcggacaccgaccccagttccaccctctgaaacatggattcgatgaatggttcgggtcacctaattgccactttggcccctacgacaacaaagcaagacccaacattccggtatatcgcgattgggagatggtaggccgctattacgaagaatttcccataaatttgaaaaccggtgaggcaaatctgacccagatttacctgcaagaggcactggatttcataaaacgtcaggccaggcaccacccttttttcctatattgggcagtcgacgcgacccatgccccagtctatgcgtctaagccattcctgggaacctctcagaggggacgctacggagacgccgttcgtgagattgatgattccattggaaaaatcctggaactactgcaggatctgcacgttgcggacaatactttcgtttttttcacctccgacaatggggctgcgttgatatcagcccccgagcaggggggatcgaacggaccttttctctgcgggaagcagacaaccttcgaaggaggtatgagggaaccagcattagcctggtggccggggcacgtaacggctggccaagtttcccaccagctgggatctattatggatttatttaccacatctcttgcactcgctggactgacgcccccgagtgatagggctatagatggtctgaacttattgcctacactgcttcaggggagacttatggatagacctattttctactacaggggcgatacattgatggccgctacccttggccaacataaggcacacttctggacatggaccaatagctgggaaaatttcaggcagggcatcgacttttgccccggccagaacgtaagtggggttaccacccacaatttagaagatcacactaaactccctttgatctttcaccttggaagagaccccggtgagcgatttcctcttagttttgccagcgcggaataccaagaagctctgtccagaatcacgtcagtcgttcaacagcaccaggaggcattagttccagcacagccacagttgaatgtgtgcaactgggcagtcatgaactgggccccaccaggctgtgagaaattgggaaagtgtttgacaccgccggagtccatacctaagaagtgtctgtggagtcat

SEQ ID NO: 11962 - DNA, 1566 bp, synthetic construct
  misc_feature 1..1566: note = source = /note="Description of Artificial Sequence: Synthetic coding sequence"
  source 1..1566: mol_type = other DNA
atggccgccgtcgtggcagccaccagatggtggcaactcctgctggtgctcagcgccgctggaatgggtgcgagcggagcaccgcaacctcctaacatcctcctcctgctcatggatgacatgggatggggcgacctgggggtgtacggagaaccgtcaagagagactccaaacctggatcggatggccgcggaaggactgctcttcccaaacttctacagtgctaatccactctgctcgccgtcgcgcgccgccctgctcaccggacgcctgccgatccggaacgggttctatactaccaacgcccacgcccggaatgcatacactccacaggagattgtcggaggtatcccggattcggaacaactgctgcctgagcttctcaagaaggcagggtacgtctcaaagatcgttggaaagtggcatctggggcatcgtccacagttccacccactgaaacatggatttgacgaatggttcggatcgccgaattgccacttcggaccgtacgacaataaagcccgcccaaacatcccggtgtaccgggattgggaaatggtggggcggtattacgaagagttcccgattaacctgaaaaccggagaagccaacctcacgcagatctatctgcaagaagctcttgacttcatcaagagacaggcgcgccatcaccccttcttcctctactgggcggtagacgcaacccacgcccctgtgtacgcatctaagccgttcctgggaacgtcccaaaggggacggtacggggatgcagtccgggagatcgatgactcgatcggcaagatcctggagctgctgcaggatctccacgtcgccgataacaccttcgtgttctttaccagcgacaatggagcagccctcatctccgcacctgaacaaggaggatcgaatggcccgttcctctgcggaaaacaaaccacctttgaagggggaatgagagagccggcgctcgcgtggtggccgggccacgtgacggcgggacaagtgtcgcaccaactgggatcaattatggatctgttcaccactagcctcgcactggccggactcactccgccctcggatcgggccatcgatggactgaatttgctcccaaccttgctgcaaggaaggcttatggaccggccgatcttctactacagaggagacactctgatggccgccaccctcggacaacataaggctcacttctggacctggactaatagctgggaaaactttcgccagggcatcgacttctgcccgggacagaacgtgtcaggcgtgactacccacaacctcgaggaccatactaagctcccgcttatcttccatttgggacgggatccgggtgagcgctttccgctctcctttgcgtcagctgaataccaagaagctctctccagaattacctccgttgtgcaacagcatcaagaagcgttggtgcccgcccagccgcagcttaacgtctgcaactgggccgtgatgaattgggctcctcccggctgcgaaaagctgggaaagtgcctgaccccaccagagtccatccctaagaaatgcctctggagccat

SEQ ID NO: 11963 - DNA, 1566 bp, synthetic construct
  misc_feature 1..1566: note = source = /note="Description of Artificial Sequence: Synthetic coding sequence"
  source 1..1566: mol_type = other DNA
atggctgccgtcgtcgcggcaacccgatggtggcaactactcctcgtgctatccgcggccggcatgggggcatcaggcgccccacagcctcctaacattctcctgctgcttatggacgacatgggctggggcgatctgggcgtctatggcgagccaagtcgggaaaccccaaacttggacagaatggcagccgagggtctcttatttcccaacttttattccgccaaccctttgtgctctcccagccgcgccgcattgctcacaggtaggctgcccatcaggaacgggttctacactaccaacgctcatgctcgcaacgcttatacacctcaagaaatcgtgggcggcattcctgactctgagcagctgctgcccgaactactgaaaaaagcggggtatgttagcaaaatcgtagggaaatggcacctagggcatcgacctcagttccatcccctcaagcatggattcgatgagtggtttggctcacccaactgccatttcggcccttatgataacaaggcacgccccaacatccccgtttatagagactgggagatggtgggacggtattacgaagagttccccattaaccttaagaccggagaagcaaatctcactcaaatttacttacaggaggcacttgactttattaaacgacaagctcggcatcatccattctttctgtattgggctgtggatgcgactcacgctcctgtatatgccagtaagccttttctgggcacctcccagcggggccgctatggtgatgcagttcgcgagatcgacgactcaatcggaaaaattttagaactcctccaggacctccacgtggccgacaacactttcgtcttttttacctccgataatggggctgccctcatttcagcgccagaacaagggggctccaatggaccgtttctgtgtggcaaacagaccacttttgaggggggtatgcgcgagccagccctggcttggtggcctggacatgtcacagcaggccaagtcagccatcagctgggtagcatcatggatttgtttaccacttcgctcgccctggctgggctgacacccccctccgatcgggctatcgacggattaaacctactccctacactgctccagggcaggcttatggatcggcccattttctattatagaggtgatacactgatggcggcaacccttggacagcacaaagctcacttctggacttggacaaattcttgggaaaattttcggcagggcatcgatttttgtccaggccagaacgtgtctggcgtcaccacacataatcttgaggatcacacgaagctccctctcatttttcacctgggccgtgacccaggcgaacgattccctctgagctttgcatcagctgaataccaggaagctctgtcccgaatcaccagcgttgtgcagcagcaccaagaggctttagttcccgctcaaccccagctgaatgtttgtaattgggctgtgatgaactgggccccacccggttgtgagaagttaggtaaatgcttgaccccacccgaatccataccaaagaagtgcctttggagccac

SEQ ID NO: 11964 - DNA, 1566 bp, synthetic construct
  misc_feature 1..1566: note = source = /note="Description of Artificial Sequence: Synthetic coding sequence"
  source 1..1566: mol_type = other DNA
atggcggcggtagtagcggcgacgcgttggtggcaattactattagttctatcggcggcgggtatgggtgcgtcgggtgcgccgcaaccgccgaatatactattactactaatggatgatatgggttggggtgatctaggtgtttatggtgaaccgtcgcgtgaaacgccgaatctagatcgaatggcggcggaaggtctattatttccgaatttttattcggcgaatccgttatgttcgccgtcgcgtgcggcgctactaacgggtcgattaccgatacgtaatggtttttatacgacgaatgcgcatgcgcgtaatgcgtatacgccgcaagaaatagttggtggtataccggattcggaacaactattaccggaactattaaaaaaagcgggttatgtatcgaaaatagttggtaaatggcatttaggtcatcgtccgcaatttcatccgttaaaacatggttttgatgaatggtttggttcgccgaattgtcattttggtccgtatgataataaagcgcgtccgaatataccggtatatcgtgattgggaaatggtaggtcgatattatgaagaatttccgataaatctaaaaacgggtgaagcgaatttaacgcaaatatatttacaagaagcgctagattttataaaacgacaagcgcgtcatcatccgttttttctatattgggcggtagatgcgacgcatgcgccggtttatgcgtcgaaaccgtttctaggtacgtcgcaacgtggtcgttatggtgatgcggtacgagaaatagatgattcgataggtaaaatactagaattattacaagatctacatgttgcggataatacgtttgtattttttacgtcggataatggtgcggcgttaatatcggcgccggaacaaggtggttcgaatggtccgtttctatgtggtaaacaaacgacgtttgaaggtggtatgcgagaaccggcgctagcgtggtggccgggtcatgtaacggcgggtcaagtttcgcatcaactaggttcgataatggatctatttacgacgtcgttagcgttagcgggtctaacgccgccgtcggatcgagcgatagatggtctaaatttactaccgacgttactacaaggtcgattaatggatcgaccgatattttattatcgaggtgatacgctaatggcggcgacgttaggtcaacataaagcgcatttttggacgtggacgaattcgtgggaaaattttcgacaaggtatagatttttgtccgggtcaaaatgtttcgggtgtaacgacgcataatttagaagatcatacgaaactaccgctaatatttcatctaggtcgagatccgggtgaacgttttccgttatcgtttgcgtcggcggaatatcaagaagcgctatcgcgtataacgtcggtagtacaacaacatcaagaagcgttagttccggcgcaaccgcaattaaatgtttgtaattgggcggttatgaattgggcgccgccgggttgtgaaaaactaggtaaatgtttaacgccgccggaatcgataccgaaaaaatgtctatggtcgcat

SEQ ID NO: 11965 - DNA, 1566 bp, synthetic construct
  misc_feature 1..1566: note = source = /note="Description of Artificial Sequence: Synthetic coding sequence"
  source 1..1566: mol_type = other DNA
atggccgcggtcgtcgcagccacacgctggtggcagctgctgcttgtcctgtctgcagcaggcatgggcgcttctggagcgccacagcctcctaacattctgctcctgctcatggatgacatgggatggggcgacctgggcgtttacggcgagccatcaagggagacgcctaacctggatcgcatggcggccgagggcctactgttcccaaacttctatagtgctaatcctctgtgtagtccgtctagggccgccctgctgactggcaggcttccgattaggaatgggttctacacaacaaatgctcacgcacggaacgcctacacgcctcaggaaatcgtgggcggaattcccgacagcgaacaattgttgcctgagctcttgaagaaggctgggtatgtgagtaaaattgtgggcaagtggcatctgggtcatcgcccccagttccatccactgaaacacggtttcgacgagtggtttggctcgcccaactgccattttggcccctacgacaataaagctcgccctaatatcccagtctaccgcgactgggagatggtaggccgatattatgaggaatttcccattaacctgaaaacaggagaagcaaacctgacacagatatacttacaagaggctctcgatttcatcaagcgccaggcgagacatcacccattttttctctactgggcggtggatgctacccatgcgcccgtgtatgcctccaagccattcctgggcacaagccagagggggcggtatggagacgcagttagggaaatcgatgacagcatcggtaagatcctggagttgctgcaggatctccatgtagccgacaatacgtttgtcttcttcacatctgacaatggagccgcactcatctctgccccggagcagggaggtagcaatggccccttcctctgcggcaaacagacaactttcgagggtggaatgcgagagcctgccttggcctggtggccaggccatgtcactgccggacaagtaagtcatcagctgggatcaatcatggatttgtttacgacgagtctcgcattagctggcctgactccaccatcagacagagccattgacggacttaatctgctgcccactttgctccagggacgccttatggacagacccattttttattaccggggcgatacccttatggccgcaacactgggccaacataaggcccatttctggacttggacaaactcttgggaaaatttcaggcaaggcatagacttctgtcccggccaaaacgtctccggggtaaccacacacaacctggaggaccatactaaactgcctttaattttccatcttggaagggatccaggcgagcgcttcccactgtcattcgccagcgccgagtaccaggaagctctgagtagaattacatctgttgtgcaacagcaccaggaagcactggtcccggctcaaccccagttgaacgtgtgtaactgggctgtgatgaactgggctccacccggctgcgaaaaactgggtaagtgtcttacgccacccgagagcatcccgaaaaagtgcttgtggtcacac

SEQ ID NO: 11966 - DNA, 1566 bp, synthetic construct
  misc_feature 1..1566: note = source = /note="Description of Artificial Sequence: Synthetic coding sequence"
  source 1..1566: mol_type = other DNA
atggccgctgtggtggccgctacccggtggtggcagctgctgctcgtcctctctgcggccggaatgggagcatccggtgcgccgcagccccccaatatcctcctcctcttgatggacgacatgggatggggggacctgggcgtgtatggagaaccttcacgggagacgccgaatctggatcgcatggctgcagagggactgctctttcctaacttctactcggcgaatccgctgtgctcgccgtctcgtgccgcgcttcttactggtaggctcccgatacggaacggcttctacaccactaacgcccacgctagaaatgcctacacgccccaagaaatcgtcggaggtatcccagactccgagcaactcctgccagaactgttgaagaaagctggatacgtctcgaagatcgtcggaaagtggcatctcggccacaggcctcaattccatccactcaagcatggattcgacgagtggttcggttctcccaactgccatttcggtccttacgacaacaaagcccgcccgaacattcctgtgtaccgggattgggaaatggtcggacgatactacgaggaatttccaatcaatcttaagaccggcgaagcgaatctgacccagatttatctccaagaagcactcgacttcatcaagcgccaggccaggcaccacccgttctttctctactgggccgtcgacgctactcatgcgccagtgtacgcttcaaagcccttcctgggcacctcgcaaagaggacgatacggggacgccgtgcgggaaattgacgattccatcggaaaaatcctggaattgctgcaagatctgcacgtggcggataacacttttgttttcttcacttcagacaacggcgcagcattgatttccgcaccggaacagggcggctcgaacggtccttttctctgtggcaagcagaccacgtttgagggtggtatgcgcgagccggcgctggcctggtggcctggacacgtgactgcaggacaggtgtcccaccagttgggctccatcatggatctgtttaccacgtcgctcgcccttgcgggactgaccccaccgagcgaccgggcgatcgacggcctgaatctgctgccgaccctgctgcaaggacggctgatggacagacctatcttctactaccgcggagatactctcatggcagccaccctgggacagcataaagcgcatttctggacttggaccaactcgtgggagaacttccgacaggggatcgatttctgtccaggacagaatgtgtcaggcgtcactacccacaacttggaggatcatactaagttgcctctcatattccacctcggacgcgatccgggagaaaggttcccgctgagcttcgccagcgccgaataccaggaggcattgagcaggatcacgtcggttgtgcaacagcaccaggaggccctcgtcccagcccaaccccagcttaacgtgtgcaattgggccgtgatgaactgggcgcctccgggctgcgagaagctgggaaagtgccttaccccacccgaatcgatcccaaaaaagtgcctttggtcacac

SEQ ID NO: 11967 - DNA, 1566 bp, synthetic construct
  misc_feature 1..1566: note = source = /note="Description of Artificial Sequence: Synthetic coding sequence"
  source 1..1566: mol_type = other DNA
atggcagcagtggtcgcggcaacgcgctggtggcaactccttcttgtcctgagcgcggcaggaatgggtgctagcggggcaccacaacctcctaacattcttcttctgctgatggatgatatgggctggggcgaccttggggtgtacggcgagccatcaagagaaaccccgaacctcgaccggatggcagcagaaggactcctgtttcctaatttctactcagcgaaccctctttgttcgccatcacgggcagcacttctgactggccggctgccaatacggaacgggttttacaccactaacgcacacgcaagaaacgcctacactcctcaagaaatcgtgggcggaattcctgattccgaacaactgcttccagaacttcttaagaaagcaggctacgtgtccaagatcgttggaaagtggcatctgggacacagacctcaatttcatcctctgaagcatggatttgacgaatggttcggatctcccaattgtcattttggtccgtacgacaacaaagcaagaccaaatatcccggtttatcgggattgggagatggtgggaagatactacgaagaatttcctatcaatcttaaaactggggaggcaaaccttactcaaatctacctgcaggaggcactggatttcatcaaaagacaggcccgccaccatcccttttttctctactgggctgtcgatgcaacccatgcacctgtgtacgcatctaagccttttctgggaacgagccaacgcggtagatatggagatgcagttcgggaaattgatgactccattggaaagatacttgaacttcttcaggacctgcatgtggcagataacactttcgtctttttcacgtcggacaatggagcagcgcttatctcggcgccagagcagggcggctccaatggaccctttctttgcggaaaacagaccacctttgaaggagggatgagagagcctgcattggcgtggtggcccggccatgtcactgcgggacaagtgtcccaccaactcggatcgataatggatctgtttacgacctcgctcgcacttgccgggcttacgcccccatcggatcgggcaattgatggtttgaacctgctcccaactcttcttcagggtcgattgatggatcgtcccatcttctattacagaggcgacaccctgatggcagcaaccctcggacagcataaggcgcatttctggacctggactaactcgtgggaaaacttcaggcaggggattgatttttgtcccgggcaaaacgtctccggagtgaccacgcacaacctggaagatcatactaaactgcccttgattttccatcttggaagagatccaggagaacgcttcccactctcctttgcaagcgccgaatatcaggaggctctgagtaggattacctcggtggtacagcaacatcaagaagccctggtgcctgctcaacctcagcttaacgtgtgcaattgggcagtcatgaattgggcccctcctgggtgcgaaaaactgggcaaatgtcttactcccccagagagcattcctaagaagtgtctttggtcgcat

SEQ ID NO: 11968 - DNA, 1566 bp, synthetic construct
  misc_feature 1..1566: note = source = /note="Description of Artificial Sequence: Synthetic coding sequence"
  source 1..1566: mol_type = other DNA
atggcggcagtggtcgctgccacccgctggtggcagctcctgcttgtcctgtcggctgcgggcatgggcgccagcggagccccacagccaccgaatatcttgcttcttttgatggacgacatgggctggggcgacctcggggtgtatggggagccaagcagggagactcccaacctggaccggatggcagcagaagggcttcttttccccaacttctacagcgcaaatccactgtgcagcccgtcgcgcgccgcgctgctgaccggaaggcttccgatccgcaacggattctatacgactaacgcgcacgcacgcaacgcgtacactcctcaggaaattgtcggtggaatcccagattcagagcagctgcttccagagctgctcaaaaaagctgggtacgtgagtaaaatcgtcggcaagtggcacctgggacacagaccgcaattccatccgctgaagcatgggttcgacgaatggttcgggtcgccgaactgccatttcggtccgtacgacaacaaggctcggccgaacattccggtgtaccgcgactgggagatggtgggacgatactacgaagaattcccgatcaatctcaaaactggcgaagcaaacctcactcagatttacttgcaggaagcactggactttatcaagcgccaggcccggcatcacccgttttttctctactgggcggttgatgccactcacgccccggtgtacgcctcaaaacctttcctgggaacctcccagcgcggcaggtacggcgacgccgtgagagagatcgatgactccatcggaaagatccttgagctgctgcaggacttgcatgtggccgataacacttttgtgtttttcacctcggacaacggggcagcactgatttctgccccggagcagggaggcagcaatggtcctttcctttgcggcaagcagactaccttcgagggaggcatgagagagccggccctggcctggtggccgggacatgttactgcaggacaggtgtcacatcagctgggctcgatcatggatctgttcaccacctcacttgctctggcaggtctgactccgccatccgaccgcgcgattgacggtctgaacctccttcctaccctgctgcaggggcgcctgatggacagaccgatcttctattaccggggagataccctcatggccgccaccctgggccaacacaaggcccacttctggacctggactaattcctgggaaaactttcggcaagggatcgatttttgccctggacaaaacgtgtcgggagtcaccacccataacctcgaggatcacactaaactgcctctgattttccacctgggacgggatccgggtgaaaggttcccgctctcattcgcgtccgcagaataccaagaagccctttcgcgcattacttctgtggtgcagcaacaccaggaagcgctcgtgccagcccaaccacagcttaatgtctgcaactgggccgtgatgaactgggcaccaccgggatgcgagaagctgggaaagtgcctgactcctccagagtcaatcccaaagaagtgcctctggtcccac

SEQ ID NO: 11969 - DNA, 1566 bp, synthetic construct
  misc_feature 1..1566: note = source = /note="Description of Artificial Sequence: Synthetic coding sequence"
  source 1..1566: mol_type = other DNA
atggccgcagtggtggcagcgacccggtggtggcaactgctgctggtgctttcggcggccggtatgggagcgtccggagcacctcagcctcctaacattctgctgctgttgatggatgatatggggtggggtgaccttggagtgtacggcgaaccaagccgcgaaaccccaaacctggatcgcatggccgcagagggtttgcttttcccaaacttttactcagccaaccccctttgttcgccatcgcgcgccgcactcctcaccggtagactgccgatcagaaacggcttttacaccaccaacgctcatgcccggaatgcatacacccctcaagagatcgtgggtgggattccggattcagaacaacttttgcccgaactcttgaagaaagccggatacgtgtccaaaattgtcgggaaatggcatctgggacatagacctcaattccatccgcttaagcacgggtttgacgaatggtttgggtcaccaaactgccatttcggcccatacgacaataaggcaaggcctaacattccagtgtaccgcgattgggagatggtcgggaggtactacgaggaatttccgatcaatctgaaaactggcgaagcaaacctcacccaaatctacctccaggaggcactcgacttcattaagcggcaagccagacaccacccatttttcctgtactgggcagtagacgcaacccatgcaccagtgtacgccagcaagccttttcttggtacgtcacagcggggaagatacggagacgcagtgcgtgagatcgatgattccatcggtaagatccttgaactgcttcaagaccttcatgtggcagacaacacctttgtgttcttcacctctgataatggcgcagcgcttatttccgcacccgaacagggaggctcgaacgggccttttctgtgtggaaaacagaccacctttgaaggagggatgcgcgaacctgcacttgcgtggtggccaggacacgtgactgccggacaagtctcccatcaattgggttcaatcatggacctctttaccacgtccctcgcccttgcaggattgaccccaccttccgacagggcgattgatgggctgaacctcctgcctactcttcttcaaggccggctcatggatcgacctattttctactacagaggggatactctcatggcagcaaccctgggacaacacaaggcgcatttttggacctggaccaactcgtgggagaactttagacaagggatcgatttttgtcctggacagaatgtgtcgggtgtgacgacgcacaatttggaggaccatactaagctccctctgatttttcatctgggtcgtgaccccggtgagcgcttccctcttagctttgcatcagccgagtaccaggaagctctgtctcggattacctcagtggttcagcaacaccaagaagcactcgtgcctgcgcaaccacagctgaatgtctgcaattgggcagtgatgaactgggcaccccccggatgcgaaaaacttggaaagtgtctgacgcctcccgaatcgatccctaaaaagtgtctctggtcccac

SEQ ID NO: 11970 - DNA, 1566 bp, synthetic construct
  misc_feature 1..1566: note = source = /note="Description of Artificial Sequence: Synthetic coding sequence"
  source 1..1566: mol_type = other DNA
atggccgctgtcgtggccgctactcgctggtggcagctcctgctggtgctgagtgctgccgggatgggggcttctggggcacctcagccaccaaatattctgctgctgttaatggacgatatgggctggggcgacttgggcgtgtacggcgagccttctcgcgaaacccctaacctggatcggatggctgccgaaggtctgttgttccctaatttctatagtgccaaccccttgtgctctccttcacgagcagccttactaacaggaagacttccaatccgtaatggattctacaccaccaacgcccacgcacggaacgcctacacccctcaagagatagtaggcgggattccagacagtgaacaactcttgcccgagctcttaaagaaggcaggctatgttagcaaaatagtcggaaaatggcatcttggacacagaccacagttccacccactgaagcacggattcgatgagtggttcggctcccctaattgtcattttggaccatatgataacaaggctcgtcccaatatccccgtttatagggactgggagatggtcgggcgttactacgaggaatttcccatcaatctcaagactggcgaggcaaatctaacccagatatacctgcaagaagctctggattttataaagcgccaggctagacatcacccctttttcctatattgggccgtggatgccactcacgcccccgtgtatgccagcaagccattcctggggacaagccaaagagggcgctacggcgatgccgtgcgagaaatcgatgatagcatcggtaaaatcctagagctgctgcaagatttacacgtcgctgacaacacttttgtattcttcaccagtgataatggcgccgcccttatctctgccccagaacaaggaggctctaatggcccctttctgtgtggaaaacagactaccttcgagggcggaatgcgcgaaccagcattggcctggtggcccgggcacgttactgcagggcaagtttctcatcagctggggagcataatggatttattcactacctctttagccctggctgggctgactcctccttccgatcgggccatagacggcctcaacttactgcccactctcctgcagggcaggctgatggatcggcctatcttttactatagaggggacactttaatggcagctaccttaggacagcataaagcccacttttggacctggacaaactcctgggagaactttcgtcaaggaatcgatttttgccctggccaaaacgtcagcggggtgaccactcataacctcgaagatcacacaaaactgcctctgattttccacctgggacgggacccaggcgagcggttccctctgtcttttgcttccgcagagtatcaggaggccctgtctcgaatcacctccgtagtgcaacagcatcaggaggctctagtgcccgcccagccccaactgaacgtgtgcaattgggcagtgatgaactgggctcctcccggctgcgaaaaacttggaaagtgtttaacaccacccgaatctatccccaagaagtgtttgtggtctcac

SEQ ID NO: 11971 - DNA, 1566 bp, synthetic construct
  misc_feature 1..1566: note = source = /note="Description of Artificial Sequence: Synthetic coding sequence"
  source 1..1566: mol_type = other DNA
atggcagccgtggtggcagcaaccagatggtggcaactgcttctcgttctctccgcagctgggatgggcgcatcaggagcgcctcaaccaccgaatatactgctgcttctcatggacgatatgggatggggtgacctgggcgtgtacggcgagccttcgcgggagactccaaatcttgataggatggcagcagaaggtcttttgtttcctaatttctactcggctaacccactctgctcaccgtcaagggcagcactcctgactggtagactcccaatccggaacggattttacaccacgaatgcacatgccagaaacgcatataccccgcaggagattgtgggtggaatccctgactcggaacagcttctgcccgaactgctcaagaaggcaggttacgtgtcaaagattgtcggcaagtggcacctgggccaccggcctcaatttcatcctctgaagcatggatttgatgagtggtttggatcacctaactgccatttcggaccatacgataacaaagcacgccccaatatcccggtctacagggattgggagatggttggtaggtactacgaggagtttccgatcaacttgaaaaccggtgaagcaaacctcacgcagatctaccttcaggaagcactcgacttcattaaacggcaagcccgtcaccatccgttttttctctactgggcggtggacgcgacgcatgcccccgtgtacgcatcgaagccatttctcgggaccagccagcgggggaggtacggtgatgcagtgagagaaatagatgattcaattgggaaaatcctggaacttcttcaagaccttcatgtggcggataacaccttcgttttctttacttcagataacggggcagcccttattagcgcaccagaacagggtggctccaatggtccttttctgtgcggaaaacaaactacgttcgagggaggtatgcgtgaacctgcacttgcatggtggccaggccatgtcaccgccggtcaggtgtcccaccaattgggctcgatcatggacttgttcacgacttcccttgcacttgccgggctcactccgccttcggaccgcgccatagatgggttgaatttgcttcctactctgttgcaaggtcgcctcatggacagaccgatattctactaccgaggcgataccttgatggccgcgactctcgggcaacacaaggctcatttttggacctggaccaactcctgggaaaacttccgccaaggcattgatttttgtcccgggcaaaacgtgtccggtgttacgacccataacctggaagatcataccaagttgcccctcatttttcacctgggcagggaccctggagaacgtttcccacttagctttgcatcggcagaataccaggaagcactgtcgagaatcactagcgtggtccagcaacatcaggaggcccttgtgcccgcacaaccccaactgaatgtgtgtaactgggccgtgatgaattgggcccctccgggttgtgaaaagctgggaaagtgtctcacgccacctgagtctattccgaaaaagtgtctgtggtcccac

SEQ ID NO: 11972 - DNA, 1566 bp, synthetic construct
  misc_feature 1..1566: note = source = /note="Description of Artificial Sequence: Synthetic coding sequence"
  source 1..1566: mol_type = other DNA
atggctgcagtggttgcagcgacccggtggtggcagctgcttttggtccttagcgccgccggtatgggggcttccggagccccacagccacccaatatcttgctcctgctgatggatgatatgggctggggtgaccttggggtgtacggagaacccagccgagaaacgcccaatctagaccgcatggctgccgagggcttactttttccgaacttctattcagcaaatccattgtgttccccttcccgcgcagccttgctgaccggacggctgcccatacggaacggcttttacactactaacgcacacgctcgtaatgcttacactccgcaggagatcgtcggcggtattcccgacagcgagcagctgctcccagaattattgaaaaaagctggctacgtgtcaaaaattgtgggaaaatggcatttgggccacagacctcaatttcacccactgaagcacggcttcgatgagtggtttgggagtcccaactgccatttcggaccatacgacaataaggcccgtccgaatataccagtgtacagagattgggagatggtgggaagatattacgaagagtttcccatcaacctgaaaaccggcgaggccaacttgactcaaatctatctgcaggaggctctcgactttattaagcgccaagccagacaccatccattcttcctgtactgggctgtggatgccactcacgctccagtttatgcatcaaaaccctttctaggcacctcccagcgcggtagatacggggatgctgtgagggaaatagacgactccatcggcaagatccttgagttgcttcaagatctgcacgtagctgacaacacattcgtattctttacttccgacaatggcgccgctctgatttctgcgccagagcagggcggctccaatgggccgttcctctgcggaaagcaaacaacatttgagggaggtatgcgagaacctgcacttgcctggtggccaggacatgtaacggcaggccaggtctctcaccagcttggttctataatggacctgttcactactagcctagctctggcaggtctaactccaccgagcgacagggctattgacggactgaatctgttgccaaccttactgcagggccgtttgatggacaggccaatattctactatcggggagatacgctcatggctgcaaccctcggccaacacaaagctcatttttggacctggaccaactcctgggagaactttcggcaaggaatcgatttttgtcctggtcaaaacgtgtccggagtaactactcataacttggaggaccacacaaaactgcctctgatctttcacctgggccgcgatccaggtgaacgatttcctctaagctttgcctctgctgagtaccaggaggcacttagtcgcatcaccagcgtggtgcaacagcatcaagaagccttggtgcccgcacagccgcagttgaacgtgtgcaattgggccgtgatgaactgggcccctccagggtgtgagaagcttggaaaatgcctaacaccacccgaatctatacctaagaagtgtctgtggagtcac

SEQ ID NO: 11973 - DNA, 1566 bp, synthetic construct
  misc_feature 1..1566: note = source = /note="Description of Artificial Sequence: Synthetic coding sequence"
  source 1..1566: mol_type = other DNA
atggcggccgtggtagccgccacaaggtggtggcagctgttactggtcctcagcgctgctggaatgggagccagcggcgccccccaacccccaaatatactgcttctcctcatggacgatatggggtggggggacctgggcgtatacggtgagccttccagagagacaccaaatttggatcgtatggccgcagagggattgctgttccccaacttttatagcgctaaccctctgtgcagcccctccagagccgctcttctcacgggtcgactgccaattcgaaatgggttttatactacaaatgcccacgccagaaatgcctataccccacaggagatagtgggaggtatacctgatagcgaacagctgctgcctgaactgctcaaaaaagcaggttacgtgagcaagattgtgggcaaatggcacttgggccatcgccctcagttccatccactgaaacacgggtttgatgaatggttcggatcccccaattgccatttcgggccgtatgataataaggcacgcccgaatataccggtgtaccgtgactgggaaatggtgggcaggtattacgaagaattccccatcaacctaaaaactggggaggcgaatttgacacagatctaccttcaggaagcactggactttatcaagagacaggcgcgacaccatcctttcttcctctactgggctgtcgacgcgactcatgctccagtatacgcctccaaaccatttttgggcacatcccagaggggtagatatggagacgccgtcagggagatcgacgactctataggaaagatcctcgagcttctgcaagatctacacgtcgccgacaatacttttgtctttttcacatcagacaatggagccgcactgatatcagcccctgagcaggggggatcaaatgggccatttttatgtggaaagcagaccaccttcgagggaggaatgcgcgaaccagctcttgcatggtggcccgggcacgttactgccggacaggtgagtcatcagctcggctcaataatggatctgttcacaacctccctggctctggctggtctgacgcctccaagcgaccgcgccatcgatggtctgaacctgctgcccaccctcttgcagggtaggcttatggaccgacctatcttttactacagaggagacaccttgatggcagccactctgggacaacataaggcccacttctggacctggacaaattcctgggagaattttagacagggcattgacttttgtccaggccagaacgtgtccggtgtgacaacccataatctcgaagatcacactaagctgcccctgatcttccacttgggtcgcgacccaggcgagcgtttcccactttcttttgcctcagccgagtaccaggaggccctgtcccgcattacctccgtcgtgcagcagcaccaggaagccctcgtccctgcgcagcctcagttgaacgtctgcaattgggcagtgatgaactgggcacctcccggatgcgaaaagttaggtaagtgccttactccccccgaaagcattcccaagaaatgtctctggtctcac

SEQ ID NO: 11974 - DNA, 1566 bp, synthetic construct
  misc_feature 1..1566: note = source = /note="Description of Artificial Sequence: Synthetic coding sequence"
  source 1..1566: mol_type = other DNA
atggcagccgtcgtcgccgccacccgatggtggcaactactgcttgttctgagcgccgctgggatgggagccagtggtgctccccagcccccaaatatcttgctgctgttgatggatgatatgggatggggagatctcggcgtttatggagaaccttctcgcgaaacacctaacctggaccgcatggcagctgaaggtctcctctttccaaatttctactctgctaatccattgtgcagtccatcgcgggctgcactgctcaccggaaggcttcccatcaggaacggcttctacaccacgaacgcgcacgcgagaaacgcatatactcctcaggagatcgtggggggcatccctgattccgaacaacttcttcccgagctcctgaaaaaagctgggtatgtgagcaaaatcgttggtaagtggcacctgggacaccgcccccagtttcaccccctgaaacacggcttcgacgagtggttcggaagcccaaactgtcattttggcccctatgataacaaggcgcggcccaacataccagtgtatcgggactgggagatggtggggcggtattatgaggaattccccatcaacctgaaaacaggcgaagctaaccttacacagatctatcttcaggaagctctcgattttattaaaagacaggctcggcatcatccgttctttctttattgggctgtggatgccacacacgccccagtctacgcttccaaaccctttctcggcacctcacagcgtggccggtatggcgatgccgtcagagagatcgacgactcaattgggaaaattttggagctgctgcaagatctccacgtggccgacaacacatttgtgttctttacatctgataatggggcagccctgatcagcgcccccgagcaaggcggctcgaatggcccattcctgtgtgggaagcagaccaccttcgaaggtggaatgagggagcccgctctggcttggtggcccggtcatgttaccgctggacaggtgtctcaccagctgggtagcattatggatctgttcactacttctctggctcttgccggtcttacacctcctagcgaccgggcgatagatgggctgaatctgctccctactctccttcaggggagattgatggaccgaccaatcttttactatcgaggggatacgctgatggccgccactttggggcagcataaggcacatttctggacttggactaactcttgggaaaatttccgtcagggcattgacttctgccctgggcaaaatgtaagtggagtgactacccataacctggaggaccatacaaaactaccgctcattttccatttaggtagggatcccggcgagcgtttcccgttgtctttcgcttcagccgaataccaagaggccctttccaggatcacgtctgttgtgcagcagcaccaggaggctctagtccccgcgcagcctcaactcaacgtctgtaattgggccgtgatgaattgggcccccccaggctgcgagaagctcggcaaatgcctgacacctcccgaaagtatcccgaagaagtgtctgtggagtcac

SEQ ID NO: 11975 - DNA, 1566 bp, synthetic construct
  misc_feature 1..1566: note = source = /note="Description of Artificial Sequence: Synthetic coding sequence"
  source 1..1566: mol_type = other DNA
atggcagcagtggtggccgctacaaggtggtggcagctgctgttggtgctcagtgccgccggaatgggtgcttctggagccccccaacctcctaatatactgcttttgctcatggatgacatgggctggggagacctgggcgtgtatggcgagccctctcgcgagacccctaacctcgatagaatggcagctgaaggtctgctcttcccaaatttctattcagcaaacccattgtgctctccatccagggccgctctccttaccggaagactccccatcaggaacggcttctataccactaatgctcacgcacgtaacgcatacacaccccaggagattgtgggaggcatccccgatagcgaacagttgctcccagaactgctcaagaaggccggctacgtctcaaaaatcgtgggaaagtggcatcttggtcatcgcccacaattccacccactgaagcatggtttcgacgagtggtttggatcacctaattgccacttcggaccttacgacaacaaggcccgccctaatattcccgtatacagggattgggagatggtgggcaggtattacgaagagttccctatcaacctcaagacaggtgaagccaacctgacccaaatttaccttcaggaagcactcgacttcattaagagacaggccaggcatcacccattctttctgtactgggcagtggatgcaacccatgctcctgtgtatgccagtaagcctttcttgggtacatcacagaggggaaggtacggcgatgccgttagagagatcgacgacagtatcggtaaaatcctggaactgctccaagatctgcacgtggctgataacaccttcgtgttcttcacaagtgacaacggagcagccctgatcagcgcaccagagcagggtggatctaacggccctttcctgtgcggaaagcaaacaactttcgaaggcggcatgagagaacccgccctggcctggtggccaggacacgtcacagcaggccaggtgtctcaccaactgggatcaatcatggacctgtttaccacatccctggcactggctggtcttaccccaccctccgatagggcaatcgatggactgaacctgctccccacccttctccaaggtagacttatggataggccaattttctactaccgtggagatacattgatggctgctacactgggccagcataaagcccacttctggacatggaccaactcctgggaaaatttcagacagggtatcgacttctgcccaggacaaaacgtgagcggagtaaccactcacaacctggaagaccacacaaaacttcctttgatttttcatctgggccgcgaccccggcgaacgtttccctctctccttcgctagcgccgagtaccaggaggccctttctaggattacttcagttgtgcagcagcatcaggaagccctggtgcccgctcagccccagttgaacgtgtgcaactgggctgtcatgaattgggccccccccggctgcgagaaacttggtaaatgcctcacacctcctgagtccatccctaaaaagtgtctgtggtcacat

SEQ ID NO: 11976 - DNA, 1566 bp, synthetic construct
  misc_feature 1..1566: note = source = /note="Description of Artificial Sequence: Synthetic coding sequence"
  source 1..1566: mol_type = other DNA
atggccgcggtggtggctgccacaagatggtggcagctgcttttagttctgtctgctgcgggaatgggcgcttcaggagctccacagcctccaaatattcttctattgctcatggacgacatgggatggggtgatctgggcgtttacggggagccatcaagggaaacaccaaacttggataggatggctgccgaggggctcttgtttcctaacttttatagcgccaaccctctgtgttctcctagtagagctgccctgctgacgggccgacttcctatcagaaacggcttctacactactaatgctcacgcacgcaatgcttatacaccgcaagaaatcgtgggaggtatccctgactctgagcagctgctcccagaactgctgaagaaagccggttacgtcagcaaaattgtcggcaaatggcacctcggccacaggccccaattccatcctctgaaacacggatttgacgagtggttcggatccccaaactgccacttcggcccgtacgacaacaaggcccggccaaacatacctgtgtaccgggattgggagatggtcggtcgttattacgaagagtttcctattaaccttaaaacaggagaagccaatctgacgcagatctacctccaggaggcacttgatttcataaaacggcaagcacgccaccatcctttcttcttatattgggccgtggacgccacccacgcacccgtgtatgcctccaaaccctttttgggtacttctcagcgaggccggtacggcgatgcggtaagggaaattgatgactcaatcggcaaaatactggagctcttgcaggatctccatgtggctgacaacacgttcgtgttttttacatcagataatggagccgccctgatcagcgcgcccgaacagggcggttccaacgggcccttcctgtgcggaaaacagaccaccttcgaaggcggtatgagggagcccgctctggcgtggtggcccggccatgtgaccgcggggcaagtgtcgcatcagctcgggagcataatggatcttttcaccacatccctggcactcgctggactgacaccaccctcggacagggccattgatggactgaacctcctgccaactttactccaagggagactgatggatagacctattttttactaccggggagacacgctaatggcagcaactctggggcagcataaagcccatttttggacctggactaattcttgggagaatttcagacagggcattgatttctgccccgggcagaatgtctccggggtaacgacacacaatcttgaagatcatactaaactgcctctgatcttccatctgggtagagacccaggagagaggttcccactgtcttttgccagcgctgagtatcaggaggcactgtcccgcattacttcagtcgttcagcaacaccaagaggcgctagtccctgcccagcctcagttgaacgtgtgcaattgggcagtgatgaattgggcaccacctggctgtgaaaaactgggaaagtgcctgactcctccagaaagtattcccaagaaatgcctgtggtcacat

SEQ ID NO: 11977 - DNA, 1566 bp, synthetic construct
  misc_feature 1..1566: note = source = /note="Description of Artificial Sequence: Synthetic coding sequence"
  source 1..1566: mol_type = other DNA
atggctgccgtggtcgctgctactcgatggtggcagctactccttgttttgtctgcagcaggaatgggagcttctggcgccccacaacctccgaatatacttctcttactaatggatgacatgggatggggtgatctcggagtatatggagaacctagtcgcgagactccaaatttggatcgaatggctgctgaaggcctgttgttcccaaacttttattcggccaatccgttatgcagcccaagtcgagctgcgcttctgacgggacgcttgccaattcggaacggattctatactaccaatgcacatgctcgtaacgcttatactccacaagaaatagttggaggaattccagattcagaacaactgctaccagaattgttgaaaaaagctggatatgtttcaaaaatagtgggtaaatggcacttgggacatcgtccacagtttcatccacttaaacatggttttgatgagtggtttggatccccaaattgccacttcggaccatatgacaacaaagcgaggccgaacataccagtttatcgagactgggagatggttggaagatattatgaagagttccccattaatcttaaaacaggggaggccaatctcacacaaatatatcttcaagaagctctcgatttcataaagagacaggctcgtcatcatccattcttcctttattgggccgtcgatgcaacccatgcgcccgtttatgcttctaaaccatttttgggtacttcccagcggggcagatatggagacgccgtacgtgaaatcgatgattcaattggaaaaatacttgaactcctccaggatttgcatgtggctgataatacttttgtcttcttcacatctgataatggagccgctttaataagcgctccagaacagggaggcagtaacggtcctttcttgtgtggtaagcagacgacttttgaaggaggaatgagagaaccggcactggcatggtggccgggtcacgtcacggcaggtcaagtgtctcatcaactaggttccattatggatttgtttacaacttcattggctctagcaggactcacgccaccatcagatcgagctattgatggacttaacctgcttccaacattgctgcaaggacgtttgatggaccgcccaatcttttactatcgaggagatacacttatggccgcaactcttgggcaacacaaagcacatttctggacttggactaattcatgggagaacttcagacaaggcatagacttctgtccaggacagaacgtttcaggggtcactacgcacaatttggaggatcacaccaaattgccgctgatattccatcttggaagagatccaggcgagcgctttccactatcgttcgcctctgctgagtaccaagaagcactctctagaatcacatccgttgttcagcaacatcaagaagcactcgtgcctgcacaaccacaactgaatgtgtgcaattgggcagtcatgaactgggctccaccaggatgcgaaaaattgggaaagtgccttacaccaccggaatcaattccaaaaaaatgcctttggtcgcac

SEQ ID NO: 11978 - DNA, 1566 bp, synthetic construct
  misc_feature 1..1566: note = source = /note="Description of Artificial Sequence: Synthetic coding sequence"
  source 1..1566: mol_type = other DNA
atggctgccgtggtagcagctacacggtggtggcagttactattggtgctgtccgccgcagggatgggagcttcaggggcacctcaacctcccaatatccttctgctgcttatggatgatatgggatggggcgatcttggcgtttacggggagccaagccgtgagacccccaatctggacagaatggctgcagagggtttgttgtttcctaatttttattctgcgaaccccctgtgctcgccctctcgagcagctctgcttaccgggcgcctccctattagaaatggtttttacacgaccaatgctcacgcacgtaacgcttacacaccgcaggaaatagttgggggtatccccgatagcgagcagctactgcctgaactattgaagaaagcggggtacgtgtcaaagattgttggtaagtggcatcttggccacaggccccagttccacccactgaaacatggattcgatgaatggtttggatcgccgaactgccatttcgggccttacgataacaaagcccgccccaacatccccgtataccgggactgggagatggtgggcagatactatgaagaattccccataaatctaaagacaggcgaggcaaacttaacccagatctacctgcaggaggcgctggacttcatcaagcgtcaggccaggcaccacccatttttcctgtactgggcggtggatgccacgcatgcacctgtctacgcgagtaagccttttctgggaacctcccagcggggtcggtacggggacgcggtcagggagatagatgatagcataggcaagatccttgaactattgcaggacttgcatgtggccgataatacattcgtgttcttcactagcgacaatggagccgccttgatttctgccccagagcaggggggaagtaatgggccattcttgtgcgggaaacagacaacctttgagggagggatgcgggagcctgccctggcatggtggcccgggcacgtaaccgcggggcaggtgagtcatcagttgggctccattatggacttgttcacaacaagcctagcactcgcaggtttgactccaccttcagatcgcgccatcgatggactgaatctactgccaacactgctgcaggggcgcttgatggatcgtccaattttttactatcgcggggacacactcatggccgcgactctgggacagcacaaagcccatttctggacatggactaactcttgggaaaattttagacagggtatagatttttgtcccggtcagaatgtgagcggggtcaccacccacaatctggaggatcataccaagctgcccctgatattccatctgggcagggatcctggcgaaagattccccctatcatttgcgagcgccgagtaccaagaagccttaagcaggatcaccagcgttgtccagcagcaccaagaggccttggtccccgcccagccacagctgaatgtctgtaactgggccgtgatgaactgggccccaccaggctgtgaaaaactcggaaaatgcctgacgccacccgagagtattcccaaaaagtgcttgtggagccac

SEQ ID NO: 11979 - DNA, 1566 bp, synthetic construct
  misc_feature 1..1566: note = source = /note="Description of Artificial Sequence: Synthetic coding sequence"
  source 1..1566: mol_type = other DNA
atggcggccgtggtggccgccacccgctggtggcaactgctcctggtgttgagcgcggcaggaatgggggcgagcggcgccccgcagcctccgaatatccttctgctcctcatggacgatatgggctggggagacttgggagtgtacggcgagcccagccgggaaaccccaaacctggacaggatggcagcggaaggactgctcttcccaaacttctattcggcaaatccgctctgttcaccgtcgcgcgccgcactcctgactggacgccttccgatccggaacggcttctacactaccaatgcccatgccaggaacgcctacacccctcaagaaatcgtgggcggaatcccggactcagagcagctgttgccggagctcctgaagaaagccggatacgtctcgaagatcgtgggaaagtggcatctgggacatcgcccgcaatttcatccactgaaacacgggttcgacgaatggttcggaagcccaaactgtcactttggcccgtacgataacaaggcacggccaaatatcccagtgtacagggactgggagatggtcggccggtactacgaagaattcccgatcaaccttaagactggagaggcaaatctgactcagatctacctccaagaggcgctcgatttcatcaaaaggcaagcccggcatcacccgtttttcctgtactgggcggtggatgccacccatgcaccagtctacgcgagcaagcccttcctcgggacctcacaacgcggccgctacggagacgcggtgcgggagatcgacgacagcatcggtaagattctggaactgctgcaggatctccatgtggcggacaacactttcgtgtttttcacttcagacaacggcgccgcgctgatctcagctccggaacagggtggttcgaatggaccctttctgtgtggaaaacaaactaccttcgaaggaggcatgcgggagcccgcccttgcatggtggccggggcacgtgactgcaggacaggtgtcccatcagctgggatcgatcatggaccttttcactaccagcctggcgctggcgggtctgacccctccttctgacagggcgatcgatggccttaacctcctcccaacgctgctccaaggcaggctgatggaccgcccaatcttctactatagaggagataccctcatggctgcgaccctgggccagcacaaggcgcatttttggacttggacgaactcgtgggaaaacttccggcagggaatcgatttctgcccgggtcaaaacgtctccggcgtgacgacccacaatctcgaggatcacaccaaacttccgctgatcttccatcttggacgcgatccaggtgagcgctttccactctcgtttgcctcggctgaataccaagaagccctctcacgcattacttcagtggtgcagcagcatcaagaagcgttggtgcccgcccagccccaactgaacgtctgcaactgggccgtcatgaactgggcgccgcccggctgtgagaaactggggaagtgcctgacgccccccgagtccatccctaagaagtgcctctggtcccac

SEQ ID NO: 11980 - DNA, 1566 bp, synthetic construct
  misc_feature 1..1566: note = source = /note="Description of Artificial Sequence: Synthetic coding sequence"
  source 1..1566: mol_type = other DNA
atggctgcggtggtggccgcaacacgctggtggcagttgcttcttgtgctatctgctgccggaatgggagcttcaggcgccccacagcccccaaacattttactgttgttaatggacgatatgggttggggtgatcttggcgtttatggagaaccttcgcgtgagacaccaaatcttgatagaatggctgcggagggattgctttttcccaacttttattcagccaatcctctctgttcaccaagccgagccgctcttctaacaggacgacttcctatcaggaacggattttatactacaaatgcacacgctcgtaatgcctatacaccacaagaaatcgtgggtgggatcccagacagtgaacagcttctgcctgagttactcaaaaaggcagggtacgtgagcaaaatagtgggaaagtggcatctgggtcataggccacaatttcaccccctcaagcatgggttcgatgaatggttcggttccccgaattgtcactttggaccttatgacaataaagcccgtcccaatattcctgtttatcgcgattgggaaatggtcgggcgttactatgaagagttccctatcaatctcaagaccggtgaagctaatctgacacaaatctaccttcaggaagctctagattttatcaagagacaagcgagacatcacccgttctttttatattgggccgtggacgcaacacacgctcctgtgtatgcctcaaaacctttcttgggaacctcccaacgggggcggtatggcgatgctgttagggagattgatgattccattggcaagattcttgaattgctgcaggatttacacgtcgccgacaatacttttgtcttcttcacatctgataatggtgctgcacttataagcgcccctgaacaggggggctcaaatggacctttcctctgcggtaagcaaactacgtttgaggggggaatgagagaaccagctttagcttggtggcccggacacgtaaccgccggacaggttagtcatcagttaggctccattatggatcttttcactaccagcttggcattggcgggtctaactccaccgtcggatcgagccatcgatggtcttaacctcctacccacattacttcaagggaggttgatggaccgaccaattttctattataggggagacacgcttatggccgccactttgggtcaacacaaggctcacttctggacttggaccaactcttgggaaaactttaggcaaggtattgacttttgtcctggtcaaaacgtctccggagtgacgactcataacctcgaagatcacacaaaattgcctctcatattccatcttggacgcgatccaggtgaaagatttcctttatcgttcgcttccgctgaataccaagaggccttatcaagaatcacgagcgttgtgcaacagcatcaggaggctttggttcctgcccaacctcagctgaacgtttgtaactgggccgttatgaattgggctcctccaggctgtgaaaagcttggaaaatgcctgactcctcctgagtcaatcccaaaaaagtgcctctggagccat

SEQ ID NO: 11981 - DNA, 1566 bp, synthetic construct; identical to SEQ ID NO: 11961
  misc_feature 1..1566: note = source = /note="Description of Artificial Sequence: Synthetic coding sequence"
  source 1..1566: mol_type = other DNA

SEQ ID NO: 11982 - DNA, 1566 bp, synthetic construct
  misc_feature 1..1566: note = source = /note="Description of Artificial Sequence: Synthetic coding sequence"
  source 1..1566: mol_type = other DNA
atggctgcggtggtggcagccactcggtggtggcagctccttctagtactctccgcagccggtatgggagcttccggagctccccagccccctaatatccttttgctgctaatggatgatatgggttggggcgacctcggtgtgtatggcgagcctagtagagagacacccaaccttgaccgtatggctgctgagggtcttcttttccccaatttttattctgccaacccgttgtgcagtccgagtagggccgcactcttgactggtagactcccgataagaaacggcttctacactactaacgcccatgccagaaacgcctataccccacaagagattgtagggggaattcctgactccgagcagttacttcccgagctgctgaaaaaggctggttacgtcagcaagatcgttggcaagtggcacctaggccaccggccccagtttcatccgctgaaacatggattcgacgagtggttcggttctccaaactgtcatttcgggccatatgataacaaagcaaggcctaatattcccgtttaccgcgattgggagatggtcggccgctattatgaggaattcccgatcaacctgaagacaggcgaggccaacttgacccaaatctacctgcaagaagcgttggatttcatcaagaggcaggcgcgccaccatcctttcttcctgtactgggcagtcgacgctacacacgctcccgtctatgcctcgaaaccctttctggggacttcccaacgaggtcgctacggggacgccgtgagggagatcgacgattcaattggtaagatcctggaattgctgcaggatctgcatgtggccgacaatacttttgtgttcttcacctccgataacggagctgccctcattagcgctcctgaacaggggggctcaaatggtcccttcctctgcggaaaacagaccaccttcgaaggcggtatgcgcgagcctgcactggcttggtggcccggccatgtgacggcgggacaagtctcacaccaactgggtagtattatggatctgtttacaactagtttggcactggccggattgactccgccctctgatcgggcaattgatggcctcaatctcctgcccacactactacagggaaggcttatggacaggccgattttttactaccgaggcgacaccctgatggccgccactctggggcagcataaggcccacttttggacttggacaaattcatgggaaaatttcaggcagggaatcgatttttgtccgggccagaatgtgtccggagtgaccacgcacaatttggaggatcacacgaaactgccacttatcttccacctcggacgcgatcccggtgagcggttccccctttcttttgcttcggcagagtaccaagaagcattaagtcgcatcacctctgtggttcagcagcatcaggaagccctagtgccggcgcaacctcaactgaatgtatgcaattgggccgtcatgaactgggctcctcctgggtgtgaaaaactcgggaaatgcctgactccacccgagagcataccaaaaaaatgtctctggtcccac

SEQ ID NO: 11983 - DNA, 1566 bp, synthetic construct
  misc_feature 1..1566: note = source = /note="Description of Artificial Sequence: Synthetic coding sequence"
  source 1..1566: mol_type = other DNA
atggctgcagtggtcgccgcgacaagatggtggcaactgcttctcgtcctcagcgcagctgggatgggcgctagtggtgcccctcagcccccaaatattctgttactgcttatggatgatatgggatggggcgacctgggcgtttatggggaacccagccgtgagactcccaatttggaccgcatggcagcggagggactcttgttccccaacttctactcggcaaatccactgtgttctccttccagggcggctctgctgaccggaagactaccaattcgcaatggattctacaccaccaacgctcacgcacgtaacgcctatacaccacaggaaatcgtgggcggcatacctgacagtgagcagctacttcccgaactcctgaaaaaagcaggatacgtaagtaaaatcgtggggaagtggcacctgggacatcgcccccagttccacccacttaagcatggatttgacgaatggttcggcagtccaaattgccacttcggcccctacgataataaggcacgcccaaacatacctgtatatcgggactgggagatggttggtcgttattatgaagagttccctatcaacctcaagaccggagaagcaaacctgacgcaaatctacctgcaggaggcgctggactttatcaagcggcaggcccgtcaccacccatttttcttgtattgggctgtggacgctacgcatgccccagtgtacgcatcaaagcctttcctgggcaccagccagagaggccggtacggggacgcagtgcgcgagatcgacgattctatcggtaagatcctggagctcctgcaggacctccatgtggccgataacaccttcgtgttcttcacctccgacaacggcgccgctcttatatcagcgccagagcaggggggatcgaatggtccgttcctgtgcgggaagcagacaacctttgaggggggaatgcgtgagccagccctcgcttggtggcccggacatgtgacagctggccaggtgagccatcagttgggttctatcatggacctcttcacaaccagcttggccctcgcaggcctcactccccctagtgatcgcgctatcgacggcctcaacctgctccctaccttgctccaaggtagacttatggaccggcctatattttattacaggggggacacgctgatggctgccacactaggtcaacataaggctcacttttggacctggacgaattcttgggagaactttcggcagggcatagacttttgtcctgggcagaatgtgagcggcgtgactacccataatctggaagatcacaccaagttgcctcttatctttcacttaggccgcgaccccggcgaaagatttccgcttagcttcgcttccgccgaataccaggaggccctctctcggatcacatctgttgtacagcaacatcaagaggcccttgtgccagcgcagccacaactgaacgtttgcaattgggcagtaatgaactgggcccctccgggctgtgaaaagctgggaaagtgcttaactccacctgaatcaattccgaagaaatgcctgtggagtcat

SEQ ID NO: 11984 - DNA, 1566 bp, synthetic construct
  misc_feature 1..1566: note = source = /note="Description of Artificial Sequence: Synthetic coding sequence"
  source 1..1566: mol_type = other DNA
atggcagcggtagtggcggcaactaggtggtggcaactcctgctcgtgctcagcgccgcaggtatgggagcttcaggcgctccgcaaccgcccaatatccttcttcttctcatggatgacatgggttggggtgatttgggtgtttacggagaaccaagccgcgaaaccccgaacctggaccgtatggctgcagagggcctgcttttcccgaacttctactccgcaaaccctctctgctcgccttcccgggcagcacttcttaccggtagactccccattagaaacgggttttacacgaccaacgcccatgcaaggaacgcgtacacgcctcaggaaattgttggtggaattccagattcagaacaactgcttccagagcttctgaaaaaggccggatacgtgtcgaagatcgtcggtaagtggcaccttgggcatcgccctcagtttcatcctctgaaacatggatttgacgagtggttcgggtcccctaactgtcatttcggtccatacgacaataaggcaagacccaacattcctgtgtaccgcgattgggagatggtgggcagatactacgaagaatttccaattaacctcaaaaccggtgaagccaatcttacccaaatctatctgcaagaggcactcgactttatcaagcggcaagcacggcatcatccatttttcctgtactgggccgtcgatgcaacccatgcgccagtctacgcgtcaaagccatttcttggcactagccaaagaggacgttacggggacgccgtgagagaaattgatgattcaattggaaagattcttgagctcctgcaagaccttcatgtggctgacaacacttttgtgttctttacctcagacaacggagcggcccttatctccgcgcccgaacaaggtggatctaacggtcctttcctctgtgggaagcagaccactttcgaaggagggatgagggaacccgcactggcatggtggccaggacatgtgaccgccggacaagtctcccatcagctcggctcgattatggatttgttcactacttccttggcactcgcaggcctcactcctccctcggaccgcgcgatcgatgggctgaacctgctgcctaccctccttcaaggcagactgatggacagacctatattctactaccggggagacacccttatggcggcaactctggggcagcacaaggcccatttttggacctggaccaactcctgggagaatttccgtcagggtatcgacttttgtccgggacagaatgtctccggtgtgacgactcataacctcgaggatcacactaaacttcctctcatttttcaccttggaagggatcctggcgaaagatttcctctgtcgtttgcgtcagcagaataccaagaagctctttcacggattacgtcggtcgtgcagcaacatcaagaagccctcgtgcctgcacaaccccaactgaatgtgtgcaactgggccgtgatgaattgggcacctccgggctgtgaaaaacttgggaaatgtctgaccccacccgaatccattcctaaaaagtgtctctggtcccat

SEQ ID NO: 11985 - DNA, 1566 bp, synthetic construct
  misc_feature 1..1566: note = source = /note="Description of Artificial Sequence: Synthetic coding sequence"
  source 1..1566: mol_type = other DNA
atggctgcagtcgtggcagcaacccggtggtggcagctcctgcttgtcctgtcggccgccggaatgggtgcgagcggagcaccccagccgccaaacattttgcttttgctcatggatgacatggggtggggtgacctcggagtgtacggcgagccctccagagagactcctaacttggacagaatggcagcagaagggctgctctttccaaacttctattcggcaaatcccctgtgttcaccatccagggctgcactcctcaccggcagactgcctattcgcaacggattctacactactaatgcccatgcacgtaatgcttacacgcctcaagaaatcgtcggcggtatccccgactcggagcagcttctgcctgagcttctgaagaaagccggctacgtctccaagatagtcggcaagtggcaccttggtcatcggcctcaatttcacccactgaaacatggatttgatgaatggttcgggtccccaaattgccactttggtccctacgataacaaagcaaggccgaatatccctgtgtacagggactgggaaatggtgggacgctactacgaggagtttcctatcaacttgaaaacgggagaagcaaaccttacccagatttaccttcaggaggccctggacttcataaagagacaggcacgtcaccacccatttttcctgtactgggccgtggatgccactcacgccccggtctacgcatcgaagccatttctgggaacctctcaaagaggccgatacggagatgcagttagagaaattgatgacagcatcggaaagatcctcgagctgctgcaggacctgcatgtcgcagataataccttcgtgttctttactagcgataatggagcagctctgatctccgcacccgagcaggggggatcgaatggcccttttctgtgtggcaaacaaaccacctttgagggcggtatgagggaacccgcactggcatggtggcctggtcatgtgaccgcaggacaggtgtcccatcaacttggttccataatggatctcttcaccacctcgctggcgctggcaggactcactccaccgtcagaccgggcaatagatggcctcaatctgcttcctactctgctgcaaggcagactcatggatcgtccgatcttttactatcgcggtgataccctcatggcagcaactttgggtcaacacaaagcacacttttggacctggaccaactcgtgggagaactttagacaagggattgacttctgccctggacagaacgtgtcaggggtgactacgcataatctcgaggatcatacgaagctccctctgattttccaccttggacgcgatcctggagagcggtttccactctccttcgcgtccgcagaataccaggaagcactctcaagaattacttccgtggtgcagcagcatcaagaggcattggtgccagcacaacctcagcttaacgtctgtaattgggcagtgatgaactgggcaccgcctggttgtgaaaagttgggcaagtgcctgactcctcctgagtccattcctaagaaatgtctgtggtcccat

SEQ ID NO: 11986 - DNA, 1566 bp, synthetic construct
  misc_feature 1..1566: note = source = /note="Description of Artificial Sequence: Synthetic coding sequence"
  source 1..1566: mol_type = other DNA
atggcagctgtggttgcagccacacggtggtggcaactgctgcttgtgctgtcagctgcaggtatgggagcctctggggcaccgcagccgcctaatattctgctgttgcttatggatgatatggggtggggggatctaggcgtgtatggcgagccctcacgagaaacaccaaacctcgatagaatggccgctgagggattattgtttccgaacttttactcagcaaaccccctgtgtagcccctcacgagccgccctgcttaccggccgtctgccaatccggaatggcttctataccactaatgctcacgcccggaacgcgtatacaccgcaggagatagtgggcggtatacccgactctgagcagttactcccagaactgttgaagaaggcaggatacgtttcaaaaatcgtaggcaaatggcatctgggccatcggcctcagtttcatcctctgaagcacggatttgacgaatggttcggatcaccaaactgccacttcggtccatacgacaataaggcccgacctaacatacctgtttacagggactgggagatggtcggccgctactacgaggaattccccatcaaccttaagaccggtgaggctaacctgacgcagatttacctgcaggaggccctggatttcatcaaaagacaggcccgacaccatcccttcttcctatattgggcagtcgacgcgacccacgcgcccgtctatgcctccaagcccttcctgggtacatcccagcggggtcgctatggcgacgccgtaagggaaatcgacgacagtattggcaaaattctggaattgctccaggatctgcatgtggctgacaacacattcgtgttttttacaagcgataacggcgctgccctcatctccgccccggagcaaggcggcagcaatggcccttttttatgcggaaaacaaactactttcgaaggtggaatgcgagagcccgctctagcctggtggcccggccacgtgaccgccggccaggtgtctcatcagctagggtccattatggatctatttactaccagcctcgctctcgctggtctcactcctccttccgaccgggccattgacggactgaacctgttgccaactctgctccaggggagactcatggacagaccaatcttctattatcgaggcgatactttaatggcggctactttgggccagcacaaggcacacttttggacttggaccaacagttgggagaatttccggcagggcattgatttttgcccgggccagaacgtgtccggagtgactacccataatctcgaagaccacaccaagcttccgcttatctttcacctggggcgcgacccaggcgaaaggttccctctgtcctttgcgtctgcagaataccaggaggctctctccaggattaccagtgtggtgcaacagcaccaggaggcactggtcccagcgcagcctcagttaaacgtatgcaactgggccgttatgaattgggcaccacctggctgcgagaagcttggtaaatgtctgacccctcctgaaagcattcccaagaagtgcctgtggtcacac

SEQ ID NO: 11987 - DNA, 1566 bp, synthetic construct
  misc_feature 1..1566: note = source = /note="Description of Artificial Sequence: Synthetic coding sequence"
  source 1..1566: mol_type = other DNA
atggcagcagttgtagccgctacccgatggtggcagctcttgctggtactgtcagctgctggaatgggggcaagcggagccccacagcctcccaatattctgttgctgttaatggacgacatggggtggggggacctgggcgtgtatggtgagccttctcgggagacccctaatctcgacaggatggcagctgagggcctcctgttccccaatttctactctgccaatcccctctgctctcctagccgggcagccctcctcaccgggcggttacctatccgcaatgggttttatactactaatgcccacgccagaaacgcatatacccctcaggagatcgtgggagggatcccagattccgagcagctgctcccggagctgctgaagaaagctggttacgtgtctaaaattgtaggaaagtggcatctgggccacagaccgcaatttcaccccctgaaacacggatttgatgaatggtttggaagccctaactgccacttcggaccttatgacaacaaagcgcggccaaatatccctgtgtatagagattgggagatggtggggcggtactacgaagagttcccaatcaacctaaagaccggggaagctaacctcacacagatctacctacaagaggctttggactttataaaaagacaagctcgccatcacccatttttcctgtactgggcagtggatgcgacccacgccccagtgtatgcttctaaacccttcctggggacaagtcagcgaggtcgatatggcgatgctgtgagggagattgacgactctattggcaagattcttgaactgctgcaggatcttcacgtggccgacaacaccttcgtgttcttcacgagcgataatggagctgcccttatatccgctccagagcaggggggctcaaacggaccctttctgtgcggcaagcagaccacctttgaagggggtatgcgtgagcccgctctggcttggtggccaggccacgtgaccgcggggcaggtatcccaccaacttggttccatcatggacctgtttaccacctcgttggctctcgccggacttacccccccctctgaccgggccatagatggcctcaatctccttccgaccctgctccaaggacggctaatggatcggccaattttttactaccgcggcgatacactcatggctgctaccttaggacagcacaaagctcatttctggacatggactaattcatgggagaacttccgccagggcatcgacttttgtcctggacagaatgtttctggagtgactactcacaatctggaagatcatacgaaattaccactgatcttccatctggggagagaccccggagagcggttccccctttccttcgccagcgcagagtaccaggaagccctgtcgaggatcacaagcgtagtgcagcagcaccaggaggccctggttccggcccaacctcaactaaacgtttgcaattgggccgtgatgaattgggcgcctcccggctgcgaaaagctggggaagtgcctgactcctcccgaaagcatccctaaaaagtgcctctggagccat

SEQ ID NO: 11988 - DNA, 1566 bp, synthetic construct
  misc_feature 1..1566: note = source = /note="Description of Artificial Sequence: Synthetic coding sequence"
  source 1..1566: mol_type = other DNA
atggcggcagtggttgctgcaacacgctggtggcagctcctgctagtgctgagtgcggccgggatgggagcctccggcgcaccccagcctcccaatattttgctcctgctgatggatgacatgggctggggagatctgggcgtgtacggagaaccctcacgggagacacctaatctggaccggatggcggcagaaggtctgctgttcccgaatttctactctgcgaatccactatgtagcccttctagggcagcactgctgaccgggcggctgcctatcagaaacggtttttatacaactaacgcccacgctagaaatgcctacacgccccaggagattgttggtggcattcccgattcggagcagctccttccagagctcctgaaaaaagccgggtatgtaagtaagatcgtggggaaatggcacctcgggcatcgaccccagtttcacccactgaagcacgggttcgatgagtggttcgggtcacccaactgccattttgggccctatgacaacaaagcccgcccgaatatacccgtttatagagactgggaaatggttggacgatactacgaggagtttcctatcaatcttaaaaccggtgaagccaatttgacccaaatctacttgcaggaagctcttgattttattaagcggcaggctaggcaccatccattctttctgtattgggccgttgatgcaacccatgcgcctgtgtacgcatctaagcccttcttgggcacaagtcagcgcgggaggtatggcgatgcagtccgcgaaattgacgattcgatcggcaagatactggagctgctgcaggacctgcatgtggcggacaacactttcgtgtttttcacttctgacaatggagcagctctgatctctgctcctgagcaggggggtagtaatggcccttttctgtgcggtaagcagaccactttcgagggaggcatgcgggagccagctctcgcctggtggccaggacatgtcacagctggccaggtatcgcaccagctcgggtctatcatggatctttttacgacgtctctcgctctagccggtttaacgcctccctcagacagagctatagacggcttgaatctcttgcccacgctgctgcagggccgtctcatggacagaccaattttttattaccgcggcgataccctgatggctgccaccttagggcagcacaaggcccatttctggacatggacaaactcctgggagaattttcggcagggaattgacttctgccccggacagaacgtgtcaggagtgacgacacacaacttggaggaccataccaagcttcccctcatttttcacttggggagggatccaggagaacgctttccactgagttttgcttctgccgagtatcaggaggccttaagcagaattacctctgttgtacagcaacatcaagaagcgctggttccagcgcagccacaattgaatgtctgtaattgggctgtcatgaactgggccccacccggttgtgagaagctcggaaagtgcctgactcctcctgaatccattcccaagaaatgcctgtggtctcat

SEQ ID NO: 11989 - DNA, 1566 bp, synthetic construct
  misc_feature 1..1566: note = source = /note="Description of Artificial Sequence: Synthetic coding sequence"
  source 1..1566: mol_type = other DNA
atggcagcggttgtcgccgccaccaggtggtggcagctgctgcttgtgttaagtgcagcgggtatgggagcaagcggcgctcctcagccccccaatattctccttcttctgatggatgacatgggctggggagatctcggagtctacggagagccatcaagggagacccctaatctggaccgtatggcggctgaagggctcttgttcccgaatttctattcagccaacccactgtgctcaccatcacgcgctgctctcctgacagggcggctgcctataagaaacggtttttataccactaacgcgcacgcccgcaatgcttacacacctcaggagatcgtgggtgggatacccgacagcgaacagctgttacccgaattgctcaagaaggctggctacgtcagtaaaattgtgggaaagtggcatttgggccacaggcctcaattccatccgctgaagcacggctttgacgagtggttcggaagcccaaactgccatttcgggccttacgacaataaggccagaccaaatatccccgtgtaccgagactgggagatggtgggacgatactacgaggagttcccaatcaatctcaaaaccggggaagcaaacttgactcagatttatttacaagaggcactcgacttcattaaaaggcaggcacggcaccaccccttttttttgtactgggctgttgatgcaacacacgcaccagtgtatgcctcaaagcccttcctcggaacgagtcagcgaggccgatacggcgacgctgtgagggaaatcgatgactcaattggaaagatccttgaacttttgcaggatctccacgttgcagacaatacatttgttttcttcacttcggacaacggggccgcccttatctccgcacctgagcagggaggttctaatgggcccttcctgtgcggaaagcaaaccacctttgaaggcggcatgagggagccagctctcgcctggtggccgggccacgtgactgctggacaggtctcccatcagctgggcagcatcatggacctgtttacaacaagcctggcgctcgccggacttacccctccatctgatagggctatagatggactcaacctattgccgactttgctgcagggtaggctgatggacagaccaatcttctattaccgtggggataccttgatggcggccacacttggccagcataaagcgcacttctggacatggacaaatagctgggagaattttagacagggtatcgacttctgcccgggccagaatgtgtctggtgtgaccacgcacaatctcgaggaccataccaagctgcctctgatattccatctcgggcgcgaccctggggagcgcttccctttgagtttcgcatcagcagaatatcaggaggcccttagtcggatcacctctgtggtgcagcaacaccaggaggctttagtgccggcccaaccgcagttaaatgtgtgtaactgggcagtcatgaattgggcacctccgggttgtgagaagctaggtaagtgtctgactcctcctgagtccatccctaagaaatgtctatggagccat

SEQ ID NO: 11990 - DNA, 1566 bp, synthetic construct
  misc_feature 1..1566: note = source = /note="Description of Artificial Sequence: Synthetic coding sequence"
  source 1..1566: mol_type = other DNA
atggccgcagtggtagctgctacgagatggtggcagcttttgctggtcttgtccgcagctgggatgggagcttctggggccccccagccccctaacatcctccttcttcttatggatgatatggggtggggggatcttggagtctacggggaacccagtcgggagactccaaacctcgataggatggccgctgaagggctactcttccctaacttctattcggcaaaccctctctgttccccctctcgggccgcactgctcacaggaagactgccaatcagaaatggattctatactacaaatgcccacgctagaaatgcctatactcctcaggaaatcgtgggaggaatacctgattctgaacagctgctacccgaacttcttaaaaaggctggatatgtgtccaaaatcgtagggaagtggcacttgggacacaggccacagttccatccactaaaacacgggttcgatgagtggtttggatctcccaattgtcattttgggccttatgataacaaagcacgacctaacatccccgtgtatagagattgggaaatggtcggacggtattatgaagaattcccaataaacttaaaaacaggggaggccaatctgactcaaatatatctacaggaagctttggattttataaaaaggcaggcgcggcaccatcctttctttctctattgggccgtagatgcaacacacgcacctgtctatgcctctaaacctttcttaggaacatctcagcgggggcgatatggagatgccgttcgggaaatagatgattccatcggaaaaatactcgaactgctgcaggaccttcacgtggctgacaatacattcgtattctttacatccgataacggggctgccctcatttctgcccctgaacaagggggatccaacgggcctttcctgtgtgggaaacagacaacttttgaaggaggaatgcgggaaccagccctcgcatggtggcccggacatgttactgcgggacaggtgtctcatcagctcggatccatcatggatctatttactacgagtcttgccttagccgggctgactccaccatctgatagagccatcgatggactgaatctccttcccactctccttcagggaaggctgatggatcgccccatattctattaccgcggagatacactcatggccgctacactggggcagcacaaggcccatttttggacttggacaaactcttgggaaaatttccgccagggaatagatttctgccccggacagaacgtatctggggtgacaacacacaatcttgaagatcacacaaaactacccctcatctttcacctagggagggatcctggggagaggttccccctgtccttcgctagtgcagaataccaggaagccctaagtcggattacatctgtggtccagcaacatcaggaagctctcgttcccgcccagcctcaattaaacgtgtgtaattgggctgtaatgaactgggctcctcccgggtgtgaaaaacttgggaaatgtcttactcctccagaatccatccccaagaagtgtttatggtctcac

SEQ ID NO: 11991 - DNA, 1566 bp, synthetic construct
  misc_feature 1..1566: note = source = /note="Description of Artificial Sequence: Synthetic coding sequence"
  source 1..1566: mol_type = other DNA
atggccgctgtcgtggccgccactcgctggtggcagctgctccttgtgctgagcgccgctggaatgggagcgtccggagcccctcagccgccgaacatcctgcttcttcttatggacgacatgggttggggcgacctgggggtctacggcgagccgtcaagggagactccgaatctggaccgcatggccgcggaaggacttctgttcccaaacttctactctgccaacccattgtgctcgccctccagggcggcactcctgactggccggctcccgatccggaatggtttctataccaccaatgcccacgcccgcaacgcgtacaccccacaagaaatcgtgggtggtattcccgattccgaacagctgctcccggaacttctgaagaaggccggctacgtgtcgaagatcgtgggaaagtggcacctcggacatcgcccgcagttccatccgctgaagcacggattcgacgaatggtttggaagcccaaattgtcattttggtccatatgacaataaggctagacctaatatcccggtgtaccgcgactgggaaatggtgggacggtactacgaggaattccctatcaacttgaaaacgggagaggccaatctgacccagatttacctgcaggaggcactcgactttatcaagcggcaggccaggcaccacccatttttcctgtactgggcggtcgacgctacccacgccccagtgtacgcgtcgaaaccgttccttggaaccagccaacgcgggcggtatggggacgccgtcagagaaatcgatgacagtattggtaagatcctcgaactgcttcaggacctgcacgttgcggataataccttcgtgttcttcacttcagacaacggagctgcactgatctcggccccggagcagggaggatccaacgggcctttcctctgcggtaagcaaaccactttcgaaggcggaatgcgcgaaccggcactggcctggtggccaggacatgtcactgccggccaagtctcgcatcagctgggctcgatcatggaccttttcaccaccagcctggccctggccggactcactccgccgtcggaccgcgctatcgacggcttgaatttgttgcctaccctgctccaaggccgcctcatggacaggccgattttctactacaggggcgacaccttgatggctgccactcttggccaacacaaggcccatttctggacctggaccaactcatgggagaatttcagacaggggatagacttttgcccggggcaaaacgtgtccggggtcactacccacaatttggaggatcacaccaagctgcccctgatcttccatctgggcagagatcctggtgagaggttcccgctctcattcgcttccgcggaataccaggaagcattgtcgagaatcacctcggtggtacaacagcaccaggaggccttggtcccggcccaaccccagctgaacgtctgcaactgggccgtgatgaattgggcaccgcctggctgcgagaagctgggaaaatgcctgactccgccagaatcaatccccaagaagtgtctctggtcccac

SEQ ID NO: 11992 - DNA, 1566 bp, synthetic construct
  misc_feature 1..1566: note = source = /note="Description of Artificial Sequence: Synthetic coding sequence"
  source 1..1566: mol_type = other DNA
atggccgcagtcgtggcggcgactaggtggtggcaactcctgctcgtgttgtcagcagcaggtatgggggcatccggagcacctcagccacctaatatccttctcctcctcatggacgacatgggttggggtgatctcggtgtctacggtgagccttcccgtgaaaccccaaacctggatcggatggcagccgaggggctgctgttcccgaacttctattcagcaaaccctctttgctctccctcccgcgcagcactgcttactggacgactgcctatccgcaatggattttacactaccaacgcgcatgctcgtaacgcatatacgcctcaggagatcgtcggtggaatacccgactcagaacagcttctgccggaactgttgaaaaaggcagggtacgtttcgaagatagtgggaaaatggcatctgggtcacaggccacaattccaccctctgaagcatgggtttgacgagtggttcggatcgcctaactgtcattttgggccatacgacaacaaggctagaccgaatattcctgtctaccgtgattgggagatggtgggccgatactacgaggaatttcctattaaccttaaaaccggagaagcaaatctcacccagatctaccttcaggaggcgctggatttcatcaaaaggcaggcaagacatcacccattctttctttactgggcggtcgacgcaactcatgcacccgtgtatgcatccaagccatttctgggtactagccaacgtgggcgctacggtgacgcagtccgcgaaatagatgattccatcggaaagatactcgaactgctgcaggaccttcatgtcgccgataacaccttcgtgttctttacctccgataacggggccgcccttatctcggcgccagagcagggtgggtccaacggtcctttcctctgcggtaagcagaccaccttcgagggtgggatgagagaacccgccctggcatggtggccaggccacgtgaccgcaggacaggtatcgcatcagctgggatcgatcatggatctctttactacttcccttgctcttgccggcctgacccctccttccgatcgggcaattgatggtttgaatctgctgcccactctgcttcaaggcagactgatggatagacctattttctactaccgaggtgataccctcatggccgcgactctgggacagcacaaggcacacttctggacttggaccaactcgtgggagaactttcgccaagggatcgacttttgtcctggccaaaacgtgtccggcgtgactacccataacctggaagatcataccaagctccctctgattttccatttgggtcgcgatccaggcgaacgattcccactgtcgtttgcatccgcggaataccaggaggcactttcgaggattactagcgttgtgcaacaacatcaagaggcccttgtcccagctcagccccagctcaatgtgtgcaattgggctgtgatgaattgggcccctccaggctgcgagaagctgggaaagtgtctgactcctccggagagcattcccaaaaagtgtctgtggtcgcac

SEQ ID NO: 11993 - DNA, 1566 bp, synthetic construct
  misc_feature 1..1566: note = source = /note="Description of Artificial Sequence: Synthetic coding sequence"
  source 1..1566: mol_type = other DNA
atggccgccgtggtggcagctacccggtggtggcagctcctactggtcctcagcgccgcaggtatgggggcttccggtgcaccacaaccgccaaatattctgcttctgctcatggacgacatgggatggggcgacctgggcgtgtacggtgaaccctcccgcgagactcccaatttagaccgtatggccgccgagggactcctgttccctaatttctattcagcaaatcccctttgttcccctagtagagctgctttgctcacaggacgccttccaattaggaatgggttctacactaccaatgctcacgccagaaacgcctacactcctcaggagatagttggtggtatccccgactcggagcaattactgcctgaactgctgaaaaaagctgggtacgtaagcaaaatcgtcgggaaatggcacctggggcaccgcccccagtttcaccccctgaaacacggttttgacgagtggtttggtagtcctaattgccactttggcccgtacgacaataaggctagacctaatattccggtttatagagattgggaaatggtgggcaggtattacgaagagtttcctataaacctgaagactggtgaggcgaatctcactcagatctatctccaggaggctctagactttataaagcggcaagctaggcatcacccctttttcctctactgggcagtagacgccactcatgctcccgtctatgctagcaaacccttcctggggacttctcagcggggtcggtacggtgacgccgtgcgcgaaatcgacgacagtatcggtaagatcctggagcttctgcaggatttgcatgttgccgacaatacctttgttttcttcacctccgacaatggggctgccctaatcagcgcgcccgaacagggagggagcaatggtccatttttgtgcggaaagcagacaacgttcgagggaggaatgcgggagcccgccttagcttggtggcctggccatgtaactgcaggacaagtctctcaccaactggggagcattatggaccttttcacaacaagcctggccctagccggactcaccccacctagtgatcgcgccattgatggccttaatctcctgccaacactgctgcagggtcgcctaatggacaggcccatcttctattatcgaggagacacccttatggccgccacgcttggccaacataaagcacatttctggacttggactaactcttgggaaaatttccggcagggaattgatttttgtccgggccagaacgtgtctggcgtgacaacccataacctggaggatcacacaaagctccctctgatcttccaccttggcagagaccccggtgagaggtttcctctgtcttttgcctctgctgaataccaggaggccctctccagaataacaagcgtcgttcagcagcatcaagaggccctcgtgccagcccaacctcaattgaatgtctgtaactgggctgtcatgaattgggcccctcctggctgcgaaaaactgggaaagtgtctcacaccacccgaaagtattccaaaaaagtgcctgtggtcccat

SEQ ID NO: 11994 - DNA, 1566 bp, synthetic construct
  misc_feature 1..1566: note = source = /note="Description of Artificial Sequence: Synthetic coding sequence"
  source 1..1566: mol_type = other DNA
atggctgctgtggtggctgccaccaggtggtggcaactccttcttgtattaagtgcagccgggatgggtgcctcaggcgctccacagcctcctaacatcctactactactgatggacgatatgggatggggggatttgggagtgtacggagagccatcccgggaaacaccaaaccttgatcgaatggcagccgaggggctgctatttccaaacttttactcggccaatcccctctgttcacccagtagggcggcactgctaaccggtcggctgccaattcggaacggcttttatacaacaaacgcacacgccagaaatgcgtacacgccccaggaaatcgtcggagggattccagacagcgagcagctgctcccggagctgcttaagaaggctggctacgttagtaagattgtcgggaaatggcacctgggacataggccacagttccacccattgaaacacgggtttgatgagtggttcggatctcctaactgtcattttgggccatatgacaataaagctaggccgaatatcccagtttatagagactgggaaatggtggggcgctactatgaggaatttcccatcaaccttaaaactggcgaggcaaacctgactcagatctacctgcaggaggccttggattttatcaagaggcaggctcgtcaccaccccttttttctgtactgggctgtggatgcaactcatgcaccagtttacgctagcaagccgtttctgggaacgagtcagcgcgggcggtacggggacgcggtgagggagatcgacgattcaatcgggaagatcctagaactacttcaagacctgcacgtggccgacaacacgttcgtctttttcacatcagataatggagctgcattgatctcggcccctgaacagggcggctccaacgggcccttcctgtgtgggaaacagaccaccttcgaaggaggaatgcgagagcccgcactggcctggtggccaggacacgtgactgctggccaggtttcgcatcaactgggctccataatggatttgttcactacctctctcgccttggccggactcacaccaccttctgaccgcgcgattgacggcctgaatctgctcccaacattactgcagggccggctaatggatcgccctatcttttattacagaggggacacactcatggccgcaaccctgggccagcataaggcgcacttctggacttggactaactcatgggagaatttcagacaagggattgacttctgcccaggacagaatgtgtcaggcgtgacaactcacaatcttgaagatcacaccaaattgcccttgattttccatctcggcagagaccctggagagcgttttccccttagtttcgcttccgccgaatatcaggaagccctgagtcgaatcacatccgtagttcaacagcatcaggaggcactggtacctgcccaacctcagttgaacgtgtgtaattgggccgtcatgaactgggctcctccgggttgtgaaaaattaggcaaatgtcttacccccccggagagtattcccaaaaagtgcctgtggagtcat

SEQ ID NO: 11995 - DNA, 1566 bp, synthetic construct
  misc_feature 1..1566: note = source = /note="Description of Artificial Sequence: Synthetic coding sequence"
  source 1..1566: mol_type = other DNA
atggccgccgtggtggcagcgacgcgatggtggcaactgcttctggtcttgtccgctgcgggcatgggcgccagcggcgcaccccagccaccaaacatccttcttctccttatggacgacatgggttggggcgacctgggtgtctatggcgagccgtctagggaaaccccgaacctggatagaatggccgcggagggactgctgtttcccaatttctacagcgccaaccctctgtgctccccgtctcgtgccgcccttctcaccggacgcttgcccatccgcaacggattttacaccaccaacgctcatgcgcgcaacgcttatactccccaagaaattgtcggaggcatccctgactccgagcagctattgccggaactgctaaagaaagcaggttacgtctcgaagatcgttggtaagtggcaccttggtcatcggccgcagttccacccgcttaagcatggatttgatgagtggtttggctcccccaattgccacttcggcccctacgataacaaggccagaccgaacatccctgtttaccgtgactgggagatggtcggacgttactacgaagaatttcctatcaacctgaagaccggcgaggcaaacttgacccagatctatttgcaggaggctttggatttcattaaacgccaggcccgtcatcacccttttttcttgtactgggccgtcgacgccacccacgcaccggtctatgcctccaagcccttcttgggtactagtcaacggggtcgttatggggacgcagtacgggagatcgatgacagtataggtaagatcctagagctcctgcaggatctccacgtcgctgataacactttcgtcttctttacgtccgacaacggcgctgctctgatctcggcacccgagcagggaggctcgaatggaccgttcttgtgtggaaagcagacaactttcgagggcgggatgcgcgagcctgccctcgcgtggtggccaggccatgtgacagccggccaagtgtcgcatcagttggggtcgattatggatctgttcactacgtccttggcgctggcaggcctcactccaccttccgatcgggctatcgacggtttgaaccttcttccgaccttgctgcaggggcgccttatggacagaccgatcttctactatcgtggcgacacgcttatggctgctacgttgggccagcataaggcccacttttggacctggacgaacagttgggagaacttccgccagggaatcgacttctgccccggtcagaacgtatctggagttaccacccacaacctcgaagaccacacaaaactgccattgatcttccatctcggccgggaccccggagaacgcttcccactgtccttcgcttctgctgaataccaggaggctctgagccgcataacctcggtggtccagcagcaccaggaggctctagtgcctgcccaacctcaactcaacgtgtgcaattgggcagtgatgaactgggccccccccggctgtgagaagttaggcaaatgtctgacaccgcctgagtctattcctaagaagtgcttgtggtcccat

SEQ ID NO: 11996 - DNA, 1566 bp, synthetic construct
  misc_feature 1..1566: note = source = /note="Description of Artificial Sequence: Synthetic coding sequence"
  source 1..1566: mol_type = other DNA
atggccgcagtggtcgccgcaacacgctggtggcagttgttgctggtcctcagtgccgccgggatgggcgccagtggtgcacctcaacctcctaatattcttctgctgctaatggatgatatgggatggggggatctaggggtctacggggaaccctcaagagaaacgccgaatctcgacagaatggccgccgaggggcttctctttccgaatttttactcagcaaacccattgtgctcgcccagccgggcggccttactaaccggtaggctgcctatcaggaatgggttttataccacaaatgctcacgcgagaaatgcgtatactcctcaggaaatagtgggcggcatccctgatagtgaacagcttttgcctgagctgctcaagaaggccgggtatgtgtccaagatcgtaggaaaatggcatttaggacacagaccccagttccatccactgaaacacggattcgacgagtggtttggctcgcccaactgccacttcggcccgtatgataataaggcacggcctaacataccagtttacagagactgggagatggttgggaggtactacgaggagtttcctatcaacctcaagacgggggaggcgaacttaacccagatatatctccaagaggcgctggactttataaaaagacaagctcgccaccacccttttttcctctattgggctgtggatgccacacacgctccagtatatgcctccaagccatttttggggaccagtcagcggggccgatatggagatgcagttcgtgagattgatgacagcatcggaaaaatcttagaactgctccaagacttgcatgtggccgataatacgtttgtcttcttcacaagcgataacggtgccgcactaatttcagcccctgagcaaggggggtccaacggcccgtttctgtgcggaaagcagactactttcgaaggcggtatgcgcgagcctgcacttgcctggtggcccggtcatgtgacagcagggcaggtgtctcatcagctcggcagcataatggatctgtttactacatctttggcgctggccggccttactccgccttccgaccgcgccatagatggcctcaacctgctgcctacactgctccagggccgactgatggatcgccccatcttttattacaggggagatacgcttatggccgccactctgggacagcacaaggctcatttctggacttggacaaatagctgggagaactttagacaggggatcgatttttgtccaggacagaatgtttcaggagtgaccactcacaatttggaggatcatacaaagttaccactgatctttcacctcgggcgggacccaggagagcggttccctctgagcttcgcttccgcagagtaccaagaggccctttccaggatcacctctgtggtgcagcagcatcaggaagcactggtgccggcgcaaccacagctgaacgtgtgcaattgggccgtcatgaattgggcccctcctggctgtgagaagctgggaaaatgcctgacccctccagagagcatccccaaaaaatgtttgtggagtcac

SEQ ID NO: 11997 - DNA, 1566 bp, synthetic construct
  misc_feature 1..1566: note = source = /note="Description of Artificial Sequence: Synthetic coding sequence"
  source 1..1566: mol_type = other DNA
atggccgccgtggtcgcggcgaccaggtggtggcaacttttgctggtgctgagtgcagccggcatgggagcgtccggcgctccgcaaccaccgaacatcctgctgctcctgatggatgacatgggatggggagatctcggcgtgtacggggagccatcgagggaaaccccgaacctcgaccgcatggcggcagaaggcctgctctttcccaacttctactcggccaaccctctctgctcgccatcgcgggccgcactcctgactggacggcttccgatcaggaatgggttctacactactaatgcccatgccagaaacgcctacaccccgcaggaaatcgtgggtggcatcccagattccgaacagctgctcccggagctgttgaagaaagcaggctacgtgtcgaagatcgtgggaaagtggcaccttggtcaccgcccgcaattccacccactgaaacacggattcgatgaatggtttgggtcacccaattgccacttcggaccctatgacaataaggctcgccctaatatccccgtttatcgggactgggagatggtgggacggtactacgaggaattcccgatcaaccttaagaccggcgaggcaaatctgacccagatttatcttcaagaggcccttgatttcatcaagcgccaagcgcgccaccatccatttttcctttactgggccgttgatgctacccatgctcctgtgtacgcatctaaacccttcctgggcacgtcgcagcggggccgttacggcgacgcagtccgcgaaatcgacgattccatcggaaagatcctggaactgctccaggatctgcatgtcgccgataacacgttcgtattctttacgtcggataatggagctgccctcatcagcgcgccggaacagggcggaagcaacggaccgttcctgtgcggaaaacagactactttcgaaggtgggatgagggagccagccctcgcatggtggcccggccacgtgactgcaggacaagtgagccatcagcttggctcaattatggacctcttcactaccagcctggcactcgccgggctcacgccaccatctgacagggcgattgacggattgaacctgcttcccaccctcctccaaggtcggctcatggaccgtccaatcttctattacaggggagacactttgatggcggccaccctcggacagcacaaggcccatttctggacttggactaatagctgggagaacttcagacagggaattgacttttgccctggccaaaacgtctccggggtcaccactcataacctcgaggaccacaccaagctgccgcttatcttccacctgggacgcgaccctggcgagcggtttcccctgtccttcgcttcggccgaataccaggaggctctctcgcgcatcacttccgtggtgcagcagcaccaggaagccttggtcccggcgcaaccacagctcaacgtctgcaattgggctgtgatgaactgggcccctccgggatgcgagaaactgggaaaatgtctcactcctccggaaagcatccccaagaagtgcctgtggagccac

SEQ ID NO: 11998 - DNA, 1566 bp, synthetic construct
  misc_feature 1..1566: note = source = /note="Description of Artificial Sequence: Synthetic coding sequence"
  source 1..1566: mol_type = other DNA
atggcggccgtcgtggcagctacaaggtggtggcagctcctcttggttcttagcgcagcgggcatgggtgcttccggagcaccccagcctcccaacatcctgctccttcttatggacgacatgggctggggagatctgggggtttatggcgagccctctcgcgaaacacccaatttggacaggatggctgccgagggcctgttgttcccaaacttttattccgcaaatcccctttgctcccccagtagggctgccctgctgactggccgactccctatacgaaacggattttatacgacaaacgctcacgctaggaatgcatataccccacaggaaatagtgggcgggattcccgactccgaacagctgctgcctgagcttctcaagaaagcagggtacgtttctaagattgttggcaagtggcaccttgggcaccggccccagtttcatccactgaaacatgggtttgatgagtggtttggatctcccaactgtcacttcggcccttacgacaacaaggccagacccaatattcccgtgtatagagactgggagatggttgggcggtactatgaggagttccctatcaacttgaaaacgggtgaggccaatcttacacagatctacctccaggaggctctggatttcataaagagacaggcccgccatcacccctttttcctctactgggccgtggacgccactcacgccccagtgtacgcatctaagccattcttgggaacttcccaacgcgggcgctacggggacgcggtaagagaaattgacgactctatcggaaagattctcgaactgctgcaggacctgcacgtcgctgacaatactttcgtctttttcactagcgacaatggggctgccctgatcagcgcccccgagcaagggggcagtaatggacctttcctctgcggtaagcagacgacattcgaaggaggtatgagagagccagcattggcatggtggcctggccacgtcacagccggccaggtttcacaccagcttggatctatcatggatctcttcacaacctcccttgccctggctggacttaccccgccgtccgatagggcaatcgatgggctgaacctgcttcccactttgctccaaggaagactgatggatcgccccatcttctactacaggggggacacgctgatggccgcgaccctgggtcaacacaaggctcacttttggacctggacaaattcatgggagaacttcaggcaaggtatcgatttttgcccaggccagaatgtcagtggcgtgaccacacataatctggaagaccatacaaaactgccacttatttttcatctgggtagggaccctggggagcggtttcctcttagcttcgcatctgctgagtatcaggaggcactctcacgaatcacttctgtggtccaacaacaccaggaagcgctggtgccagcacagccacaactgaatgtatgcaactgggcagtgatgaactgggcccctccaggctgtgaaaaacttggtaaatgcctgacgcctcctgagagtattcccaaaaagtgtttgtggagtcac

SEQ ID NO: 11999 - DNA, 1566 bp, synthetic construct
  misc_feature 1..1566: note = source = /note="Description of Artificial Sequence: Synthetic coding sequence"
  source 1..1566: mol_type = other DNA
atggctgcagtggtcgcagctaccagatggtggcagcttcttcttgtgctgtccgcagcaggaatgggagcttccggcgcgccccagccccccaacattctgttgcttcttatggatgatatgggttggggggatcttggagtgtacggtgagccatcgcgagagacgcctaatctcgataggatggcagcagaagggctgctcttccctaacttttacagcgcgaacccactgtgtagccctagcagggcagcattgctcaccggccgcctgcctattcgcaatggtttttacactactaatgcacatgccagaaacgcctacactcctcaggaaatcgtgggaggtattccagattccgaacaactccttcctgaactgctgaagaaagccggatacgtcagcaagatcgtgggaaaatggcatcttggacatcgcccacaatttcaccctctcaagcacggatttgatgagtggttcggaagccctaactgtcattttgggccttacgacaacaaggcacgcccgaacatacctgtctaccgagactgggaaatggtcggccgttactacgaagaatttccaatcaatctgaaaactggagaagcaaacctgacccagatttaccttcaagaagcacttgactttatcaaacgtcaggctcggcatcacccgtttttcctttattgggctgtggatgctacccatgctccagtgtacgcatcgaaacccttcctgggtacttcacaaaggggtcgatacggagatgcagtgcgtgaaatcgacgattcgattggaaagattctcgaactgcttcaagaccttcatgtggcagataatacctttgtgttcttcacttcggataacggagcggcactgatctccgctcccgaacagggcggcagcaacggaccctttctttgtggcaaacaaactacctttgagggtggaatgcgggaacccgcgcttgcgtggtggccgggacacgtgactgcaggacaggtgtcacaccaacttggctcgattatggacctctttactaccagcctggcactcgcaggcctgaccccaccctctgatcgcgccatagatgggctgaacctgcttccaactctgctgcaaggcagacttatggaccgcccgattttctactatcgaggggatactctgatggcagccaccctcgggcagcataaagctcacttctggacttggaccaacagctgggaaaacttcagacagggaatcgatttttgtcccggtcagaatgtgagcggagtgactacgcacaacttggaggaccacaccaaactgcccctgatctttcatcttgggagagatcccggagagcgcttcccactttcattcgcatccgcagaataccaagaggcactctccagaataacctccgtggtgcaacaacatcaggaagccctcgtgccagcacaacctcagttgaacgtgtgtaactgggcagtgatgaattgggcacccccagggtgtgaaaagctgggcaagtgtctcaccccaccagaatcgattcctaaaaagtgtctctggtcgcac

SEQ ID NO: 12000 - DNA, 1566 bp, synthetic construct
  misc_feature 1..1566: note = source = /note="Description of Artificial Sequence: Synthetic coding sequence"
  source 1..1566: mol_type = other DNA
atggccgctgtcgtcgccgcgaccaggtggtggcaactgcttttggtgttgtcggccgccggaatgggcgcctcgggtgccccacaaccacctaacatcctccttctgttgatggatgatatggggtggggcgaccttggagtctacggcgaaccatcccgagaaactcccaacctggaccgcatggcggctgaaggcctgctgttcccgaacttttactcagccaatcccctgtgcagcccatcgagagccgcgctgctcactggtagactgccgatccgaaatggtttctacaccaccaatgctcacgctcgaaacgcttacacgccacaggaaatcgtgggaggcattcctgattctgagcaactgctccccgagctgctgaagaaggccggatacgtgagcaaaatcgtgggaaagtggcacctcggtcaccggcctcagttccacccgctgaagcacggttttgacgagtggtttggatcccctaactgtcactttggcccgtacgataacaaagcgaggccgaatatacctgtgtaccgcgactgggagatggtgggacggtactacgaggaattcccgatcaatcttaaaactggagaggcaaacttgacgcaaatctaccttcaagaggcattggacttcatcaaacggcaggcgcgccaccatcccttcttcttgtactgggcagtggacgcaacccatgcaccggtgtacgcgtcaaagcctttccttgggacttcccaacgcgggcgctatggagacgctgtccgggaaatcgatgactccattggaaagattcttgaactgctgcaggatctccatgtggcagataacaccttcgttttctttacttcagataacggagcggccttgattagcgctccggaacagggaggctccaacggaccattcctgtgtggtaagcagactacgttcgaagggggaatgagggaaccagcactggcgtggtggcctggccacgtgaccgccggccaggtgtcccatcagctgggatctattatggatctgttcactacctcactcgccctggctggactgaccccgccttccgaccgcgccatcgacgggctgaacctgttgccgaccctgttgcagggaaggcttatggaccgaccaatcttctactaccggggagacactttgatggccgccaccctcggccaacataaggcgcacttttggacttggaccaattcatgggaaaactttcgccagggtatcgacttctgcccaggacagaacgtgtccggcgtcactacccataatctggaagatcacactaaactgccccttatcttccacctggggcgggacccgggcgagagattcccgctcagcttcgcgtcggcggagtatcaagaggcactgtcacgcatcacttccgttgtccagcagcatcaagaagcccttgtgcctgcacagccccagctcaacgtttgcaattgggcagtcatgaattgggccccacctggatgcgagaaactgggaaagtgcctgactccgccagagagcatcccgaagaagtgcctttggagccat

SEQ ID NO: 12001 - DNA, 1566 bp, synthetic construct
  misc_feature 1..1566: note = source = /note="Description of Artificial Sequence: Synthetic coding sequence"
  source 1..1566: mol_type = other DNA
atggctgctgttgtggccgccacccggtggtggcagctcctgctggtgctgagcgcagctggtatgggagcgagtggagccccacagccaccaaatattctgttacttctcatggacgacatggggtggggagatcttggagtgtatggggagccttcccgagaaacgcccaatctggaccgaatggctgccgagggcttactgttccccaacttctattctgccaacccactatgctctccctcgagagccgccttgttaactgggcgactgcctatccgtaatggtttttacacaaccaatgcccatgcgagaaacgcctatacacctcaggagatcgtgggggggatcccagattccgaacagctactcccggagctactcaagaaggctggctacgtctctaagatagtcggaaagtggcacttggggcacagacctcaattccatccgcttaaacacggcttcgacgagtggtttggatctcctaactgtcattttgggccatacgacaataaggctcgacctaatatcccagtttatagagattgggaaatggtagggcgatattacgaagaatttcccatcaacctgaagaccggtgaagctaatctgactcagatctatttacaagaagcgttggattttatcaaaagacaggccagacaccatcctttttttctctattgggcagttgatgccacccacgctccagtttatgccagcaaaccattcctcggaaccagtcagcgaggccgatacggcgatgccgtgagagaaatcgatgactcaatcggaaagattctcgaactcctgcaggatctccacgtggccgacaacacatttgtcttttttacctctgacaacggggccgccttaataagcgctcctgagcaaggggggtctaacggcccatttctctgcggcaaacaaaccacctttgagggtggaatgcgagaaccagccctcgcctggtggcctggtcacgttacagcaggacaagtcagtcaccagctgggttccataatggatttgttcaccacttcattagcacttgcaggtctgacccccccgtctgatagggcaatagacggccttaacttactgcctacactgctgcaggggagattaatggacagaccgatcttttattatagaggagatacgctcatggctgccactttgggacagcataaagcccacttctggacctggactaactcttgggagaacttcagacaggggatcgatttttgcccgggccagaacgtctccggagtgactacgcataacctggaagatcacacaaaactacccttgattttccatctgggaagagaccccggcgagcgattccctctgtcatttgctagcgctgagtatcaggaggcccttagtcgtattacatcagtcgtgcagcaacatcaagaagcattggtgcctgcgcaaccacagctgaatgtttgtaactgggccgttatgaactgggctcctccaggatgtgagaaactggggaaatgtctgacaccccccgaaagtattcctaagaaatgtctctggagccac

SEQ ID NO: 12002 - DNA, 1566 bp, synthetic construct
  misc_feature 1..1566: note = source = /note="Description of Artificial Sequence: Synthetic coding sequence"
  source 1..1566: mol_type = other DNA
atggcagcggtcgtcgcagcgacccgctggtggcagctccttctggtgctgtcagccgcaggaatgggagcgtcgggcgcaccacagccacccaacatccttctgctccttatggatgatatgggttggggcgacctgggcgtctatggggagccttccagagaaacccctaacttggacagaatggcagccgagggacttctgtttccaaacttctacagcgcgaacccactgtgctcgccttcccgggccgcgctcctgaccggtcgactgcctattcgcaatggcttctacactacgaacgcacatgctaggaacgcatacaccccccaagaaatcgtggggggtatccctgactccgaacagctgcttcctgaactgctgaagaaagcaggatacgtgtcgaaaattgtcgggaagtggcatcttggtcatcggccccagtttcatccacttaagcatgggtttgatgagtggtttggttcgcccaattgtcattttggtccttatgacaacaaggcacggccaaacattccggtgtatagagactgggaaatggtgggaagatactacgaagaatttcccattaatcttaagacgggtgaggccaatctcactcaaatctacctccaggaggcactcgatttcattaagcgccaggcccggcatcatcccttctttctttattgggccgtcgatgcaacgcacgcccccgtgtatgcgtcgaagccatttctgggaaccagccagagaggacgatacggagatgccgtgagggaaatagatgattccattggaaagattctggagttgctccaagatcttcatgtggctgacaatacctttgttttcttcacgtccgataacggagcggcactgatttcggccccggaacagggtggttccaacggtccctttctttgtggaaagcagactacctttgagggaggaatgcgggaacccgctctggcgtggtggccagggcatgtgaccgcaggacaagtgagccatcaactcggatccattatggatctctttaccacctcccttgcactcgcaggacttactccaccaagtgaccgtgcaatcgacggactgaatctgctccccaccctgcttcaagggcggctcatggacaggccgatattctactaccgcggagatactctcatggccgcaaccctcgggcaacataaggcgcatttttggacttggaccaacagctgggagaacttccggcagggaattgacttctgccctggtcaaaacgtgagcggggtgacgacccacaatctggaggaccacaccaaactgcctttgatatttcatcttggtagagatcccggtgagcgttttccgctgtcctttgcaagcgccgagtaccaagaagccctgtccagaatcaccagcgtggtccaacaacatcaggaagcactggtgcctgcacagccacaactcaacgtgtgtaattgggcagtcatgaattgggctcctcctggatgtgaaaagctcggaaaatgccttaccccaccggaatccataccaaagaagtgcctgtggtcccac

SEQ ID NO: 12003 - DNA, 1566 bp, synthetic construct
  misc_feature 1..1566: note = source = /note="Description of Artificial Sequence: Synthetic coding sequence"
  source 1..1566: mol_type = other DNA
atggccgcagtcgttgctgctacgagatggtggcagctccttcttgttctcagtgcggccggtatgggcgctagtggtgctcctcagccaccaaacatcctattactgctcatggacgacatgggctggggtgatctaggtgtttatggtgagccatcgagggagacaccgaacctagacaggatggctgccgaaggacttctcttccccaatttctactcagccaatcccttgtgttccccttctagagcggcgctgcttaccggtcgccttccaattcgtaacggcttttacacgactaacgcccatgctcgcaacgcttacacacctcaggagatcgtaggtgggatccccgattcggagcaactgttgcctgaacttctgaagaaggcgggttatgtcagcaaaatagtagggaagtggcacttaggacatcggcctcaattccatcctctcaagcacgggttcgacgagtggttcggctcgccaaactgccactttggcccgtacgataacaaggcgaggcctaatatccctgtgtacagggattgggagatggtcggacgatactatgaagagtttcccataaacttgaaaacgggtgaggcgaacttaacccagatttacttgcaggaggccctggacttcatcaaacgacaggcccgacatcatccgttctttttgtactgggctgtcgatgcgacccatgcgccggtatacgcttccaagcccttcttaggcacatcgcaacgcggccgatacggcgatgccgtgcgggagattgatgactcaataggaaagatccttgagttgcttcaagatcttcacgtggccgataataccttcgtattttttacctctgacaacggcgcggccctcatatccgctccagaacaaggcggctcgaatggaccattcctttgcggcaagcagacaactttcgaagggggtatgcgggagcccgctctggcatggtggccagggcatgtcacagcgggtcaggtctcacaccagctaggatccatcatggaccttttcactacctcgctcgctcttgcgggtctgacgccaccaagtgacagagcgatcgatggtctgaatcttctgcctactctgctgcagggacgactaatggatcggccaatattctactatcggggagacaccctgatggctgctactcttggccagcataaggcgcatttttggacatggaccaattcgtgggagaacttccgtcagggaatcgacttttgcccgggtcagaatgttagtggtgttacgacacacaaccttgaggaccacaccaagctgccgctgatttttcatcttgggagggacccaggcgagagattccccctttccttcgctagcgcggaatatcaggaagctcttagcagaatcacctcagtcgtgcagcaacatcaagaggctctggttccggcgcagcctcagttgaacgtgtgcaactgggcagtcatgaattgggccccacccggatgtgaaaaattggggaaatgcctaaccccacccgagtctatccctaaaaagtgtttgtggtcacat

SEQ ID NO: 12004 - DNA, 1566 bp, synthetic construct
  misc_feature 1..1566: note = source = /note="Description of Artificial Sequence: Synthetic coding sequence"
  source 1..1566: mol_type = other DNA
atggcggcagtggtggccgctacacggtggtggcagctgttgttggtcctgtctgccgcgggaatgggcgcaagtggtgcaccacagcctccgaatatattactgctcctgatggacgacatgggttggggggatctcggggtctacggtgagccttctagagagacccccaacctggacaggatggcagcggaaggtctcttattccctaatttctacagcgccaatcctctatgctctccttctagagccgctctgctgacggggcgcctgccaattcgcaacggtttttacacaactaatgcacatgctagaaatgcttatacccctcaggagatcgtcgggggcatacctgacagtgagcagctgttgcccgagctgttgaagaaagcaggttacgtgagcaagatcgtcgggaagtggcacctcggccaccggccccagtttcatccactcaaacacggattcgacgagtggttcgggagcccaaattgccattttggcccatacgacaataaagcccgtccaaatatcccagtctaccgggactgggaaatggtcggccgttattacgaggagttccccatcaatctgaagacaggcgaggccaacctgactcagatttatctgcaggaagctcttgactttatcaaaaggcaggccaggcaccaccccttttttttgtattgggccgtggacgcaacccatgcccccgtttatgcctctaagccattcttgggaacgagtcagaggggaaggtacggcgacgcagtgagggagatcgacgacagcatcggtaagatcctagagcttctccaggatcttcatgtcgccgataacactttcgtcttcttcacctctgacaatggagctgctctgatctccgcacccgagcagggcggatcgaacggcccattcctgtgtggaaaacagacaacatttgagggagggatgagggagccggctctagcctggtggcctggccacgtgaccgcaggacaagtttctcaccagctgggcagcattatggatctgtttaccacatctctagctctggcagggctcacacccccaagcgatagggcaatcgatggattgaacctccttccgactctgttacaaggtcggctgatggaccggcccattttttactatcggggcgacacgcttatggctgctaccctcggacagcacaaggcccacttctggacatggacgaatagctgggagaacttcagacagggcattgatttttgccccgggcagaatgttagtggtgtcaccacccacaatctggaggaccacaccaaactcccacttattttccaccttgggagagatccgggagagaggtttcctctgagctttgcttccgccgaataccaggaggctctgtctaggatcactagtgtagttcagcagcaccaggaggccctcgtgcctgcccagccacagctgaacgtgtgcaactgggccgtgatgaactgggctcctcccgggtgtgagaagttgggaaagtgcttgacccccccagagagtatcccgaagaagtgcttatggagccat

SEQ ID NO: 12005 - DNA, 1566 bp, synthetic construct
  misc_feature 1..1566: note = source = /note="Description of Artificial Sequence: Synthetic coding sequence"
  source 1..1566: mol_type = other DNA
atggcggccgtggttgcggcgactcgctggtggcaactgttgctggtcctgtccgccgctggaatgggcgcatccggagccccacaaccgccgaacatactcctgcttctgatggacgacatgggttggggggatcttggagtctatggggagccgagcagagaaacgcccaacctcgatcggatggcagcagaggggctgctgtttccaaacttttactccgccaaccctctgtgctcgccgagcagagcggcactgctcacggggaggctgccgatacgcaacggattctacacgacgaacgctcacgcgcggaacgcgtacaccccacaggaaatcgtcggaggaatcccagattccgaacagttgcttccggaactcctcaagaaggccggctacgtttcgaagattgtcggaaaatggcatctgggtcaccgcccccaattccaccccctgaaacatgggtttgatgaatggttcggcagccccaactgccattttggcccttatgacaataaagctcggcccaatatcccagtgtacagagattgggaaatggtgggacgatactatgaggaattcccgatcaacttgaaaacgggggaagcaaatttgactcaaatctacctgcaagaagctctggatttcatcaagcgccaggcgcggcatcatccatttttcctgtactgggctgtggatgccacccacgcccccgtgtacgcatcgaagcctttcctgggaactagccagcgtggcagatacggcgatgcagtcagagagatcgacgacagcatcggtaagatcctggagctgctgcaggatctccacgtagcggacaataccttcgtgttcttcacctccgacaatggcgctgccctgatctcggccccagagcaaggcggatccaatggaccattcctttgcggaaagcagaccacgttcgaaggcggtatgagagaacccgcgctcgcgtggtggccgggacacgtcactgcaggacaggtgtcgcaccagcttggatccattatggacctgtttactacctcactcgccctggccggtctgacgccaccgtcggatagagcgatcgacggactcaacctgctgcccaccctgctgcaagggcggctcatggaccggccaatcttttactaccggggagacactctgatggcggccactctcgggcagcataaggctcacttctggacctggaccaattcgtgggagaacttcagacagggtattgatttctgcccagggcagaacgtgagtggagtgactactcacaacctggaggaccacaccaagctgcctctcatctttcatctgggtcgggaccccggcgaacggttcccgctctcattcgccagcgctgagtaccaggaggcactgtcacgcatcacctccgtcgtgcaacagcaccaggaggcgctcgtgccggcgcaaccacagctcaacgtgtgcaactgggccgtgatgaattgggctccgccgggatgtgaaaagctcggaaagtgtttgaccccgccagaatcgattccgaagaaatgtctgtggtcgcat

SEQ ID NO: 12006 - DNA, 1566 bp, synthetic construct
  misc_feature 1..1566: note = source = /note="Description of Artificial Sequence: Synthetic coding sequence"
  source 1..1566: mol_type = other DNA
atggcagccgtcgtggccgctacccgatggtggcaactcctactggtcctctctgccgccgggatgggagcatccggcgcgccccagccaccgaacatcctgctgctgctgatggatgacatggggtggggtgatttaggggtatacggagaacccagcagggagacacccaaccttgaccggatggcagcagagggcctgctcttcccaaacttctatagcgcaaatcccctctgcagtccctctcgcgctgccctgttaacggggcggctgccaataaggaacggtttttataccaccaacgcacacgcccggaacgcctatacaccccaggagatcgtgggtgggataccagactccgagcagttactccctgaattactgaagaaagctggttacgtgtcaaaaatcgttggaaagtggcacctcggtcatcgaccacagtttcacccccttaagcatgggttcgacgagtggtttggcagtcctaattgtcactttggtccctacgataataaggccagaccgaacatccctgtatacagggattgggagatggtcggccgatactacgaggagttcccaatcaacttaaagacaggtgaagccaatttaactcaaatttacctgcaggaagcattggacttcattaaacgccaggcacgccaccacccattttttctgtattgggccgtcgacgccacacacgccccagtgtatgcctccaaacctttcttgggcacctcccagcgcggaagatatggtgatgctgtacgagagatcgatgacagcatcggaaaaattttggaactgctgcaggacctgcacgtggctgataatactttcgtcttttttaccagtgacaacggggccgcattaatcagtgcgccagagcaaggcgggagtaacggccccttcttgtgcgggaagcagacaacttttgaggggggtatgcgggagcccgcactcgcttggtggcccggacacgtgacggcagggcaagtgtctcatcagctcgggtcaattatggacctttttactacttcgctagcactcgccggcttaacacctccgtcggaccgggccatcgatggtctgaatttgctgcctacgctattgcaaggacgcctaatggaccgaccaatattttactatagaggtgacactttaatggcagccaccttggggcaacacaaagctcatttctggacctggactaactcttgggagaatttccggcagggcatcgacttctgccctggccagaacgtcagtggtgtgaccacgcataatttagaggatcacactaagcttcccctgatttttcatctcggtcgcgacccaggggagcggtttccgctgagctttgcctcagccgaataccaggaagcactgtcccggattaccagtgtcgtccagcagcaccaggaggcactcgtgccagcacaaccgcagctgaacgtctgcaactgggccgtgatgaattgggcaccgcctggctgtgagaagcttggtaaatgcttgaccccccccgagtcaatccctaagaagtgcctgtggtcgcac

SEQ ID NO: 12007 - DNA, 1566 bp, synthetic construct
  misc_feature 1..1566: note = source = /note="Description of Artificial Sequence: Synthetic coding sequence"
  source 1..1566: mol_type = other DNA
atggccgcggtggtggcagcgactcggtggtggcaacttctgctggtgctgtcggcagcagggatgggagcatctggagcaccgcaaccccccaacatcctgctgctccttatggacgacatgggttggggagacttgggcgtctacggagaacctagcagggaaactcccaacctggacagaatggcggcagaaggcctgttgtttcccaacttttactcagccaaccccctctgctccccttccagagcagcattgcttaccggccgcttgcctattagaaatggcttttacaccaccaacgctcacgcaagaaacgcgtacactccacaagaaatcgtgggcggcatccccgatagcgaacagctgctgcccgaactgttgaaaaaagccggatatgtgtcgaagatagtgggaaagtggcaccttggacacagaccacagtttcatccgcttaagcatggttttgacgagtggtttggatcaccaaactgccactttggtccatacgataacaaggctagaccaaacatcccggtgtacagggattgggaaatggtcggaagatattacgaggaattccctatcaacctcaagaccggggaagcaaacctgacccagatatacctccaggaggcactggatttcatcaaacggcaagcaagacatcatcccttctttctgtactgggccgtggatgcgacgcatgcaccagtgtacgcatcgaagccattcctcggaacgtcccaacggggacgctatggagatgcagtgcgagaaatagacgacagcatcggaaagattctggaactgctgcaagatcttcatgtcgccgataacacctttgtgtttttcacttcagataatggagcagcactgatatcggccccagaacagggagggtcaaatggccccttcttgtgcggtaaacagaccacctttgaaggaggaatgcgagagcctgctctcgcctggtggccgggacatgtcactgccgggcaggtgtcccaccaactcggttcaattatggatctctttactacttcgctcgcacttgccgggcttactccaccgtctgaccgcgcaattgatgggctgaacctccttccaactttgctgcaggggcggctgatggatcggcctattttctactaccggggagataccctgatggcagcaaccttgggacagcataaggcccatttttggacttggactaacagctgggagaattttcgtcagggcatcgacttttgtcccgggcagaacgtgtcgggtgtgactacccataaccttgaggatcataccaagctgccactcatcttccatctcggcagagatccaggtgagaggtttcccctttcgttcgcgtcagccgaataccaagaagccctgtcacggattacctccgtcgtccagcagcatcaagaagcattggtgccggcgcagccccaacttaacgtgtgtaattgggccgtgatgaactgggccccacctgggtgtgaaaagctgggcaaatgtctgacgcctcctgaatcgattccgaagaagtgtctgtggagccac

SEQ ID NO: 12008 - DNA, 1566 bp, synthetic construct
  misc_feature 1..1566: note = source = /note="Description of Artificial Sequence: Synthetic coding sequence"
  source 1..1566: mol_type = other DNA
atggcggcagtcgttgccgccaccaggtggtggcaactgctgctggtgcttagcgccgctggcatgggtgcctccggcgccccacaaccacccaatatactgctcctgttgatggacgatatgggctggggcgacctcggggtctacggagagccaagccgcgaaactccgaaccttgaccgcatggctgccgagggcctcctgttcccgaacttctactcggcaaatccactgtgcagcccttcgcgggccgctctgctgactgggcggctccctatccggaacggattctacaccacgaacgcccatgccagaaacgcgtacactccgcaggaaatcgtgggaggcatcccggattccgagcagctgctgccagaactgcttaagaaggcaggatacgtgtcaaaaatcgtgggaaagtggcatcttggacacaggccgcaattccatcctctcaaacatggttttgacgaatggttcggctcgccaaactgtcatttcggcccctacgataacaaggccagaccgaatatccccgtgtaccgggactgggaaatggtcggcaggtactacgaagaattcccgattaatctgaaaactggcgaggcaaacctgactcagatttacctgcaagaggcgctcgacttcatcaaaagacaagcaagacaccaccccttcttcctgtactgggccgtggacgcgactcacgcaccggtgtacgcctcaaagccatttctgggcacttcgcaacggggacgatacggcgatgcagtccgggagattgatgattcgatcgggaaaatcctggaacttcttcaggacctccatgtcgcggataataccttcgtgttctttaccagcgataatggagccgccctgatctccgccccagagcagggaggctccaatggtcctttcctgtgcggaaagcaaaccaccttcgaaggcggaatgcgggagccagcccttgcatggtggccgggccacgtgaccgccggacaagtgagccatcagttgggcagcatcatggacctgtttactaccagcctggcgctcgcgggactgactccgccttcagatagagcgatcgatggtctgaatctcctgcccaccttgctgcaggggcgcctgatggaccggccaatcttctactatagaggtgatacgctgatggcggctactcttggccagcataaggcgcatttttggacctggaccaacagctgggaaaacttccgtcaaggaatcgacttctgccctggccagaacgtgtcaggagtcactacccataatctcgaggaccataccaaactccctttgatcttccatctcggtcgggacccgggggagcggtttccactgagtttcgcgagcgcggaataccaggaagcgctgagccgcatcacctccgtcgttcaacaacaccaggaggctctggtcccggcacagcctcaattgaacgtctgtaactgggccgtgatgaactgggccccaccaggatgtgagaagctgggaaagtgcctgaccccgcctgaatcaatcccgaagaagtgcctgtggagccac

SEQ ID NO: 12009 - DNA, 1566 bp, synthetic construct
  misc_feature 1..1566: note = source = /note="Description of Artificial Sequence: Synthetic coding sequence"
  source 1..1566: mol_type = other DNA
atggcggcagtggtcgccgctactaggtggtggcagctcctcctggtgctgagcgccgccggcatgggtgcgtcaggggctccgcaaccgccgaacatcctgctcctgctcatggacgacatgggatggggcgatctgggcgtctatggtgaaccatcgcgtgagactccaaacctggaccggatggcagcagaggggttgctgttcccgaatttctactcggctaatcccctgtgctcaccgagccgcgctgctttgctcactggtcgactccctattagaaacgggttctacactaccaacgcacatgcgcgcaatgcttacaccccgcaagagatcgtgggagggattccggactcagaacagctgctgccggagctcttgaagaaagcaggttacgtgtcgaaaatcgtgggcaaatggcatcttggccatagacctcagttccatccactgaagcacggattcgatgaatggttcggttcgccaaattgtcatttcggcccttacgacaataaggcgcgccctaacatccctgtgtacagagattgggagatggtgggacggtattacgaagaattcccgattaacctgaaaaccggagaggcaaacctgactcaaatctacctgcaggaagcgctggatttcataaagaggcaagcccgccaccacccctttttcctctactgggcagtcgacgcaacccatgccccagtgtacgcttccaagcctttccttggaactagccagcgcggtagatacggagacgcagttcgggaaattgacgactccatcggcaagatcctggagctcctccaagacctgcatgtcgcagataatacgtttgttttctttacctccgataacggcgccgccctcattagcgcccctgagcaaggtgggagcaacggaccattcctctgtggcaagcagactactttcgagggcggcatgcgagaaccggcgcttgcgtggtggccggggcacgtgactgctggccaggtgtcgcaccagctggggtcgatcatggacctttttactacgagcttggcgcttgccggactgactccaccgtcggaccgcgcgatcgatggtctgaacctcttgcccaccctcctgcagggacgactgatggacaggccaatcttttactaccggggagacactctcatggcggccactctcggacagcacaaggcccatttctggacctggactaactcctgggaaaactttaggcaaggcatcgatttctgccccggccagaacgtcagcggagtcactacgcacaatctggaagatcacaccaagctgcccctcatcttccatctcggccgcgacccgggagaacggtttccgctgtcatttgcctccgccgaataccaagaggccctgtctcgcattacgagcgtggtgcagcagcaccaggaagctctcgtcccagcacagcctcaactgaacgtctgcaattgggccgtgatgaattgggcccctccgggatgtgagaagctgggaaaatgccttactccgccagagtcaatcccaaagaagtgcctgtggagccac

SEQ ID NO: 12010 - DNA, 1566 bp, synthetic construct
  misc_feature 1..1566: note = source = /note="Description of Artificial Sequence: Synthetic coding sequence"
  source 1..1566: mol_type = other DNA
atggctgctgtggttgccgcgactcgctggtggcaactgctgctcgtcctgagcgccgccggtatgggagcctccggggccccacagccgcctaatatcctgctgctgcttatggacgatatgggatggggtgatctgggggtgtacggagaaccttcacgagaaacgccgaacttggatcggatggccgccgaggggctcctttttcctaatttctacagcgccaatccgctttgctcgccctcaagggcggccctcctcacgggacggctgccaattagaaacggcttctatactaccaacgcgcacgcaagaaatgcctacaccccgcaggagatcgtcggcggaatccctgacagcgaacaacttctccctgaactgcttaagaaagccgggtacgtgtcgaagatcgtgggaaaatggcatctgggtcaccgcccacagttccatccactgaaacacggattcgacgaatggtttgggtcacctaactgtcacttcggaccgtacgacaataaggctaggcccaacatcccggtgtaccgggactgggaaatggtcggccgttactacgaagagtttccgatcaacctcaagacgggagaggccaacctgacccagatttacctccaggaggcactcgactttatcaagagacaagcccgccaccacccgttcttcctgtactgggccgtggacgccacccatgccccagtctatgcatcaaagccgttccttggcacttcccaacggggaagatacggagacgccgtgcgcgaaatcgatgactccatcggtaagatcctggaactgttgcaggacttgcatgttgctgacaacaccttcgtattcttcaccagcgataacggagctgcgctgatttcagccccggagcaaggaggatcgaatggaccattcctctgcggtaaacagaccactttcgagggtggaatgagagaacctgctctcgcctggtggccaggacatgtgactgctggacaggtgtcacaccaactcggatcgatcatggatcttttcaccacgtcgctggcactcgccgggttgaccccaccgtcggaccgtgccatcgacggactcaaccttctgccgaccctcctgcagggtaggctgatggacaggccgatcttttactacagaggagacacgctgatggcggctactctcggacagcataaagcgcacttctggacctggactaacagctgggaaaacttccgccaaggcatcgacttctgccccgggcagaatgtgtccggagtaaccacccacaacctggaggaccacactaagttgccgctgatttttcatttgggacgggacccaggagaaaggttcccgctgtccttcgcgtcggcagagtaccaggaagctctgtcaagaatcacttcggtagtccagcagcaccaagaagccctggtgccggcgcaacctcagctgaacgtgtgcaattgggccgtgatgaactgggcgcctccgggatgcgagaagctcggcaagtgcctgaccccacccgagtccatcccaaagaaatgtctgtggtcccat

SEQ ID NO: 12011 - DNA, 1566 bp, synthetic construct
  misc_feature 1..1566: note = source = /note="Description of Artificial Sequence: Synthetic coding sequence"
  source 1..1566: mol_type = other DNA
atggcagcagttgttgctgcaactcgatggtggcaattattactagtattaagtgcagctggaatgggtgcttctggagctccacaaccaccaaacattttattattattaatggatgatatgggttggggagatcttggagtttatggagaacctagtagagaaactccaaatttagatagaatggcagctgaaggattattattcccaaatttttattcagctaatccactttgtagtccaagcagagcagcattattaactggaagattaccaattagaaatggattttatactacaaatgcacatgcaagaaacgcatatactccacaagaaattgttggaggaattcctgattcagaacaattattacctgaacttttaaaaaaagctggttatgttagtaaaattgttggtaaatggcatttaggtcatagacctcaattccatcctcttaagcatggatttgatgaatggtttggatcaccaaattgccattttggaccatatgacaataaagctagaccaaatatacctgtatatagagattgggaaatggtaggacgatattatgaagaatttccaataaatcttaaaactggtgaagcaaacctcactcaaatatatttacaagaagctcttgactttattaagagacaagcaagacatcatccattttttttgtattgggctgtagatgcaactcatgccccagtttacgctagtaagccttttttaggaactagtcaaagagggcgttatggagatgctgttcgtgaaattgatgattcaattggtaaaattttagaacttcttcaagatcttcatgttgctgataatacatttgtattctttacttcagataatggtgcagctttaatttcagcaccagaacaaggagggtctaatggaccatttctttgtggaaaacaaactacttttgaaggtggaatgagagagccagcacttgcttggtggcctggacatgttacagctggtcaagtatctcatcaacttggaagtattatggatcttttcactacatcattagctttggccggactaactccaccatctgatcgagctattgacggtcttaatcttttaccaactttacttcaaggtcgattaatggataggcctatattttattatagaggagatactcttatggcagcaacacttggacaacataaagctcatttttggacttggacaaattcttgggaaaattttagacaaggaattgatttttgtcctggtcaaaatgtaagtggagttactacgcataatcttgaagatcatacaaaattacctttaatttttcatcttggtagagaccctggggaaagatttccattgtcttttgctagtgctgaatatcaagaagctctttcaagaattacttcagtagtacaacaacatcaagaagctcttgttccagctcaaccacaattaaatgtatgtaattgggctgtgatgaattgggcacctcctggatgtgaaaaattaggtaaatgtttaacaccaccagaatcaattccaaagaagtgcttgtggtcacat

SEQ ID NO: 12012 - DNA, 1566 bp, synthetic construct
  misc_feature 1..1566: note = source = /note="Description of Artificial Sequence: Synthetic coding sequence"
  source 1..1566: mol_type = other DNA
atggccgcagtggtggccgctacacggtggtggcagctgcttctggtgctgtccgctgccggcatgggcgcttccggggccccccagccaccgaatatcttgctgctactaatggatgatatggggtggggcgatctcggcgtgtacggcgagccgtcaagggagacacctaatctggacaggatggcagcggagggcctgctgtttcctaatttctatagcgctaaccccctgtgtagccctagtagggctgctcttctgactggacgactcccgatccggaatggattctatactactaacgcccatgctaggaacgcttacacccctcaggagatagtcggaggcataccggatagtgaacaactgctgccggaactgctgaagaaagccggatacgtatcaaagattgtcggtaaatggcacctggggcacaggcctcagtttcatccactaaagcatgggttcgatgaatggttcggatctcccaattgccacttcgggccttacgataataaagctagaccgaacattccggtgtacagggactgggaaatggtggggagatattacgaagaattcccaattaatctgaagactggagaggctaacctgacccagatctatctccaggaagctctcgatttcattaagcgtcaggccagacatcacccattcttcttgtactgggctgtcgacgcaacccacgcaccggtttatgcatccaaaccattcttaggtacgtcccagcggggccgttacggagatgcggtaagagaaatcgacgatagcataggaaaaatcctggaacttctccaggacctccacgtggcagataatacttttgttttctttacctccgacaacggtgcagccctgatcagcgcacctgagcagggcggcagtaacggccccttcctatgcggcaagcagaccacgttcgaaggtggcatgagggaacccgccctggcgtggtggcccggccacgtaacggccgggcaggtgtctcaccagcttggaagcatcatggatcttttcacaacatctctcgccctggctgggctgacaccaccaagcgatagggcgatcgacggtcttaacctgctcccaaccctgctccagggaaggttgatggatcgccctatcttttattaccggggtgatacacttatggcggctacgctgggacaacataaggcacacttttggacatggacaaattcttgggaaaatttccggcagggtattgatttctgccccggtcagaacgtatcaggcgttactactcacaatctggaagatcataccaaattgcccttgatttttcatcttggacgagacccgggcgaacggttccctctgtcgttcgccagtgccgaataccaggaagccttatcgagaatcacttcagtggttcagcagcaccaagaagctctggtgcccgctcagccgcagctaaacgtgtgcaattgggccgtgatgaactgggcacctcccgggtgtgaaaagcttggcaagtgcttgactccccctgaaagcattccaaagaagtgcctctggtctcat

SEQ ID NO: 12013 - DNA, 1566 bp, synthetic construct
  misc_feature 1..1566: note = source = /note="Description of Artificial Sequence: Synthetic coding sequence"
  source 1..1566: mol_type = other DNA
atggctgcagtggtggctgcgaccagatggtggcaactgctgctcgtgctgagcgcggctggaatgggagcctcaggcgccccacaacccccgaatatcctgctcctcctcatggacgacatgggatggggggacctgggtgtgtacggcgaaccttcgcgggagactccgaatcttgaccgcatggctgcggagggactgctcttcccaaacttttactcagcaaatccactgtgctcaccctccagagcagcgctccttaccgggcggctcccgatccgcaacggtttctacaccaccaacgcgcacgctcggaacgcctacactccgcaggaaatcgtcggaggaattccagactcagagcaactgctgcccgagctcctgaagaaggccggatacgtgtcaaagatcgtcggcaagtggcacctcggtcacagaccgcagttccacccgctcaagcacgggttcgatgaatggttcggttcaccaaactgtcatttcggaccatacgacaacaaagcccggccgaatatcccagtctatcgcgactgggagatggtgggacgctactatgaggaattccctatcaacctgaaaactggagaggcaaacctcacccagatctacctgcaagaagccttggacttcatcaagcggcaagcccgccaccacccctttttcctctactgggcagtggacgccactcacgccccagtctacgcctcgaaaccttttctgggcacttcccagaggggccggtacggggatgcggtgcgggagatcgacgactcaatcggcaaaatcttggaactgttgcaggatttgcacgtggcggataatactttcgtctttttcacctcggacaacggcgccgcgttgatctcggcgccagaacaggggggatcgaatggcccgtttctgtgtggaaagcagactacctttgagggaggaatgagagaacccgccctggcctggtggccaggacatgtgactgccggccaggtgtcacatcagctcggttccattatggacctttttaccacttccctcgcactggccggactcactcccccgtccgatcgggctattgacggactgaacctgctgcccacgctcttgcaaggaaggctgatggatcgcccgatcttctactaccgcggcgatacgctcatggcggcgactctgggccagcacaaggcacatttctggacctggaccaattcatgggagaactttcgccaagggatcgatttctgcccagggcaaaatgtttccggagtgaccactcataatctggaggaccacactaagttgccgctgatctttcatctgggacgggatccaggggagcgcttcccgttgtcctttgcgtcggcggagtaccaggaggcgctgagccgcatcacctccgtggttcaacagcaccaagaagctctggtgccggcccaaccgcagctgaacgtgtgcaactgggctgtgatgaattgggccccgccgggatgcgaaaagctgggaaaatgcctgacgccccccgaatcaatcccgaagaagtgcctctggtcgcac

SEQ ID NO: 12014 - DNA, 1566 bp, synthetic construct
  misc_feature 1..1566: note = source = /note="Description of Artificial Sequence: Synthetic coding sequence"
  source 1..1566: mol_type = other DNA
atggccgcagtggtggccgctacccggtggtggcaactcctgctggtgctcagcgccgccgggatgggagcatcaggagcaccgcagccgccaaatatcctgctcctgctgatggatgatatggggtggggagacttgggtgtctacggagaaccgtcgcgggaaacccctaacctggaccggatggctgccgagggactgcttttccccaacttctactccgcgaatccgctgtgttcaccaagccgagccgcgcttctgactggccgcctgccgatcagaaacggattctacactactaacgctcacgcgcgcaatgcatacactccacaagaaatcgtgggaggtatcccggactcggagcaactgcttccggagctgctgaagaaggccgggtacgtgagcaagattgtcgggaagtggcacctgggacacagaccacaatttcacccgctcaaacacggattcgacgagtggttcggttcgccgaactgccactttggcccctacgacaacaaggcgcggccgaatatcccggtgtacagagattgggagatggtggggcggtactacgaggagttcccgatcaatcttaagaccggagaggcaaacctcacccagatttacctgcaggaggcgctggacttcattaagagacaggcgcggcaccatccgtttttcctctactgggctgtggatgctacccatgccccggtgtatgcatcgaagccgtttttgggcacttcccagcgcggtcgctacggagatgcagtccgcgaaatcgacgactcaatcggcaagatcctggagctcctgcaagacctgcacgtggcggataacacgtttgtgttcttcacttcagacaatggcgcagccctcatctcggcgcctgaacagggaggttccaatggaccgttcctgtgcgggaaacaaaccaccttcgaagggggtatgcgcgaaccggcgttggcatggtggccaggacatgtgactgccggacaggtaagccaccagctcgggtccatcatggatttgtttaccacttcgctggctctggcaggcctcactcccccaagcgaccgggccattgacggactgaatctcctgcctaccctgctgcaaggacggttgatggatcgccccatcttctactatcgcggggatactcttatggctgccaccctgggacagcataaggctcacttctggacctggactaatagctgggagaactttcgccaggggatcgatttctgcccgggacagaatgtctcaggcgttaccacccacaacctggaagatcatactaagctgccgctgatcttccatctcgggagggacccaggtgagagatttccactgtcgtttgcttccgccgaataccaagaagcactctcacggattacttcagtcgtccagcaacatcaagaggcactcgtccctgctcaaccccagctgaacgtgtgcaattgggctgtgatgaattgggccccgccgggatgtgagaaactgggaaagtgtctgacgccgccggagtcgatccccaagaaatgcctttggtcgcat

SEQ ID NO: 12015 - DNA, 1566 bp, synthetic construct
  misc_feature 1..1566: note = source = /note="Description of Artificial Sequence: Synthetic coding sequence"
  source 1..1566: mol_type = other DNA
atggcagctgtcgtcgcagcaactagatggtggcagcttctccttgtgctgtccgcagcaggaatgggcgcttcaggggccccccaacctcccaatatactgcttttgcttatggatgacatgggctggggtgatctgggtgtctacggagaaccatcaagggagactcctaatctcgaccgaatggctgcagagggcctcctttttcctaacttttacagcgcaaaccctctttgttccccttcgagagcagccctcctgaccggtagactccccattaggaacgggttctacacgactaatgcccatgcacggaatgcatacacccctcaagaaattgtcgggggaattcccgattcggaacaacttctgccagagctcctgaaaaaggctggctacgtgagcaagattgtgggcaagtggcatttggggcacaggccacagtttcaccctctgaaacacggatttgatgaatggttcggttcccctaactgtcatttcggaccatacgataacaaggcacggcctaacataccggtttacagagactgggagatggtggggagatactacgaagagttccctattaacctcaagactggtgaagcaaacctgactcagatttatctccaggaagctctcgatttcatcaagcgacaggctagacaccacccattctttctctactgggcagtcgacgcaactcacgcccccgtgtacgcatcgaaacccttcttgggaaccagccagagggggagatacggtgatgccgtgagagagattgatgatagcatcggtaagatcctcgaacttctccaggacctgcatgtcgcagataacacctttgtgttctttactagcgataacggggcagccctgatctccgcaccggaacagggaggatcgaacggcccctttctttgtggtaaacagactacctttgagggcggaatgagagaaccagcacttgcatggtggccaggtcatgtgaccgccggccaagtctcgcatcaacttgggagcattatggatcttttcaccaccagcctcgcacttgcagggctgactcctcctagcgatagggcgatcgacggacttaacctgcttcctactctccttcaaggtcgtcttatggacagacctatattctactaccgaggagatactctgatggcagcaactctgggacagcataaagcgcatttttggacgtggactaactcgtgggagaacttcaggcaaggaattgatttttgtcctggacaaaacgtcagtggagtgaccacccataatcttgaagatcataccaaactcccactgattttccatcttggacgcgatccaggggaacgctttcccctctcatttgcatccgcagaataccaagaagcactgagcagaatcacgtcggtggtgcagcagcaccaggaagccctggtcccagcacagccccaacttaacgtgtgtaactgggcagtgatgaactgggcgccacctggatgtgagaagctcggaaagtgcctgacccctcccgaatccatccccaagaagtgtctttggtcccat

SEQ ID NO: 12016 - DNA, 1566 bp, synthetic construct
  misc_feature 1..1566: note = source = /note="Description of Artificial Sequence: Synthetic coding sequence"
  source 1..1566: mol_type = other DNA
atggccgctgtggtagcagctacaaggtggtggcagctactgctggtcctctctgccgccggaatgggggcctccggagctccccagccccctaacattttactgttacttatggacgatatgggatggggggatctcggagtttacggagaaccctctcgggagactcccaacctagataggatggcagctgaaggattgctttttccaaatttctactctgctaaccctttatgttctccctccagggcagcactcttaactgggcggttgcctatcaggaatggattctacacaactaatgcacacgcccggaatgcttatacaccacaggaaatcgtgggggggattccagattctgagcagttgttgcccgaattattgaaaaaggcaggatacgtttccaagatagtgggaaagtggcaccttgggcaccggccccagtttcaccctctcaaacacgggttcgacgagtggtttgggtcgcctaattgtcatttcgggccttatgataacaaagcacgacctaatatcccagtgtatcgagactgggaaatggtcggaaggtactatgaggaatttcctataaacttaaaaactggggaagccaacttaactcagatttatttgcaggaagccctagacttcatcaagcggcaggcccggcaccaccctttctttctgtattgggccgtggatgccactcatgctcctgtgtacgcatcgaaacccttcttaggaacatcccagcggggacggtatggggatgctgttagagaaatagatgattccatcggaaagattctagaattgctacaggatttacacgtagccgataatacattcgtgttcttcacatccgacaacggggccgcccttatctctgctcctgaacaggggggatctaatggaccatttctctgtggaaagcagacgacattcgaaggaggaatgagggaacctgcactggcttggtggcctggacatgtcacagcagggcaggtctctcatcagcttggatctatcatggatttatttacaacttcccttgccctcgccggactaactccgccatcagatcgtgcaatagatggactcaatctgcttcccactttactgcaggggcggttaatggatcggcccatcttttattatagaggggatactctcatggcagctacgctggggcagcataaagcccatttctggacttggacaaacagttgggaaaacttcagacaggggattgatttttgtccagggcagaatgtgagtggggttacaacacacaaccttgaggatcatacaaaacttcctctaatattccatctggggcgcgatcccggggaacgcttcccattgtccttcgcaagtgccgaatatcaggaagccctgtcgaggataacttcagtggtacagcagcatcaggaagcacttgtgccagcccagccccagctaaatgtgtgtaattgggccgtgatgaactgggccccccctgggtgtgagaaactcggaaagtgccttacaccccctgagtctatacccaaaaaatgtctgtggtctcat

SEQ ID NO: 12017 - DNA, 1566 bp, synthetic construct
  misc_feature 1..1566: note = source = /note="Description of Artificial Sequence: Synthetic coding sequence"
  source 1..1566: mol_type = other DNA
atggcagccgtggtggcagcaacccgctggtggcaacttctgcttgtgctgtccgcagcgggaatgggggcatcaggcgcaccacagccccccaatatactccttttgctcatggatgacatgggatggggcgacctgggagtgtacggcgagccatcgagagaaactccaaatcttgatcggatggcagccgaagggctgctcttccccaatttctactcggctaacccactgtgttcgccttcccgcgcagccctgcttaccggtaggctgcccattagaaacggattctacaccactaatgcccacgcacggaacgcatacacccctcaagaaattgtgggagggatccctgactcggagcagctgctgcccgaacttctcaagaaggcaggatacgtgagcaaaatcgtcggtaagtggcatctgggtcaccgtccacaatttcatcctctgaagcatggctttgatgagtggttcggttcgcccaactgccacttcggcccatacgacaataaggcccggccaaacatacccgtctacagggactgggagatggtgggcagatactacgaagaatttccaattaaccttaagactggggaggccaaccttacgcaaatctacctgcaggaagcgctcgactttatcaaaaggcaggccaggcaccatccatttttcctttactgggcagtggacgcaactcacgccccggtctacgcatcgaagccatttctcggaacctcacagcgcggtcgctatggtgatgcagtgcgggaaatcgatgactcaatcgggaagatcctggaactcctgcaggatttgcacgttgcagataacacttttgtgttctttaccagcgataacggcgcagccctgatctccgccccagaacaaggcggcagcaacggcccttttctctgtggtaaacaaacgaccttcgaagggggcatgcgtgaacctgcactggcatggtggcctggtcacgtgactgctggacaggtgtcccaccagctcggctctattatggatctttttaccacttcccttgcactggccggacttaccccaccttccgatcgtgcaattgatggtctgaacttgctgcctactctgttgcaagggcgcctgatggatagacctattttctactacaggggagacaccctgatggctgccaccctcggacaacataaggcacacttttggacttggaccaacagctgggaaaactttagacaaggaatcgatttctgtccaggtcagaatgtgtcaggtgtcaccacgcataatctcgaagatcataccaaactgcccctgatttttcatcttggtcgggatcctggagagaggtttcccctgagcttcgcatctgctgagtaccaagaggccctgtctcgaataactagcgtcgtgcaacagcatcaagaagctctcgtgccggcacagccgcagctcaatgtctgcaattgggcagtcatgaactgggcacctccgggttgtgaaaaactcggcaaatgtctcactccaccagagtccatcccgaagaaatgtctctggtcacat

SEQ ID NO: 12018 - DNA, 1566 bp, synthetic construct
  misc_feature 1..1566: note = source = /note="Description of Artificial Sequence: Synthetic coding sequence"
  source 1..1566: mol_type = other DNA
atggcggcagtggtcgcagccactaggtggtggcaactgctgcttgtcctttcggcagcgggaatgggggcgtcaggggcgcctcagccccctaacatacttttgcttctgatggatgatatgggctggggcgatctgggagtctatggggaaccttcgagggaaaccccaaaccttgatagaatggcggccgaagggcttctgtttcctaacttttacagcgcgaatccactttgcagcccttcccgtgctgccctgttgacgggacggctgccgatacgaaacggcttctacaccactaatgcacacgcaagaaacgcttacactcctcaggaaattgtgggcggtatcccagattcggaacaactccttcccgagctcctgaagaaggcggggtacgtctccaaaattgtgggaaagtggcatcttggtcatcgacctcaatttcaccccctgaaacacgggtttgacgaatggtttggatcgccgaattgccactttggaccatacgataacaaggcacgcccaaacattcctgtgtacagagattgggagatggtcggtagatactacgaagagttcccaattaaccttaagaccggcgaagctaacctcacccagatatatctccaggaagctcttgatttcatcaaacgccaagcgcggcaccatcctttctttctgtactgggcagtggacgcgacccatgctccagtgtacgcgtcaaagccatttctggggacctcgcagcggggtcgctacggtgacgcggtgagagagattgacgattctattggtaagatccttgaactcctccaggaccttcatgtggcagataacacctttgtgttcttcacttccgataatggagcagcacttatttccgcacctgaacagggtgggagtaatggaccatttctttgtggtaagcagaccacctttgaggggggaatgagggaaccagccctggcctggtggcctgggcatgtgaccgcaggccaggtgtcccatcaactgggctccatcatggatctctttaccacgtcacttgcattggcggggttgaccccacccagcgatagagccattgacggcttgaatcttcttccaactctcctccaaggccgccttatggacaggcctatcttttactaccgaggagatacgctcatggccgcaaccttgggacaacataaagcccatttctggacttggactaattcgtgggaaaactttagacaaggaatcgatttttgtccgggacagaacgtgtctggcgtgactacgcataacctcgaggatcacaccaaactgcccttgattttccatctggggcgggaccctggcgagcggttccctctgtcctttgcctccgccgagtaccaagaagctctgtcccgaatcacgtccgtcgtgcaacagcaccaagaggccctggtgccagcgcaaccacagctgaatgtctgtaattgggccgtgatgaactgggcgcctcccggatgtgaaaaacttggaaagtgccttactccacctgaatctattcccaagaagtgcctctggagccat

SEQ ID NO: 12019 - DNA, 1566 bp, synthetic construct
  misc_feature 1..1566: note = source = /note="Description of Artificial Sequence: Synthetic coding sequence"
  source 1..1566: mol_type = other DNA
atggccgccgtggtggccgccacacgctggtggcagttgctgctagtcttgagcgcagcgggcatgggcgcgtcaggagcaccgcagccacctaatatcctgctcctgctgatggatgacatgggctggggcgacctgggggtctatggggaacccagtcgggagacacctaacctagatagaatggctgccgagggtcttctttttcccaacttttattcggcaaaccccctgtgctcgccatccagggctgcccttcttaccggaaggctgcctattaggaatggattctacaccacaaacgcccacgccaggaacgcgtataccccccaggaaatcgttggcggaatccccgactctgagcagcttctgcccgaactgcttaaaaaggccggctatgtatccaaaatagtcgggaagtggcacctcggccacaggccccagttccatcccctgaaacacggattcgacgagtggttcggcagcccaaactgtcactttggcccctatgataataaggctagacctaacattccggtctacagagactgggaaatggtggggaggtattacgaggaatttccaatcaacctgaaaacaggagaggctaacctgacccaaatctacttacaggaggccttagatttcataaaacgtcaggctcgacaccatcccttctttctgtactgggcggtcgacgctacacatgcaccagtatatgccagcaaaccctttctgggcacatctcaaagaggtaggtacggagatgccgtgcgtgagattgacgattcgataggcaagattctagaactcctgcaggatctgcacgtagctgataatacatttgtgtttttcacttctgataacggcgctgccctgatcagtgccccagagcaggggggctcaaacggcccctttctgtgtggcaagcagaccacctttgaaggaggtatgcgcgagccagccctggcttggtggccgggacatgtaacggccggtcaagtgtcccatcagttggggtctataatggacttattcactacctccctggccctcgctggcctgacacccccatctgatagggccatagatggcctgaacttgctcccaaccttactgcagggtcggctgatggataggcccattttctattaccgaggtgacacactaatggctgcaactctgggtcagcacaaggctcacttttggacctggacaaactcttgggaaaacttcaggcagggcatcgatttttgtcccgggcaaaacgtgtctggggtgacaacccacaatttggaagatcataccaagctcccgctcatctttcatctgggtcgagacccaggggaacgattcccactgagcttcgcttcagccgaataccaggaagctctgtccaggattacttcggtcgtacaacagcaccaggaagcgctggttcccgcccagccacagcttaacgtgtgcaattgggcggtcatgaactgggctcctcccggatgcgaaaaattaggaaagtgtttaacaccccccgagtctattcctaagaaatgtctgtggtcacat

SEQ ID NO: 12020 - DNA, 1566 bp, synthetic construct
  misc_feature 1..1566: note = source = /note="Description of Artificial Sequence: Synthetic coding sequence"
  source 1..1566: mol_type = other DNA
atggcggctgttgtggccgccacccgctggtggcagctgttgttggtgttgtccgccgctggcatgggcgcaagcggcgcaccacagccgcctaatatcttgttgctgttgatggatgatatgggctggggagacctaggcgtctacggcgaaccgagccgcgagacgccaaacctcgatcgaatggccgcggaaggtctgctgttcccgaacttctactcagccaacccactttgtagcccctcccgagcggcgcttctgaccggccgcttgcccattcgaaacggattttacacgaccaacgcgcacgccaggaatgcgtacacgccgcaggagattgtggggggaataccggattcggagcagctactaccagagctgctgaagaaggctggctacgtatcaaagattgtgggcaagtggcatctgggacaccgtccccagttccatccccttaagcatgggtttgacgagtggtttggatccccgaactgccacttcggcccttacgataacaaggcacgcccaaatatcccggtgtaccgcgactgggagatggtcggacgttattatgaggagttccccataaatctaaagaccggcgaggcaaacctcactcagatttatttgcaggaagccctggacttcatcaagaggcaagcacgacaccaccccttcttcctgtactgggccgtggacgccacacacgccccggtctatgctagcaagccgttcctgggcaccagccagaggggtcgctacggtgatgcggtgcgcgaaatcgatgattccattggcaagatcctggagctgcttcaagacctgcacgtggccgataatacctttgtattcttcacaagtgataatggtgctgccttgatttccgcaccggagcagggtggctcgaatggaccgtttctgtgcggcaagcagaccacgttcgaagggggcatgagagagcctgcccttgcgtggtggcctggtcacgtgacggcgggccaggtaagccaccagctgggatcgattatggacctgttcacgacatctctggcgctcgccggcctgacccccccaagtgaccgagccatcgacggcctgaatttgttgccgacacttctgcaaggtaggctgatggatagaccaatattttactaccggggcgatacgcttatggccgccactctgggccagcataaggcccatttctggacatggacaaattcttgggagaacttccggcagggcatagatttttgccccggccaaaacgtttccggcgttactacacacaacctagaggaccatacaaagttgcccctcattttccatctgggccgcgaccccggtgaaagattccccctgagtttcgcgtctgccgaatatcaagaggcgctgtccaggattacgagtgtagtgcagcaacatcaggaagccttggtaccggcacaaccgcagctaaacgtgtgtaactgggcagttatgaattgggccccacccggttgtgagaagttgggcaaatgcctgacgccgcctgaaagcatacccaagaagtgcctgtggtcgcac

SEQ ID NO: 12021 - DNA, 1566 bp, synthetic construct
  misc_feature 1..1566: note = source = /note="Description of Artificial Sequence: Synthetic coding sequence"
  source 1..1566: mol_type = other DNA
atggctgcggtggtggctgccactaggtggtggcagctcctattagtgctctctgccgctggcatgggggcttctggcgcaccacagccccccaatatcctgctgctactcatggatgatatggggtggggtgacctgggtgtgtacggcgagccttcaagagagacacccaacttggatcgcatggctgctgagggcttattgtttccaaatttttattcagcgaatccgctgtgttctccctctagagctgcattactgaccggcagattgcctataaggaacggcttttacactacgaacgctcacgccaggaatgcctatacaccacaggagattgtgggaggtatccccgattcagagcagctgctgcctgagctgctgaagaaggcgggttatgtctcaaaaatcgtcgggaaatggcatctcgggcaccggccacagtttcacccactgaagcacggcttcgatgagtggttcggcagccctaactgccacttcggcccttacgacaataaggcacgcccgaacatcccggtgtatcgggactgggagatggtgggccgttattatgaagagttccccattaacctgaaaaccggggaggccaatctgacccagatctaccttcaggaagccttggattttataaagaggcaggcccgacaccatccttttttcctgtactgggcagtggacgcaacacatgccccagtttacgcgtcaaagccctttttgggaacatctcaaaggggtaggtatggagatgccgtaagagagatagacgattcgattggcaaaattcttgaactccttcaggatctgcacgttgcggacaacacctttgtgtttttcacatccgataatggagctgccctaatcagcgcccctgagcagggaggaagcaatgggcccttcctgtgtggaaaacagacgaccttcgagggggggatgagagagccggcgctggcatggtggcccggccatgtgactgctggccaggtgtctcatcaactggggtcaataatggatctgttcacgacttctctggctctggccggattaaccccaccaagcgatagagcaatcgacggtttaaacttgctgccaacgctactacagggaagactcatggaccggccaattttttactaccgtggagacaccctgatggcagcaacactcggacagcacaaggcccacttttggacttggacaaatagctgggagaacttcaggcagggaatcgatttctgtcccggccagaacgtgagcggagtcacaacccacaatttggaagatcacacaaaactgcctctcatctttcacctagggcgcgacccgggagaaaggttccccttgagcttcgccagcgcggagtatcaggaagcactgtctcgcatcacctctgtggtgcaacagcatcaagaagcactcgtgcctgcgcaaccccaactgaacgtctgcaattgggctgtaatgaactgggcccctcctggatgcgagaaactcggcaagtgcttgacccctcctgagtcaatcccaaaaaagtgcttgtggtcacat

SEQ ID NO: 12022 - DNA, 1566 bp, synthetic construct
  misc_feature 1..1566: note = source = /note="Description of Artificial Sequence: Synthetic coding sequence"
  source 1..1566: mol_type = other DNA
atggccgccgtagtcgccgcgacgcgctggtggcagcttctcttggttctttccgcggctggtatgggagcctcaggcgcccctcagcctcccaacattttgctgctgctgatggacgacatgggctggggagatctgggtgtatacggtgagccttctcgcgagacccccaatttggataggatggccgctgaaggtttgcttttccccaacttctattctgcaaacccgttgtgctcaccctcaagagccgctctgctgactggaaggctgccgattaggaatggcttctacaccacaaatgcccacgccagaaacgcctatacccctcaggagatagtaggtggaatcccagatagtgaacagctgctccccgagttgctgaaaaaagccggttatgtcagtaagattgtgggcaagtggcaccttggccacagaccgcagtttcatcctctgaaacatggcttcgacgagtggttcggcagtcccaattgccacttcggcccttacgacaacaaagcacgccctaatatcccagtataccgcgattgggagatggttggacgctattatgaagaattccctattaatcttaagacgggagaagccaatttgactcagatctacttgcaggaagctctggactttatcaaaagacaggctcgccaccaccctttcttcctgtattgggcagtagacgcaacccacgctccagtgtacgcttcaaagcctttcctgggtacttctcagcgcggtaggtacggagacgctgtgagagagatcgacgatagcatcggtaaaattctcgaactgctgcaggacctgcacgtggccgataatacttttgtttttttcacttcagataacggtgctgctctgatcagcgcgccagaacagggaggctcaaatggtcccttcctgtgtggaaaacagaccacttttgagggaggtatgcgcgaacccgctctggcatggtggcccggccatgtcactgccggacaggtatcccaccagctcggttctatcatggatttgttcaccacatcattggctctcgcgggattgactccccccagtgatcgcgcaatcgatggtcttaaccttttgccgacgctcctccagggtagacttatggacagacccatcttctactaccgcggtgacactcttatggcagcgaccctgggacagcacaaggctcacttttggacgtggactaactcttgggagaatttccgccaaggaattgacttctgcccgggccagaatgtaagcggcgtgacaacgcacaatttggaggatcacactaagcttcctctgatctttcatctgggaagggacccgggagagcgcttccccctctccttcgcctccgctgaatatcaggaagctctgtctagaattacgagcgttgtgcagcaacatcaggaggccctggtcccagctcagcctcagctgaacgtgtgtaactgggcggtcatgaattgggcgccgcccggctgtgaaaagttgggtaagtgtcttaccccaccggagtctatccctaagaagtgcctgtggagtcac

SEQ ID NO: 12023 - DNA, 1566 bp, synthetic construct
  misc_feature 1..1566: note = source = /note="Description of Artificial Sequence: Synthetic coding sequence"
  source 1..1566: mol_type = other DNA
atggcagcggtggttgccgcaacccgttggtggcagctgcttctcgtgctgtccgccgcaggaatgggagcttcgggggcaccacagccaccaaacattctccttctcctcatggacgacatgggctggggggatctgggagtgtatggcgagccgtcaagggaaacccccaacctggataggatggcggccgaaggcctactctttcccaacttttattccgctaacccgctctgttcccccagcagggcagccctcctgaccgggcgcctccccattcgtaacggcttttacactacaaacgcccatgcgcgaaatgcgtatacgcctcaagagatagtgggcggcattcctgacagtgagcagctcctcccagagctcttaaaaaaagctgggtatgtgtccaagatagttggaaaatggcatttgggccacaggccccagtttcatccgctgaagcacggtttcgacgaatggttcgggtctccaaattgccatttcggcccatatgacaacaaggcccgccccaacatcccagtttacagagattgggaaatggtaggtagatattatgaggagtttcccattaatctgaaaactggggaggcaaatctgacacaaatatatctgcaggaagcattagatttcattaaacggcaagcccggcaccaccccttttttctttattgggcagtggatgcaacccatgcgcccgtgtatgcctccaaaccttttttggggacatcccagcggggacgatacggggatgcagtccgcgagattgatgattctatcggcaagattctcgagctcctgcaggatctccacgttgctgacaatacattcgtctttttcactagtgacaacggagccgccctgatctccgccccagaacaggggggcagcaatggacctttcctatgcggaaagcaaactaccttcgaaggcggtatgcgagagccagctctcgcctggtggcctggccatgtgacagcagggcaggtaagccaccagctcggctcaatcatggacctctttactacctccttggcccttgccgggctgactcccccctctgaccgagctatcgatggtcttaacttactgcctaccctattacagggtcggctcatggacaggcccatcttctattacagaggtgacactcttatggcagcaaccctcggccagcataaggcacatttttggacgtggactaattcctgggagaatttccgccaaggcatcgatttctgccccggacagaatgtgtcaggagtaacaacgcacaatttggaggaccacaccaaactacccctcatctttcacttgggtagagacccaggcgagcggtttccactttctttcgctagtgcggagtatcaggaggccctgtcaagaattacctcagtcgttcagcaacaccaagaggctctggtgcctgcccagccgcaactgaacgtatgtaactgggcagtgatgaactgggctcctcccgggtgtgaaaaactgggcaaatgtctgactccacccgaaagcatccctaaaaagtgcctgtggagccac

SEQ ID NO: 12024 - DNA, 1566 bp, synthetic construct
  misc_feature 1..1566: note = source = /note="Description of Artificial Sequence: Synthetic coding sequence"
  source 1..1566: mol_type = other DNA
atggccgcggtggtggcagcaacgaggtggtggcaactcctgctggtactgtctgcagcgggaatgggggccagcggagctccccaaccccccaacatactccttctgctgatggacgacatggggtggggtgatttgggcgtgtatggtgagccgagccgcgagacaccgaacttggacaggatggccgccgaaggccttctgttccccaacttttatagtgcaaacccactttgtagcccgtcaagagccgctctcctcacaggccggcttcctatccgcaatgggttttatacaaccaatgctcacgctaggaatgcttacaccccgcaggaaatcgtggggggcattcccgacagtgagcagctgctgcctgaactgctgaaaaaggcaggctacgtgtctaagatagtgggaaagtggcatctcggacatagacctcagtttcatcccctgaagcacggctttgatgaatggtttggatcccccaattgtcatttcggcccctacgataacaaggctaggccaaatattccagtgtatagagactgggaaatggtgggccgctactatgaggagtttccaattaacttgaaaacgggtgaagctaacctgacccagatttacctgcaggaagcactcgatttcatcaagcggcaggcccggcatcacccattcttcttgtattgggcagtggatgctactcatgctcccgtgtatgcctcaaaaccttttctcggcactagtcagcgcgggagatacggtgacgccgttcgcgaaatcgatgatagcatcggaaagatcctggagcttttgcaagacctccacgtggcagataacacctttgtgttctttacttccgataacggtgccgcactgatctctgctcccgagcaagggggctccaatggtccattcttgtgtggcaaacagacgacattcgagggcggtatgagggaacctgctctggcgtggtggcctggtcacgtgactgccggacaggtatcccaccaactcggcagcataatggacttgtttacgaccagcctggcattggccggactgacccccccttctgaccgcgcaatagatggccttaacctcctgcctaccttgctccaggggcggctgatggaccggcccattttttattaccggggagacactctgatggcagcaacactcggacagcacaaggcccacttctggacctggacaaactcttgggagaacttcagacagggcatcgatttctgcccagggcaaaatgtgtccggcgtcacaacacacaacctggaggatcacactaaactgccactgatatttcatcttggaagagatccgggggagaggttccctttgtcatttgcttccgccgaataccaggaggccctctctagaatcacctccgtggtgcagcagcaccaggaagctttggtgccagctcagccgcaactgaacgtgtgcaactgggccgtgatgaattgggcccctccaggttgtgaaaagctgggaaaatgcctcacacccccagaaagcattccaaaaaagtgcctctggagccac

SEQ ID NO: 12025 - DNA, 1566 bp, synthetic construct
  misc_feature 1..1566: note = source = /note="Description of Artificial Sequence: Synthetic coding sequence"
  source 1..1566: mol_type = other DNA
atggccgccgtagtggccgctacgcgctggtggcaattactcctcgtgcttagtgccgccggcatgggagcctcaggtgcgccacaaccaccaaatattttgctactgttaatggacgacatgggctggggcgacctcggggtgtatggtgaacccagtcgcgagactccgaacttggatcggatggcagcggaggggctcctgttcccaaacttttattctgccaacccactgtgtagtccgtctagggcggctcttctcacaggacgcctaccaattcggaacggattctacaccaccaacgcacatgcccgcaacgcatacactccacaagagatcgtgggaggtatccccgactctgagcagctcttgccggagttattgaaaaaggccggatatgtgtcaaagatcgttggcaaatggcatttgggacacaggccccaattccatccgttgaagcatggctttgacgagtggtttgggtccccaaactgtcatttcggtccttacgataataaggcccgccctaacatacccgtttacagggattgggagatggtaggcagatattatgaggagttccccataaacctcaaaacaggagaggctaaccttacacagatttacctgcaagaagccctggacttcatcaagcggcaagccaggcatcaccccttttttttgtactgggcggtcgacgccacgcatgcacccgtctatgcttccaagcctttcctgggaacctcccagcgcggacgctatggagacgcggtcagagaaatcgacgacagcattggaaaaatcttggagctgctccaagaccttcatgtcgccgataatacgttcgtatttttcacctccgacaatggcgccgcattgatcagcgctcctgagcaagggggtagtaacggtccttttctctgcggcaaacagacaactttcgagggaggcatgagagaaccagctctggcatggtggccaggccacgtgacagccggtcaggtgagtcaccagttgggcagcatcatggacctatttaccacctcacttgcacttgcgggcctgacccctccaagcgaccgggccatcgatggcctgaacctactgccaactctccttcagggcaggttgatggaccgaccaatcttttattacaggggcgatactcttatggccgccactctgggccaacataaggctcacttttggacctggactaatagctgggagaattttagacaaggaatcgacttctgccctgggcagaatgtctccggggttacaacacacaacctggaagatcacaccaagctgccattaattttccacctggggcgcgatcccggagagaggtttcccctctcattcgcatcagctgaataccaggaagcactgtcgaggatcacgagtgtggtacagcagcaccaggaggcactcgtgccggctcagccccagctgaatgtgtgtaactgggccgtgatgaattgggcgccacccggatgcgagaaactgggcaagtgcttgacaccccccgaaagcatccctaaaaaatgcctgtggtcccac

SEQ ID NO: 12026 - DNA, 1566 bp, synthetic construct
  misc_feature 1..1566: note = source = /note="Description of Artificial Sequence: Synthetic coding sequence"
  source 1..1566: mol_type = other DNA
atggcagccgtggtggccgctactcgctggtggcagcttttgctcgtgttgtctgctgctgggatgggagcaagcggtgcaccacagcctcccaacatcctgctccttctcatggacgatatgggatggggtgaccttggtgtatacggtgagcccagccgagaaaccccaaatctggatagaatggcggctgaaggactactgtttccaaacttttacagtgccaaccccttatgctctccaagtcgcgccgcattgctcacaggtcgtctcccgattcgcaacggtttctacacaactaatgcacatgcaagaaatgcatacacacctcaggaaatcgtgggcgggatccccgacagcgagcagcttctgcctgagctgctgaaaaaggcgggctatgtgtctaaaattgtcggcaaatggcacttgggccatagaccacaattccaccctctgaagcatggcttcgatgagtggttcggctcaccaaattgccactttggaccatacgataataaggccagacccaatatccccgtctaccgcgactgggaaatggttggccgctactacgaggaatttcccatcaatctgaaaacaggcgaagcaaacctgacccagatatatttgcaggaggctttggattttatcaagcggcaggcaaggcatcaccctttcttcttgtactgggccgtagacgccacacacgctcctgtatacgcttcaaaacctttcttggggacgagccagcgggggcggtatggggatgccgtccgcgagatagacgattccattggcaagattttggaacttctgcaggacctccatgttgcagataatacttttgtgtttttcacttccgataacggtgctgcattgatttccgcgccagaacagggcggatctaacggcccatttctttgcgggaagcagacaacattcgaaggcgggatgcgggagcctgccctagcctggtggcccggccacgtgaccgcgggtcaagtttctcatcagctgggttcgataatggacctgtttacaacgagtctggccctcgccgggcttaccccaccgtccgatcgagccatagatggtcttaatctcttgcctaccctcctgcagggtcggctgatggatagaccgatattttattaccgcggggacaccttaatggccgcgaccctcggacagcataaggcccacttctggacttggacgaattcctgggagaactttagacagggtattgacttctgccccggacagaacgtgagtggtgtgaccacccacaatctggaagatcacactaagctcccacttatatttcacttgggccgggatcccggagagcgctttcctctgtcatttgcttctgcggagtaccaggaagccctctccagaattacgtccgtggttcagcagcaccaggaagcgctggtccccgcacaaccacaacttaacgtatgcaactgggccgtgatgaactgggcgcccccaggctgtgaaaagcttggcaagtgtttgacaccacctgagagtatcccgaaaaaatgcctctggagccat

SEQ ID NO: 12027 - DNA, 1566 bp, synthetic construct
  misc_feature 1..1566: note = source = /note="Description of Artificial Sequence: Synthetic coding sequence"
  source 1..1566: mol_type = other DNA
atggccgccgtggtggcggccactcggtggtggcagctgctgctcgtactgagcgcagccggaatgggagcgtcgggcgctccgcagccacccaacatcttgctgttgctgatggatgacatgggatggggcgatctcggggtgtacggagaaccatcccgggaaaccccgaacctggaccgtatggcagccgagggcttgctgtttccgaacttttattcagccaacccactgtgttctccttcccgcgccgccctgctcaccggtcggcttccaatccgcaacggattctacaccaccaacgcccatgctcgcaacgcatacaccccacaggagatcgttggaggtattccggacagcgaacaattgctgccggagctcctgaagaaggcaggctacgtctcgaagatagtgggaaaatggcaccttgggcaccgcccccagtttcacccccttaaacatggcttcgacgagtggtttggcagccctaactgccacttcgggccgtacgacaacaaggcgaggccaaatatcccggtttacagggactgggaaatggtcggacggtactacgaagaattcccaatcaaccttaagacgggggaagcgaacctgacccagatctacctccaagaggccctggacttcatcaaacggcaggcacgccatcacccattcttcctgtactgggccgttgacgcgactcacgcgccagtctacgcctccaagcccttcctgggcacgtcgcaacggggccgctacggggatgccgttagagagatcgacgacagcatcgggaagatcctggagctcctgcaggacctccacgtggccgataatacgttcgtgttcttcacttcagacaatggagcggctctgatctccgccccggaacaaggtggatcgaacggaccattcctgtgcggaaagcaaactacttttgaaggaggaatgcgagagcctgccctcgcttggtggccgggtcatgtgactgcaggacaggtcagccatcaattgggtagcatcatggatctgttcacgacctcgcttgccctggcggggctgaccccgccctcggaccgtgccatcgatgggctcaacctgcttccaactttgctccagggccggctgatggataggcctatattctactatcgcggcgacaccctgatggcggccaccctgggacaacataaggcacacttttggacttggaccaattcttgggagaatttcagacagggaattgatttctgcccgggccagaatgtctcgggagtcactactcataatctcgaggatcacaccaaactgccactgatttttcacttgggccgggaccctggcgaacggttcccgctttcgtttgcatcagccgaataccaggaagccctcagtaggatcacctctgtggtgcagcaacatcaagaggcgttggtcccggcacagccacagctgaatgtctgcaattgggctgtcatgaactgggcgccgccgggatgtgaaaagctcggaaaatgccttacccctccagagtccatcccgaagaagtgcctgtggagccac

SEQ ID NO: 12028 - DNA, 1566 bp, synthetic construct
  misc_feature 1..1566: note = source = /note="Description of Artificial Sequence: Synthetic coding sequence"
  source 1..1566: mol_type = other DNA
atggctgccgtggtggcagccacccggtggtggcagctcctgctggtgctgagcgcagcgggtatgggggcgtcaggcgccccgcaaccgccgaatatactcctgttgctcatggatgacatgggttggggagatctcggtgtatacggcgaacctagcagggaaaccccaaacctggatagaatggccgccgaaggtctgctcttcccgaacttctattcggctaacccactgtgtagcccgtccagggccgcgctgctgacgggacgtctccccatccgcaacggattctacaccactaacgcacacgctaggaatgcttacactccccaagagatcgtcggtggcatcccagactcggagcagttgctgcccgagctgctgaagaaagcagggtacgtgagcaagatcgtgggcaagtggcatctcggccaccgccctcagtttcatccgttgaaacacggattcgacgagtggtttgggtcaccaaattgtcactttggtccttacgacaataaagctagaccgaacatcccggtgtacagagactgggagatggtcgggcggtactatgaggaattcccgattaacctgaaaacgggcgaggcgaatctgacccaaatctacctgcaggaagcactggacttcattaagcgccaggcccgccatcacccctttttcctgtactgggcggtcgacgctactcacgcgccagtgtacgcttccaagccattcctgggaacctcgcaacgcggacgatacggagatgctgttcgcgaaatcgacgatagcatcgggaagatactggagctgctgcaagatctccatgtggcagataacaccttcgtgttcttcaccagcgacaacggagcagccctcatctccgcgccggaacagggaggaagcaacggacctttcctttgcgggaagcagactacttttgaaggggggatgcgggaacctgccctcgcgtggtggcccggccacgtgaccgccggacaagtgtcgcaccagcttggatctatcatggacttgttcactaccagcctggcgctggccggacttactccaccctctgaccgcgccatcgatggtcttaacctgcttccgaccttgcttcaaggtcggctgatggatcggcccattttctattacaggggagacaccctcatggctgctacgctgggccaacataaagctcatttctggacctggacgaactcgtgggagaacttccgccagggaatcgacttctgccctggccagaatgtgtcaggtgtaaccactcacaacttggaagatcatactaagctgccgctgatctttcacttgggaagagatccgggagaaagatttcctctgtccttcgcctccgcggagtaccaggaggcactgtcaaggatcacctccgtggtgcagcagcatcaggaagccctggtcccggcccagccgcagcttaacgtgtgcaattgggccgtgatgaattgggcacctcccggatgcgaaaaacttggcaagtgtctcactccacctgaaagcatcccaaaaaagtgcctgtggtcccac

SEQ ID NO: 12029 - DNA, 1566 bp, synthetic construct
  misc_feature 1..1566: note = source = /note="Description of Artificial Sequence: Synthetic coding sequence"
  source 1..1566: mol_type = other DNA
atggccgccgtcgtcgcagctacacggtggtggcaactcctactggtactttccgctgctgggatgggcgcctctggcgccccacagccaccaaacatcctcctccttctgatggacgacatgggctggggcgatctcggcgtctacggagaaccctctagagagaccccaaatctcgaccgcatggctgcagagggcttgctgtttccaaacttctactcagctaatccactctgttcaccatctagggcggctctcctcactggcaggcttcctatcagaaatggcttctacacaactaacgcacacgcgagaaacgcttacacaccacaggagattgtcggaggaattcccgactccgaacaactgctgcctgagttgctgaaaaaagccggctatgtcagcaagatcgtcgggaagtggcacttgggacaccgcccacaattccaccctctcaagcatggattcgacgagtggttcgggagccctaactgccactttggcccctacgataacaaggcaaggccaaatataccagtctacagagactgggagatggttggcaggtactacgaggagtttccaatcaacttgaaaacaggagaagccaacctgacccagatatacctccaggaagctctggatttcattaagaggcaggctaggcaccatccatttttcctttattgggctgtcgatgcaacccacgctccagtgtacgctagtaaaccctttctgggaacgagccagaggggtcggtatggcgatgctgtgagggagatcgacgactccattggcaagatattagagctgcttcaagacctgcacgtcgcagacaacacattcgtgttttttacaagcgataacggcgccgctcttatatcggctcccgaacagggcgggtcaaacggaccattcttgtgtggcaagcagactacgttcgaggggggaatgagggagcctgcactggcatggtggcctggccatgttactgcaggccaagtttcccatcagctggggtctatcatggatttgtttacaacgagtcttgcactcgcaggcctgactcctccctctgaccgagctatcgacggcctgaacctcctcccaacactgctgcaaggacgcctcatggatcgccctatcttctactatagaggggacacacttatggccgccaccctggggcagcacaaggcacacttttggacatggactaattcgtgggagaacttccgccagggtatcgacttctgccctggccaaaacgtcagcggtgtcactacacacaacttagaagatcataccaagctgcctctcatctttcatctcggacgcgatcccggagaaagatttccattgagcttcgcatctgctgaataccaagaggcattgagccgtataactagcgtggttcagcagcaccaggaggcgctggtccccgctcaacctcaactcaacgtttgcaattgggcagtaatgaactgggctccacccggatgtgagaagctgggaaagtgcctgacccctcctgagagcatccctaaaaaatgcttgtggtcgcac

SEQ ID NO: 12030 - DNA, 1566 bp, synthetic construct
  misc_feature 1..1566: note = source = /note="Description of Artificial Sequence: Synthetic coding sequence"
  source 1..1566: mol_type = other DNA
atggccgccgtcgtggctgccacaaggtggtggcagctactccttgtgctatctgcagcagggatgggcgctagtggagctccacagcctcctaatattctgctcttgctgatggatgacatgggatggggcgatcttggtgtttatggcgaaccttcccgggaaactcctaacctcgatcgcatggctgccgagggcctcctgtttcccaacttttattcggccaatcccctctgcagtccctcccgcgccgcactcttgaccggcagacttccaatccgcaatggtttttataccaccaatgctcatgcgcggaatgcatatacaccccaggagattgtgggaggcattccggatagcgaacagttgctccctgagttactaaaaaaggctggctatgtgtcaaaaattgtagggaaatggcacctcggtcaccggccgcagttccatccacttaaacacggcttcgacgagtggtttggctctcccaactgtcatttcgggccctacgacaacaaagcccgcccaaacattccagtgtacagggactgggaaatggtgggaagatactatgaggagtttcccatcaatctaaaaaccggcgaggccaacctcacacagatctatctgcaagaggcattggattttataaaaagacaggctcgccaccatccatttttcctgtattgggcggtggatgccacgcacgcacctgtctacgcctctaaacctttcctgggcacatcgcagagagggaggtacggagacgccgttcgcgagatcgatgacagcattggtaagatactcgagttgctccaggacctgcatgtggcagacaatactttcgtgttttttacatccgacaatggcgcagccttgatcagtgctcctgagcagggggggtcaaacggcccattcctatgcgggaaacaaaccaccttcgaaggcggcatgcgcgaacctgccttggcctggtggccgggtcacgtcaccgcgggtcaggtatcccatcagctggggtcaatcatggacctttttacgacctccctggcactggccgggctgacgccaccgtccgaccgggccattgacggactcaacctgctgcccactcttcttcagggacgcctgatggatcggccgatcttttactacagaggggacacgctcatggccgctacacttggacagcacaaggcgcatttttggacctggacaaactcctgggagaatttcagacaaggcattgacttctgtcccggccagaatgtatccggggtgactacacacaatctggaggaccatacaaagctgccactgatttttcacctcggtagagatccaggagagcggttccccctgagcttcgccagtgcggagtatcaggaggccctgtctcgaatcacttcagttgtacagcagcaccaggaggctttagtgcccgcgcagccgcaattgaacgtgtgtaactgggccgttatgaactgggcccctcccggatgcgaaaaactcggtaagtgcctgacccctccagaaagcataccgaagaaatgcctgtggagccac

SEQ ID NO: 12031 - DNA, 1566 bp, synthetic construct
  misc_feature 1..1566: note = source = /note="Description of Artificial Sequence: Synthetic coding sequence"
  source 1..1566: mol_type = other DNA
atggcagccgtggtcgccgcgaccaggtggtggcaacttctgctggttctgtccgcggcgggcatgggtgcgtccggcgccccacagcctccgaacatcttgctcctgctgatggatgatatgggttggggggacctcggcgtatatggagaaccctccagggaaactccaaacctggacaggatggccgcggagggcctcctcttccccaacttctattcagcgaatcccctgtgctctccttctagggcagctttgctcaccggtcggctgcctatacgaaatggcttctatacaacaaacgcgcatgctaggaatgcctacaccccacaggagatagtcggcggcatacctgattcagagcagctgctgcccgagctcctgaaaaaagcaggatacgtctccaagatcgtgggaaaatggcatctcgggcaccggcctcagtttcatcctctcaagcacggattcgacgagtggttcgggagtcccaattgtcacttcggtccgtacgataacaaggctagaccgaatattccagtttacagagactgggagatggttggaagatactacgaggagttccctattaacctgaaaacaggagaagccaatctcacccagatctaccttcaggaggccctggacttcattaagcggcaagccaggcatcacccgtttttcctgtactgggctgtcgacgccacccacgctcccgtttacgcctccaaaccattcctgggaacgtcccagagaggcaggtacggcgacgccgtccgggagattgatgacagtataggcaagatcctggagctgctccaagacttgcacgtagctgataacacgttcgtgttttttaccagtgacaacggcgccgctctgatctccgcgccagagcagggaggaagcaatgggccgtttctctgcggcaaacaaacaacattcgaaggaggtatgcgcgagcctgccctggcttggtggcccggccatgtgactgcgggtcaagtaagccatcaacttggctccataatggatcttttcaccacttccctggctctggctggccttacacctccctccgatagagctatcgacggcctgaacctcctcccgactcttttgcagggccgcctgatggacagacctatattctactatcgaggagacacactcatggccgccacacttggtcagcataaggcccacttttggacctggacaaactcttgggagaattttagacagggtatcgacttttgtcccggacagaatgtttctggggtcaccacccataacctggaagaccacacaaagctgccgctgatattccaccttggcagggatccaggtgaaagattccccctcagttttgcaagtgcagaatatcaggaggctctttctaggatcacctctgtggtgcagcagcaccaggaggccctcgtccctgcacagccccaactgaatgtctgtaattgggccgtgatgaattgggcacctccaggctgtgagaaactggggaaatgccttactccacccgagtctatacctaagaaatgcctttggagccat

SEQ ID NO: 12032 - DNA, 1566 bp, synthetic construct
  misc_feature 1..1566: note = source = /note="Description of Artificial Sequence: Synthetic coding sequence"
  source 1..1566: mol_type = other DNA
atggctgctgtggtcgccgccacacggtggtggcagttgctgctcgtactctccgctgctggcatgggagcctctggcgccccacaaccccctaatattctcctcctcttaatggacgacatgggctggggagacttaggcgtttatggagaaccaagcagggagactcccaacctggaccgtatggcagccgagggattgctttttccaaacttctatagcgcaaaccccctctgctccccatcccgggctgctctcttaactggtcgccttcccataagaaatggcttttatactaccaatgctcacgcgcgcaacgcctatacaccccaagaaatcgtgggtggcatcccagattcggagcagcttcttccagaactcctgaagaaggcagggtatgtctcaaagatcgtgggtaagtggcatctgggccataggccacagtttcatccactgaagcatggattcgatgaatggttcggcagccccaattgtcactttggtccatatgataataaagcccgccccaatataccagtctatcgtgactgggagatggtcggaaggtactacgaggaatttcctataaatctcaagactggcgaagccaatttgactcagatatacctgcaagaagccttagatttcatcaagaggcaggcgagacaccaccccttcttcctgtactgggcggtcgatgctacccatgcacctgtttacgcctcaaagcccttcctgggaacctcacagcgcggcaggtacggggacgcggttcgagaaatcgatgattcaattgggaagatcctcgaactcctccaagacctccatgttgccgacaatacattcgtctttttcacaagtgacaatggagccgctttaattagtgcccccgaacagggggggtccaacggaccattcctgtgcggaaagcagaccacattcgaaggtggaatgcgcgagcccgccttggcctggtggcccggccacgttaccgcaggccaggtgagccaccagttggggtccataatggatttattcactacatctcttgcgctggccggcctaactcctccgagtgacagagccatcgatggtctgaatctactccccacactcctgcaaggccgcctgatggacaggcccattttctattaccgcggggacacattgatggctgccaccctgggccagcataaggcccatttctggacatggaccaactcgtgggagaactttcggcaggggattgatttttgcccgggtcagaatgtcagtggcgtgacgactcacaatctggaggatcacacaaaattgccattgatttttcatctgggccgggatcccggcgaacgatttccactctctttcgcaagcgctgagtatcaggaggcactgagtcggatcacctcggtggtgcaacagcatcaagaagcactagtgcccgcacagccccaattgaatgtgtgtaactgggctgtgatgaactgggctcccccgggctgtgagaagctgggaaagtgtctaacccctccagagtcgattcccaagaagtgtctttggagccac

SEQ ID NO: 12033 - DNA, 1566 bp, synthetic construct
  misc_feature 1..1566: note = source = /note="Description of Artificial Sequence: Synthetic coding sequence"
  source 1..1566: mol_type = other DNA
atggcagcagtggttgcagctactcgctggtggcaactgcttcttgttttgtctgcggccggaatgggagcaagcggagccccacagccgccgaatattttgctgttgctaatggatgacatgggctggggtgaccttggagtctacggtgaaccatctagagagactcctaacctggatagaatggcggccgaaggattacttttcccaaacttctatagcgcgaatcccctgtgctctcctagcagggctgctttactgacaggccgcctgcccatccgtaacgggttctataccactaacgcgcatgcgcgaaacgcatataccccccaggaaatcgtgggcggaatccctgactctgagcaactgctgcccgagctgctgaagaaggccgggtacgttagtaagatagtgggaaaatggcatttgggacacaggccgcagtttcaccctctgaaacacgggtttgatgaatggtttgggtcccctaactgtcatttcgggccgtacgacaacaaggcccgccccaacatccctgtctacagagactgggagatggtcggcagatactacgaagaattcccaatcaatctgaaaactggagaagctaacctgacccaaatttacctccaggaggccttggattttattaaaaggcaagccaggcaccaccccttcttcttgtactgggctgtcgacgctactcatgctcccgtttacgccagcaaaccattcctcggaacaagccagcgcgggcggtacggtgacgccgtgagggaaatcgatgatagcatcggaaagattttggagctccttcaggatcttcacgttgcggacaatactttcgtcttctttacctctgataatggagccgcacttataagcgcccccgagcagggaggttcaaacggaccttttttatgcggcaagcagacaacattcgagggcggcatgagggaacctgccctggcctggtggccaggacacgtcactgctggccaagtgtcacatcagctggggagcatcatggacctctttaccactagtctggcactcgcagggttgacccccccaagcgaccgcgcaatcgatggccttaatctgctgccaacactgttgcaggggaggttgatggatcgcccaatcttttactacagaggtgatacattgatggccgctacgctgggccaacacaaagcccacttttggacctggacaaactcatgggagaattttaggcaaggaattgacttttgcccgggacaaaacgtcagcggtgtgaccacccataatctcgaggaccacaccaaacttcctctgatctttcatcttggacgcgaccctggcgagcggttcccactgagttttgcatctgccgagtatcaagaggcactgagtcgcataacgagtgtggtgcagcaacatcaagaggctctggtaccagcccaacctcagcttaacgtgtgcaattgggcagtgatgaactgggccccacctggctgtgagaaacttggtaaatgcctgacaccccctgaaagcatccctaagaaatgcctgtggtctcac

SEQ ID NO: 12034 - DNA, 1566 bp, synthetic construct
  misc_feature 1..1566: note = source = /note="Description of Artificial Sequence: Synthetic coding sequence"
  source 1..1566: mol_type = other DNA
atggccgcagtcgtggcagcaacccgatggtggcaactccttttggttctgtccgcagcagggatgggagcgtctggagccccgcagcctcccaatatcctgctcctgttgatggatgacatgggttggggggatctgggggtgtacggagagccgtcgagagaaacgcctaaccttgaccgcatggcggccgaaggactcctttttcctaatttctactccgctaacccgctgtgttcgccttcccgggcggccctgcttactggtaggcttccaattcgtaacgggttctacaccactaacgctcacgcaaggaatgcatacacgccacaagaaattgtgggcggtatacctgatagcgaacagctgttgcctgaactgctcaagaaggcaggatacgttagcaagattgtgggaaagtggcatctgggtcacagaccacaatttcatcccctgaaacacgggttcgacgaatggtttggctcaccaaattgccactttggcccgtacgataacaaggccagacctaatatcccagtgtacagagactgggaaatggtgggacgctactacgaggaatttcctatcaatcttaagaccggggaagctaatcttacgcaaatctaccttcaagaagccctggatttcatcaaacgccaagcacggcaccacccattctttctctattgggccgtggacgcaacccatgcacctgtctacgcctcaaaaccattccttggcaccagccagagaggtcgctacggtgacgcagtgcgtgaaattgacgattccataggaaagattctggagctgctgcaggatctccatgtcgctgataatacttttgtgttctttacttccgataacggcgccgctctgatttccgctcctgagcaggggggcagcaacgggcctttcctgtgtggaaagcaaactacctttgaaggaggtatgcgcgaacccgcactggcatggtggcccggacacgtgactgcgggtcaagtgtcacaccaacttgggtcaattatggatctctttacgacgtcgttggcactggcaggccttaccccaccgtctgatcgcgcaatagatgggcttaaccttcttcctactcttctgcaaggtagacttatggatagacccatcttttactataggggagatacgctcatggcagcaactcttggtcagcataaggcgcatttttggacctggactaacagctgggaaaacttcaggcagggcattgacttttgcccaggtcagaacgtctcgggagtgaccacccataaccttgaggatcataccaaacttccactcattttccatttggggcgggaccctggcgaacgtttcccattgtccttcgcatcggctgaataccaagaggccttgagcaggataacttccgtggtgcaacaacatcaggaggcacttgtcccggctcagccacagctcaatgtctgtaattgggcagttatgaattgggcaccaccaggttgtgagaagctgggcaagtgtcttaccccgccagagtcgatccctaagaagtgtctgtggtcccac

SEQ ID NO: 12035 - DNA, 1566 bp, synthetic construct
  misc_feature 1..1566: note = source = /note="Description of Artificial Sequence: Synthetic coding sequence"
  source 1..1566: mol_type = other DNA
atggcagccgtggtggcagctacgcgctggtggcagctgcttctggtgctgagcgccgccggcatgggagcatctggggcgccccagcccccgaatatcctgctgctgctgatggatgacatggggtggggcgacctgggggtatatggcgagcccagccgtgagacgcccaacttggatcgcatggccgccgaagggcttctgttcccgaatttctattctgcaaatccactttgctcaccgagccgggcagctttactgacagggcgtctgccgatcaggaatgggttctatactacaaatgcccacgccaggaatgcatatactccacaagagatcgtgggtggcatccctgatagcgagcagctcctgcccgagctgttgaagaaggccggatacgtttccaagattgttggcaaatggcatctgggccaccggccacagtttcatccgctgaaacacgggttcgacgaatggtttggaagtcccaattgccacttcggcccatatgataataaggcccggccaaacatccccgtgtatcgagattgggagatggtgggtaggtattacgaggagttccctattaatcttaaaaccggggaggccaacctgacccagatctacctgcaggaagcactcgattttattaagaggcaggctaggcaccaccctttcttcctctattgggcagtcgacgcaacccatgctccggtgtatgcctcaaaaccattcctgggtacaagccagagaggaaggtatggggacgcggtcagagagattgatgattctataggaaaaatcctggagttgcttcaggacctgcatgtggcagataacacgtttgtgttctttaccagcgataacggagcggccttgatcagcgcgcctgaacaggggggtagtaatgggcctttcctgtgcggcaaacagacgaccttcgagggaggcatgagggaaccagcactggcctggtggccaggacatgtcaccgccgggcaggtttcccaccagcttggaagcattatggatctattcactaccagcttggccttggccggcctgacaccccccagcgatagggccattgacggactcaatctgctccccacacttctgcagggaagattgatggaccgtcccatattctactaccgaggagacactttgatggctgccaccctgggccagcataaggctcacttctggacgtggaccaattcatgggagaactttaggcagggtattgacttctgtccaggtcagaacgttagcggtgtcactacccataacctggaagaccacactaaactccctctgatttttcacttggggcgcgatcccggagagcgcttcccgctttcgttcgcttcggctgaataccaggaggccttaagccggatcaccagtgttgtccagcagcaccaggaggccttggttcctgcccagccccaattgaacgtctgtaactgggccgtgatgaactgggcgccgccagggtgcgagaagctaggcaaatgtctgaccccccctgagtctataccgaaaaagtgcctatggagccat

SEQ ID NO: 12036 - DNA, 1566 bp, synthetic construct
  misc_feature 1..1566: note = source = /note="Description of Artificial Sequence: Synthetic coding sequence"
  source 1..1566: mol_type = other DNA
atggcagcagtcgtggccgccacccgctggtggcagctcctcctcgtgctttctgcggcgggaatgggcgcgtccggagccccccaacccccaaacattctcctgcttctgatggatgatatgggttggggcgacctgggcgtctacggtgaaccatccagagaaaccccaaacctggatcggatggcggcagagggactcttgtttcctaacttttactccgcaaatcctctgtgctccccctcacgggcagccctgctgaccgggagacttcccatacgtaacggcttttacactactaacgcacatgcacgaaacgcttacaccccccaagaaattgttggtggtataccggattccgaacaacttcttccagaactgctcaagaaagccggatacgtcagcaagattgtcgggaagtggcatctggggcatcgaccacaatttcatcctctcaagcacggattcgatgaatggtttggatcgccaaattgtcattttgggccctacgacaataaggcgaggccaaacattccagtgtacagagactgggagatggtcggaagatactacgaggagttccctatcaaccttaagaccggtgaagcaaacctcacgcagatctacctccaagaggcactcgatttcattaagcgtcaagccagacatcatccattctttctctactgggcagtggacgcaacccacgcaccagtgtacgcatcgaaacctttccttggcacttcacaaagaggacgctacggagatgccgtgcgagagatagatgactcaattggaaagattctggagcttcttcaagacctccacgtcgccgataacaccttcgtgttcttcacgtcggataacggggcggcacttataagcgcacccgaacaaggtggtagcaacggtccctttttgtgcggaaaacagactacctttgaaggggggatgagggaaccagcacttgcatggtggccaggccatgtcacggcaggccaggtgagccatcaactgggttccattatggatctctttactacgtcgctggcactggcaggtcttaccccgccttctgaccgagccatcgacggactgaaccttctcccaaccctgctgcagggaaggctgatggatagacctatcttttactaccgtggagacaccttgatggcagctacgctgggacaacataaggcacacttttggacctggacgaacagctgggaaaacttccgccagggaattgatttttgtcccggacagaatgtgagcggagtcaccacccataacctggaagatcatacgaagttgccattgatcttccatctcggacgcgatcccggggaaagatttcctcttagctttgcgagcgcagaataccaggaagcgctctcgagaatcacctcggtggtgcagcaacatcaagaggctctggtcccagcacagccgcagctgaatgtctgtaattgggcagtcatgaattgggcaccgccaggctgcgagaagctgggaaagtgcctgactcctcccgagtccataccaaagaagtgcctttggtcgcac

SEQ ID NO: 12037 - DNA, 1566 bp, synthetic construct
  misc_feature 1..1566: note = source = /note="Description of Artificial Sequence: Synthetic coding sequence"
  source 1..1566: mol_type = other DNA
atggcggcggtcgtcgcagccactcgctggtggcagctccttctcgtcttgtccgccgcaggaatgggagcgtcgggagccccgcaacccccgaacatccttctccttctgatggatgatatgggatggggggacctcggagtgtacggggaaccatcaagggaaacccccaacctcgatcgcatggccgccgaaggactgctgttcccgaatttctacagcgcgaacccgctctgctccccctcccgcgcagccctgctgactggacgcctgccaatccggaatggattctacaccactaacgcgcatgctcgaaatgcatacaccccacaggaaatcgtgggaggaatcccagattcagagcaacttctgccagaacttctcaagaaagccggatacgtgtcaaagatcgtggggaagtggcatctgggtcaccggccgcagttccacccgctcaagcacggattcgatgagtggttcggaagcccaaattgccactttggaccgtacgataacaaggcgcgcccgaacatcccggtctatcgggactgggagatggtcggacgctactacgaggagttcccgattaatcttaagactggggaagccaacctcactcagatctatctgcaagaagcgctggatttcataaagagacaagctcgccaccacccgttcttcctttattgggcggtggacgccactcacgcaccagtctacgcctctaagccattcctgggaacttctcagcgaggacggtacggcgacgctgtgagggaaatcgacgactcaatcggaaaaatcctggagctgttgcaagacctgcacgtggccgataatactttcgtgttctttacctccgataatggagctgcattgatctcggctccggaacaaggaggatcgaatggaccgtttctgtgtggtaagcagactacttttgaaggcggaatgcgcgagcctgccctggcgtggtggcccggccacgtcactgccggacaagtctcccatcaactgggcagcatcatggacttgttcactactagcctcgctctggcgggcctgacccctccatcagacagagccatcgatgggctcaacctcctgcccaccctcctccagggacgactgatggaccggcctattttctactaccgcggagacacccttatggccgccaccctgggacagcacaaggcccatttttggacctggaccaattcctgggagaatttccggcagggcattgacttttgcccaggacagaacgtctccggagtgacgactcataatctggaggatcacactaaactcccactgatcttccatctcggccgggaccccggcgagcggttcccgctgagctttgcctccgctgaataccaggaggccctgagccgcatcaccagcgtggtccaacaacaccaggaagccctggtgccagcgcaaccccagctgaacgtgtgcaactgggcagtcatgaactgggctccgcccggatgcgagaagctgggcaagtgcctgactccgcctgaatcgatcccaaaaaagtgtctgtggagccat

SEQ ID NO: 12038 - DNA, 1566 bp, synthetic construct
  misc_feature 1..1566: note = source = /note="Description of Artificial Sequence: Synthetic coding sequence"
  source 1..1566: mol_type = other DNA
atggccgccgtcgtcgctgccacccgctggtggcagctcttgcttgtcctgtcggcggcagggatgggtgcgtccggcgccccgcagcctccgaacatcctcctgcttctgatggatgatatgggctggggtgatctgggagtctacggggagccgtcacgcgaaactcccaacctggacagaatggccgcggaagggctgctgttcccgaacttctacagcgccaatcccctctgctccccttcgcgcgcagccctcctgaccggacgcctccctatcagaaacggattctacactactaacgcacatgcaagaaacgcttatactccgcaggaaatcgtgggaggcatccctgacagcgagcagcttctcccggaacttctgaagaaagcgggctacgttagcaaaattgtgggtaagtggcacctgggtcataggccacagtttcacccgctgaagcatggatttgacgagtggttcgggagcccaaattgtcatttcggcccgtacgacaacaaggcccgccccaatattccagtgtaccgcgactgggaaatggtgggacggtattacgaagaattcccaattaatctcaagaccggagaagccaatctgacccaaatctacttgcaagaagctctggacttcatcaagcggcaggcgcgccaccaccccttcttcctctactgggcggttgacgccacccatgcgccggtgtacgcttctaagccgttcctgggcacctcacagcggggccgatacggcgacgcggtgcgggagatcgacgactcaatagggaaaattctggagctgctccaagacctgcatgtcgccgacaacacctttgtgttcttcacttcagataacggagcggccctcatctcggcccctgaacaaggaggatccaacggtcctttcctctgcgggaaacaaacgacctttgaaggcggaatgagggagccagcgttggcatggtggccgggacacgtgactgcaggacaagtgtcgcaccagctgggaagtatcatggatctgtttactacttcgctggctctggcaggactgacgcccccgagcgatagagcaatcgacggacttaacctgctgccgactctcttgcagggaagattgatggataggccgatcttttactaccggggagataccctgatggccgccaccttgggccagcacaaggctcacttctggacctggactaattcgtgggagaattttcggcaaggaatcgatttctgcccaggtcaaaacgtgagcggcgtgactacccacaaccttgaggatcacaccaagctgccactcatcttccatctcggacgtgacccgggagaacgcttcccactgtccttcgcttccgccgagtaccaggaagcgctctcgcggatcacctccgtcgtgcagcagcaccaagaggcactggtcccagcccagccccagctgaatgtgtgcaactgggctgtgatgaattgggcccctcctggatgcgaaaagctcgggaagtgtctcacgccgccagagtccatcccgaagaaatgcctgtggtcacat

SEQ ID NO: 12039 - DNA, 1566 bp, synthetic construct
  misc_feature 1..1566: note = source = /note="Description of Artificial Sequence: Synthetic coding sequence"
  source 1..1566: mol_type = other DNA
atggcagccgtggtggccgctacccgctggtggcaactgctccttgtgctctccgctgcgggaatgggagcgtcaggagctccgcagcctcccaacatcctgctgttgctgatggacgatatgggatggggcgatctgggcgtgtacggtgagccgtcgcgcgaaacgccaaacctggacaggatggccgccgaaggcctgctgtttcctaatttctactccgccaacccgctgtgcagcccctcgcgggccgcacttctgaccggacgcctgccgatcagaaacgggttctacactaccaatgcacacgcccggaatgcttatacgccacaagagatagtgggaggaatcccggactccgaacaactgttgccggaactgctcaagaaggcgggatacgtgtcgaagatcgtgggcaaatggcatttgggacataggccgcaatttcaccccctgaagcacgggttcgatgagtggttcggatcaccgaactgccatttcggaccctacgacaacaaggctcgccccaacatcccggtctaccgggactgggagatggttggacgctactacgaggaattcccgatcaacctgaaaaccggcgaagccaatctcactcagatttacctgcaagaagcgctggacttcataaaacgccaggcacggcaccatcccttcttcctttactgggctgtggacgctacccacgctcccgtgtacgccagcaagccattcctggggacctcccaacggggaaggtacggagatgccgtccgcgaaatcgacgattcgattggaaagatcctggagcttcttcaggacctgcatgtggcggataacacttttgtgttctttacttctgacaacggagccgccctcatctctgcccccgaacagggaggatcaaacggaccgttcttgtgcggcaagcagactactttcgagggaggcatgcgggaacccgccttggcatggtggccggggcatgtcacggcgggacaagtgtcgcaccagctcggctcaattatggacctttttactacttccctcgccctggcaggcctgaccccaccctccgatagagccattgatggcctgaatctcctcccgactctgctgcaggggcggctgatggacagacccatcttttactaccgcggggataccctgatggcggcaactcttggccagcataaagcgcatttctggacgtggaccaactcgtgggagaacttccggcagggaatcgacttctgtccgggccagaacgtgagcggagttactacccacaatctggaggaccacacgaaactgccactgatcttccacctgggaagggatccgggggagcggtttccactctcattcgccagcgccgagtaccaggaagctctgagtcgcatcacctccgtggtgcagcagcaccaggaggctcttgtgccagcccagcctcagctgaatgtctgtaactgggcagtcatgaactgggcgccgccagggtgtgagaagctcggaaaatgtctcacgccgccggaatcgatcccaaaaaagtgcctctggtcgcac

SEQ ID NO: 12040 - DNA, 1566 bp, synthetic construct
  misc_feature 1..1566: note = source = /note="Description of Artificial Sequence: Synthetic coding sequence"
  source 1..1566: mol_type = other DNA
atggcggcggttgtggccgccacacgttggtggcagctactcctggtgctcagcgccgcagggatgggagcatctggggcaccccagccgcccaacatcctcttgctgttgatggatgatatgggttggggagacctgggcgtgtatggcgagccaagtcgggagactccaaatctcgatcgcatggctgcggaaggactgctgttccccaatttttatagtgctaacccattgtgcagcccatctcgggcagcactccttacaggacgtttacccattagaaatgggttctacactaccaatgcccacgcccggaacgcctacacaccacaagaaatcgtcggcgggattcctgatagtgaacagctgctgccagagttactcaaaaaagctggctatgtgagcaagattgtggggaaatggcatttagggcaccgccctcagttccatcccctcaaacatggcttcgatgagtggttcggcagcccgaattgccacttcggtccctatgataataaagcccgcccgaacattccagtatatcgcgactgggagatggtgggtcgctattatgaagaatttcctattaacttgaagactggggaagccaatcttacccaaatttatctgcaagaggctctggactttataaagcggcaggcgcggcatcaccctttcttcctttactgggctgtagacgcgacccacgctcctgtttacgctagcaagccgttcctgggaacatcccaacggggtcgttacggagatgccgtacgcgaaatagacgattctatagggaagatccttgagctcctccaagatctacatgtggccgataacacctttgtgttttttacctcggacaacggcgccgcactcatatctgccccagagcagggcggttcaaatggaccatttctatgtggtaaacaaactacttttgagggcggaatgagagagcctgctctcgcatggtggcccgggcacgtgacagcaggtcaggtcagccaccagctcggctcaattatggatctgttcacaacttctttggcattggcgggcctgacgcctccatccgacagggctatagacgggctcaacctcctgcctaccctcctgcaaggccggttaatggacaggcctattttttactatagaggggatactttgatggctgcgactttaggacagcataaggctcatttctggacgtggacaaatagttgggaaaatttcaggcagggcatcgacttctgtccaggccagaatgtcagcggggtgaccacccacaacctggaggatcacactaaactgccactgatattccatctcggccgagaccctggggagcgcttcccactgtctttcgccagtgccgagtatcaggaggccctgtccaggatcaccagtgtcgttcagcagcaccaggaagcactggtaccagcacagcctcagctgaacgtatgtaactgggccgtgatgaattgggccccccctggatgcgaaaagttgggcaaatgcctcaccccgcctgagagcattccaaagaagtgtctgtggagccac

SEQ ID NO: 12041 - DNA, 1566 bp, synthetic construct
  misc_feature 1..1566: note = source = /note="Description of Artificial Sequence: Synthetic coding sequence"
  source 1..1566: mol_type = other DNA
atggccgccgtcgtcgctgcaacgcgatggtggcaactcttgcttgtgctgtctgcagcaggtatgggggctagtggggccccccagccaccaaacattctcctccttctgatggacgatatgggttggggcgacctgggggtctatggggaaccctctcgagagactccaaacctggatcgcatggccgctgaaggactgctctttccaaatttttacagcgcaaacccactgtgtagcccttcacgcgctgccctcctgactgggcgcctcccaataagaaacggcttttacactacgaacgcccacgctcgcaacgcctatacaccacaggagattgtgggcggtatccctgatagcgagcagctgctgcccgagctgctcaagaaagccggctacgtgtccaaaatagtgggcaaatggcatctcggacaccgccctcaattccacccactcaagcatggctttgatgagtggtttggatctcccaattgccacttcggtccttatgacaacaaagcgagacccaacattcctgtgtatagggactgggaaatggtaggacggtattacgaagagttcccaataaatctgaagacaggagaagcaaatctgacacagatctacctgcaagaggcattagattttatcaagcggcaggctaggcatcacccattcttcctgtactgggccgttgacgctacacacgctcccgtctatgcaagtaagcctttcttggggacctcccagcgcggccgttatggggacgccgttcgagaaattgatgattccattggtaaaattctcgagttgctacaggacctgcacgtggccgacaatacattcgtcttctttactagcgataacggggctgctctgatcagcgcaccagagcagggtggctccaacggtccatttctgtgtggcaaacagactacctttgaggggggtatgcgggaaccagccttggcttggtggcccggtcatgttaccgccgggcaggtgagccaccaacttgggtccatcatggatctgttcacaacctcactggctttggccgggttaaccccgccctccgaccgtgcgattgacgggctgaacctgctccctaccctcctacagggccgattgatggaccggccaattttctattaccggggagacaccctgatggccgctaccttgggccagcataaggcacacttctggacctggacaaattcctgggagaatttcagacagggcatcgacttttgccctggccagaatgtatccggcgtaacaacacataacctggaagaccatacgaagctacctctgatcttccatcttggacgcgacccaggcgagcggttcccactgtcttttgcttccgcagaatatcaggaggccctgtcacgtataactagcgtggtgcagcagcaccaggaggctctggtcccagcccagccacagcttaacgtttgcaattgggccgttatgaactgggccccacccgggtgcgaaaaactcgggaagtgcctcaccccacccgaaagcattcctaagaagtgtctgtggtctcac

SEQ ID NO: 12042 - DNA, 1566 bp, synthetic construct
  misc_feature 1..1566: note = source = /note="Description of Artificial Sequence: Synthetic coding sequence"
  source 1..1566: mol_type = other DNA
atggcggcggttgttgcggcaacccgctggtggcaactgctgctggttctgagcgcggcaggaatgggcgcgtccggcgcgccacaaccgcctaacatcctgctactcctcatggatgacatgggctggggtgatttgggcgtatacggcgagccgtcccgcgagacccctaatctggatcggatggccgcggagggcttgctcttccctaatttttacagcgcaaacccactgtgtagcccgagccgcgcagcgctgctgactggccgcctgccaatccgcaatggtttctacactacgaatgcacacgcgcggaacgcctacaccccacaagaaattgtcggtggtataccagattccgaacaactgctgccggagttgctgaaaaaagccggctacgtcagtaagattgttggtaagtggcacctaggccaccgcccgcagtttcatcctctgaagcacggtttcgacgagtggttcggctcccctaactgtcacttcggcccatacgataacaaggccaggccgaatatcccggtctaccgcgactgggaaatggttggtcgctattatgaggagtttccgattaacctgaaaaccggtgaggcaaacctgacccaaatttacctgcaggaagcccttgacttcataaaacgacaagctcggcaccaccctttcttcctgtactgggccgtagatgcaactcacgccccagtctatgcctccaagccgtttctaggtacgagtcaacgcggcaggtatggcgatgctgtccgcgaaatcgatgactcaatcggtaagattctcgaactgctgcaggatctgcatgtcgccgacaacaccttcgttttctttacctcagacaatggagctgccttaatctccgcccctgaacagggtggaagcaacggtccttttctctgtggcaagcagaccacgttcgaaggtggcatgcgggaaccagccctggcttggtggccaggccacgtcaccgcagggcaggtaagccatcagctgggcagcattatggacctgtttactaccagccttgcgcttgcagggctcacgccaccttccgaccgcgccatcgatggtctgaatctgctgccaacgttgctgcagggacgcttgatggataggcctatcttctattatcgaggggatacactgatggcagccacccttggccagcataaagctcacttttggacctggaccaactcgtgggagaacttccggcagggaatcgatttttgccctggccagaacgtctccggcgttactacccacaatttggaagaccacactaaactacctcttatcttccacctgggtcgggatcctggcgagcgtttcccattgtcattcgcatctgctgagtatcaggaggctctctcccgtattactagcgttgtccagcaacaccaagaagcactggtcccggctcagcctcagctgaacgtgtgtaactgggccgttatgaactgggctccgccgggctgcgagaagctgggcaaatgcttaacccctccagagagcatccctaaaaagtgtctgtggagccat

SEQ ID NO: 12043 - DNA, 1137 bp, synthetic construct
  misc_feature 1..1137: note = source = /note="Description of Artificial Sequence: Synthetic coding sequence"
  source 1..1137: mol_type = other DNA
atgtcacgctccggtaccgacccccagcaaaggcagcaagcaagtgaggctgacgcagcagcggctacatttcgagcaaacgaccatcagcatatcagatataacccactgcaagacgagtgggtcctcgtgtccgctcatagaatgaaaaggccttggcagggccaggtagagccacaactgctgaagaccgtcccaaggcatgacccccttaatcctctctgcccgggggctatccgagcaaacggagaggtgaaccctcagtacgattcaaccttcctgttcgacaatgactttcctgccctgcagccggacgcccctagtcctggaccatctgaccaccccctttttcaggccaagagcgctagaggagtttgtaaagtgatgtgctttcacccttggagcgatgtgaccctccctctcatgagcgtgccggagattcgtgctgtggtggatgcttgggctagcgtgaccgaggagctgggcgcgcagtacccttgggtgcagattttcgagaacaagggtgccatgatgggatgcagcaacccacacccacattgccaggtctgggcgtcatctttccttccagatatcgcccagagagaagagcggagccagcaagcctacaagagtcagcatggtgaaccactgcttatggaatactcaaggcaggaactgctgaggaaggaaaggcttgtcctgacttccgaacattggctggtgctagtgcctttttgggccacttggccctaccagactctgctgcttccccgcaggcacgtcaggcgattgccggagcttacaccagcagaacgggatgatttagcatcgatcatgaagaaactgctgacaaagtacgataacctgttcgaaacttcttttccttacagtatgggttggcacggcgccccaacaggttccgaggccggggccaactggaatcattggcaactgcatgctcactattacccccccctcctgcgatcggcgacggtgcgaaagttcatggtgggctacgagatgttggcacaggcccaacgggacttaaccccagagcaagcagcggaaaggctgcgggccctgcctgaagtccattatcatcttggccagaaggatcgcgagaccgcgaccatagca

SEQ ID NO: 12044 - DNA, 1137 bp, synthetic construct
  misc_feature 1..1137: note = source = /note="Description of Artificial Sequence: Synthetic coding sequence"
  source 1..1137: mol_type = other DNA
atgagtcggagtggtaccgaccctcagcagcggcagcaggcgagtgaagcagacgctgcagctgccacgttccgagccaacgatcaccaacatatcaggtataatcctctgcaggacgagtgggtgctggtgtcagcccatcgaatgaaaagaccttggcagggccaagtggagccacaactgctgaagactgtcccgcgacatgatccactcaatcctctctgtcctggcgctatccgagccaatggggaggtgaatccacagtatgacagcacatttctgttcgacaatgactttcccgcgttgcagccagatgcaccgagccccggcccctcggatcacccgttgttccaagctaaatcggcccgcggagtttgtaaggttatgtgctttcacccctggagcgacgtcacactgccacttatgtccgtgcccgaaatccgggcggtggtggacgcctgggcttctgttacagaggaactaggagcgcaatacccgtgggtacagatcttcgagaataaaggagctatgatgggctgcagcaatcctcaccctcattgccaggtatgggctagcagctttttgcccgatatagctcagcgcgaggaaagatcccagcaggcatacaaaagccaacacggtgagcctctcttaatggagtactcaaggcaggaacttcttcgaaaagagcggcttgtattgacaagtgagcactggctcgttctagttcccttctgggcaacctggccataccaaactctactgctgccgaggaggcacgttcggagactcccagaactgacccccgccgagcgagacgacctcgcctcaattatgaaaaaactgttgacaaaatacgacaacctgttcgaaacttcttttccatattctatgggatggcacggagcccccaccggcagcgaagcaggcgcaaactggaaccactggcagctgcacgcccattactatccccccctcctacgctctgcaactgtgagaaagttcatggtagggtacgagatgttggcccaagcgcagcgggatctgacgcccgaacaagcagcagagcggctcagagccctgcctgaggttcactatcatttgggtcagaaagatagagagacggccaccattgct

SEQ ID NO: 12045 - DNA, 1137 bp, synthetic construct
  misc_feature 1..1137: note = source = /note="Description of Artificial Sequence: Synthetic coding sequence"
  source 1..1137: mol_type = other DNA
atgtcacgctccggcactgacccacaacagcgccagcaggcctcagaggctgacgcggccgccgccactttcagagcaaatgaccaccaacacatccgctacaacccgctgcaggatgagtgggtgctggtgtcggcacaccgcatgaaaagaccatggcaaggccaagtggagccgcagctgcttaaaactgtgccgaggcacgacccgctgaacccgctctgtccaggggctattcgggccaacggagaagtgaacccgcagtacgacagcacttttctgttcgacaatgacttcccggcgctgcaaccggacgcgccttctcccggcccgtcggatcatccgcttttccaggctaaatcggcaaggggagtctgtaaggtgatgtgctttcacccgtggtcggacgtgaccctcccacttatgtcagttccagagatccgcgccgtggtggatgcttgggcgagcgtgactgaagaactgggagcacaatacccttgggtccagatcttcgaaaacaagggcgccatgatgggatgttcgaaccctcatccgcattgccaagtgtgggcaagcagcttcctgccggatatcgcacaacgcgaagaaagatcccagcaggcttacaagtcacagcacggagaaccactcctgatggaatactcaagacaggaactgctgcgaaaagaacgccttgtgctcacttctgagcattggctcgtgctcgtcccgttttgggcaacttggccataccagacgctcttgcttcctcgccgccacgtgcggcgactgccagagctcactccggctgagcgggacgatctggcctcgattatgaagaagctcctgaccaagtacgataacttgttcgaaacctcattcccatactcgatgggatggcacggggccccaaccgggtcggaggcaggagccaactggaaccactggcagctccatgcccattactacccgccgctgttgaggtcagcgaccgtgcgcaagttcatggtcggctacgaaatgctggcgcaggcgcaacgcgacctcactccagagcaagccgccgagcgactgcgcgcattgcccgaggtccactaccacctgggacaaaaggatcgggagactgctaccatcgcc

SEQ ID NO: 12046 - DNA, 1137 bp, synthetic construct
  misc_feature 1..1137: note = source = /note="Description of Artificial Sequence: Synthetic coding sequence"
  source 1..1137: mol_type = other DNA
atgtctcgctccggcactgatccgcagcagagacagcaagccagcgaggctgacgccgcggcggccacttttcgcgcgaacgaccaccaacatatccggtacaacccgctgcaagacgagtgggtccttgtgtctgcccaccgcatgaaaagaccgtggcaggggcaagtcgagccacagcttttgaaaaccgtgcccagacatgacccgctcaacccgctgtgtcctggagctattcgagccaacggagaagtgaatccgcagtatgattccactttcttgtttgataacgatttccctgcgctgcaacctgacgcgccatcccctggaccgtcagaccacccactgttccaggcaaaatcagcccgcggcgtgtgcaaagtgatgtgcttccatccctggtcagacgtcactctgccattgatgtcggttccagagattagagccgtggtggacgcttgggcgtccgtcactgaagaactcggagcacagtacccttgggtgcagatctttgagaacaaaggtgccatgatggggtgctctaatccacacccacattgccaggtgtgggcgtcgtcctttctcccagacatcgctcagagagaagaacggtcacagcaggcatacaaatcgcaacacggcgaacccctcttgatggagtatagccggcaagagctgctgcggaaagaaagactggtgctgacttccgagcactggcttgtcctggttccgttctgggcgacttggccctatcaaacgctgctcctccctagacgccacgtgcggcgccttccagagctcactccggccgaacgagatgatctggcatccatcatgaagaagctgctgaccaagtacgataatctgttcgaaacgagcttcccgtacagcatgggttggcatggagcgcccaccggctccgaggccggggcgaattggaaccactggcagctgcatgcacattactaccctccattgctgcgctcagctaccgtcaggaagttcatggtgggatacgaaatgctggcgcaagcccagagagatttgactccggaacaggcggctgaacggctcagggctctcccggaggtgcactaccacctgggacagaaggacagagaaaccgcaactatcgct

SEQ ID NO: 12047 - DNA, 1137 bp, synthetic construct
  misc_feature 1..1137: note = source = /note="Description of Artificial Sequence: Synthetic coding sequence"
  source 1..1137: mol_type = other DNA
atgtccagaagcggaacggatccccagcagcgtcagcaggcatctgaagctgacgctgcagccgcgacctttcgcgccaatgatcaccaacacataaggtacaatcctctgcaggacgaatgggtgctcgtctctgcacaccggatgaaacgcccctggcaggggcaagtagagccgcagctcctgaagacagtgccccggcacgatcccctgaaccctctttgtcccggggcaatccgggcaaatggagaggttaatccccagtatgatagcacatttctatttgataacgatttccccgcgctacaacccgatgccccctcacccgggccatctgatcatccattatttcaggctaaatccgcccgaggggtgtgcaaagttatgtgtttccacccctggtcagacgtgacactgccactcatgagtgtgcctgagatcagggctgtcgtggacgcctgggcgagcgtcaccgaggagctcggcgcacagtatccatgggtccagatttttgagaataaaggggcgatgatgggctgcagcaatcctcatcctcattgccaggtctgggctagctctttcttgcccgatatcgctcagcgggaagaacgatcccagcaggcatacaaaagtcagcacggagagccacttctgatggagtatagtcgtcaggaactcctgcgcaaagagcgcctggtgctgacatccgagcattggctagtgttggtgccgttctgggcaacgtggccataccaaactcttcttctgcctcgacgccacgtccgtagactgccagagctgacacccgctgagcgcgacgacctcgccagcatcatgaaaaagttattgacaaagtatgataacctattcgagacttctttcccttactctatgggctggcacggcgcaccaacaggaagtgaggccggagcaaactggaaccattggcagcttcatgcgcattattaccctcctttgcttcgcagtgccactgtgagaaagttcatggtgggatatgaaatgctcgctcaggcccaacgggacctcacacccgagcaggccgcagagcgactgcgggcactgcccgaagtgcactatcatctggggcagaaagatagagagacagcgacgatcgcc

SEQ ID NO: 12048 - DNA, 1137 bp, synthetic construct
  misc_feature 1..1137: note = source = /note="Description of Artificial Sequence: Synthetic coding sequence"
  source 1..1137: mol_type = other DNA
atgagccgcagcggaaccgatcctcagcagcgacagcaggcctctgaagctgatgccgctgcagctacctttagggcaaatgatcatcaacatatcaggtataatcccctgcaggatgagtgggttttggtctctgctcatcgaatgaaacggccatggcagggccaagtggaacctcagctgctaaagacagtgcccagacacgatccgctaaatcccctctgtcccggggccatccgagctaatggagaggtaaacccccagtatgattctaccttcttattcgataacgattttcctgccctccagcccgacgcgcctagtccaggcccaagcgaccatccactcttccaggctaagagcgccaggggagtgtgcaaggtgatgtgtttccatccctggagtgacgtgacattaccactgatgagcgtgcctgaaattagagcggtagtggatgcgtgggcgagcgtgactgaagaacttggtgctcagtatccatgggtacagattttcgagaataaaggcgccatgatgggttgcagcaatccccatccccattgtcaggtctgggccagttcatttctgcccgatattgctcagcgcgaggagagatcacagcaggcgtataaaagtcagcacggggaaccgctcctaatggaatacagcaggcaggagctactccgcaaagagcggctcgtgttgacctctgaacactggctagttttggtgccgttctgggcaacctggccttaccagacgcttttgctccctagaagacacgtgaggcggctgcccgaacttactcccgccgagagggacgaccttgcttctatcatgaagaaacttctgacgaagtacgataatctcttcgaaactagcttcccgtattctatgggctggcatggcgccccaaccgggagtgaggccggagcgaactggaaccattggcaattgcatgcccattattatccaccattactgagatccgccactgtccgcaagttcatggttggctacgagatgcttgctcaggctcagcgggacctcacgccagagcaagccgccgaacgactccgcgcattgccagaggtgcattaccacttagggcagaaggatagggagactgccactatcgct

SEQ ID NO: 12049 - DNA, 1137 bp, synthetic construct
  misc_feature 1..1137: note = source = /note="Description of Artificial Sequence: Synthetic coding sequence"
  source 1..1137: mol_type = other DNA
atgtccagatcaggaaccgatcctcaacaaagacaacaagcgtccgaggctgatgctgctgccgcgacttttcgagccaatgatcatcaacacatccgctacaaccccctccaggatgaatgggtgctcgtctcggcacacagaatgaaacgcccttggcaaggacaagtggaaccacagctgctcaaaaccgtgccccgtcacgatccgctcaaccccttgtgcccaggggcgattagggccaacggagaggtcaatccgcagtacgactcgacgtttctgtttgacaatgattttccggctctgcagcctgacgcaccttcgccaggcccgtcagatcatcccctgtttcaggcaaagtcggcgcgaggagtgtgtaaggtaatgtgtttccatccgtggtctgacgtgactcttcctctcatgtcggtgcctgagattagggcagtggtggatgcatgggcgtccgtgaccgaagaactcggggcgcagtacccgtgggtccagattttcgagaacaagggtgcgatgatgggctgttcaaatccacatccacactgccaagtatgggcatcatcctttcttccagacattgcgcaacgggaagagcgtagtcagcaagcgtataagagccagcacggggaaccactcctgatggagtactcgcggcaggaactgcttagaaaggaacgcctcgtgttgactagcgaacactggcttgtcctggtgcccttttgggcaacctggccttaccaaactcttctgcttcctagacgtcatgtgcgccgcctgcctgaactgaccccagccgagagagacgatctggcctccatcatgaagaagctgttgactaaatacgataacctcttcgaaaccagcttcccatattcgatgggctggcatggtgcacctactggctcggaagccggagcgaactggaaccattggcagctgcatgcacactactacccacctcttttgcgttcggctaccgtccgtaaattcatggtgggatacgaaatgcttgcacaagcacaaagagatctcacgcctgagcaggcagccgagcggcttagggccctcccagaagtgcattaccatctgggtcaaaaggatcgagaaaccgcaacgatagca

SEQ ID NO: 12050 - DNA, 1137 bp, synthetic construct
  misc_feature 1..1137: note = source = /note="Description of Artificial Sequence: Synthetic coding sequence"
  source 1..1137: mol_type = other DNA
atgtcgagatcgggcactgaccctcaacaacgtcagcaagcgagcgaagcagacgcggccgctgcgacttttcgggctaatgatcatcagcatattcggtacaacccgctgcaggacgaatgggtgcttgtgtcagcacataggatgaaacggccttggcaaggccaagtcgaacctcagcttctcaaaactgtgccaaggcacgatcctctgaacccactgtgtccaggagcaattcgcgcaaacggtgaggtgaatccacaatacgattccactttcctgtttgataacgactttccagcactccaacctgatgcaccatcgcctggccctagcgatcatcctctttttcaagcgaagtctgcccgtggggtgtgcaaggtgatgtgcttccatccttggtcggatgtgacccttccactgatgtccgtgcccgagatccgtgccgtcgtcgacgcctgggcgtcagtgaccgaggaactcggagcccaatacccctgggtgcagatcttcgagaacaagggagctatgatgggttgtagcaacccccacccgcactgtcaggtctgggcgtcgtcattcctccctgatattgcacaacgggaagaaaggtcccagcaggcatacaaaagccaacatggagaaccccttttgatggaatattcacgtcaggagttgcttcgcaaggagcggcttgtgctcacttccgagcattggctggtcttggtccctttctgggcgacttggccataccagactcttctcctcccacgacgccatgtcagacgccttcctgaactgaccccagccgaacgggatgacctggcgtcgatcatgaagaaacttctcaccaagtacgacaacctgtttgaaaccagctttccgtacagcatgggctggcacggggcccccaccggatccgaggccggggcaaactggaaccactggcaactgcatgcccattactacccaccactgcttcgctcagcaaccgtgaggaaattcatggtgggctacgaaatgctcgcccaggcacaaagggatctgactccggaacaagctgcagaacgccttcgcgcactgcctgaggtgcactaccacctgggacaaaaggaccgagaaaccgccaccattgct

SEQ ID NO: 12051 - DNA, 1137 bp, synthetic construct
  misc_feature 1..1137: note = source = /note="Description of Artificial Sequence: Synthetic coding sequence"
  source 1..1137: mol_type = other DNA
atgtctaggtctgggacagaccctcagcagaggcagcaagcctccgaggcagatgcggccgctgccactttccgggcaaatgatcaccaacatataagatacaatcctctgcaagatgaatgggtattagtgtccgcgcataggatgaagcggccctggcaggggcaggtggaacctcagctcctgaagactgtgcctaggcacgatcctcttaatcctctctgtccaggagctatccgcgccaacggagaagttaatccccagtacgatagtacattcctgtttgataacgatttccctgctctccagcctgatgctccttcccctgggccctctgatcacccattgttccaggccaaatctgcaaggggggtatgtaaggtgatgtgttttcacccctggagtgatgttacgctgccactcatgagtgtgccagaaatccgagccgtagtggatgcctgggcttccgtgacagaagaactaggggcccagtatccgtgggtacagatttttgaaaataaaggggcaatgatgggatgcagtaatccccaccctcactgtcaggtgtgggcctcatcttttctaccagatatagctcaacgcgaggagaggtcccagcaagcatataaaagtcagcacggggaacctctcctgatggaatactctcggcaggagcttctgcggaaagaacggctcgtgctgacatccgaacactggttagttttggtacccttttgggccacatggccttaccagacattactgctgcctcgtcggcatgtgcgcagactgccagaactgactcctgctgaaagagatgacttagcctctatcatgaaaaaactgcttactaaatatgataacctatttgaaacaagttttccctattcaatgggatggcacggggctcccacaggaagtgaagctggggccaattggaatcattggcaattacatgctcattactatcctcccctccttcgatcagccacagtgcggaaattcatggtcgggtatgaaatgctcgctcaggctcagcgggacctcacaccagagcaggctgcagagagattgagagcacttcccgaagtgcattatcatctcgggcagaaagatcgcgagactgccactatagca

SEQ ID NO: 12052 - DNA, 1137 bp, synthetic construct
  misc_feature 1..1137: note = source = /note="Description of Artificial Sequence: Synthetic coding sequence"
  source 1..1137: mol_type = other DNA
atgtcccgttccggcacagatcctcaacaaagacaacaagccagcgaggctgatgctgctgcagctacttttagggcaaatgatcaccaacacatccgttacaacccgttacaggatgagtgggtgctcgtgagcgcccacaggatgaagagaccgtggcagggccaggttgagccgcaattgctgaagaccgtgccacggcacgatcccctgaatcccctgtgccctggcgccatcagggctaacggcgaagtgaacccacaatatgactcaacattcttgtttgacaatgatttcccagccctacagccagacgcaccaagcccgggcccatccgatcatcccctgttccaagcaaaatccgcgcgaggagtgtgtaaggtgatgtgctttcatccgtggtccgatgtcacgctacccctaatgtcggtcccagagattagggctgtcgtcgatgcatgggcgagtgtgacagaggagctgggtgcccaatacccctgggtgcagatattcgagaacaaaggagcgatgatgggatgttccaacccccacccacactgccaggtgtgggcgtcatcattcctccccgatatcgctcaacgtgaggaacgttctcagcaggcctataaaagccagcatggcgagccacttcttatggagtactcacgccaggagctgcttaggaaggaacggctggtgcttacgagtgaacactggctggtgctggtacccttctgggctacttggccctatcagacgctgcttttgccacggcgtcatgtccggagactgcctgagctcacaccagccgagcgtgatgacctggcctcgattatgaagaaactgttaacaaagtatgataacctgttcgaaaccagttttccctatagcatggggtggcacggcgcaccgactggatccgaggctggcgccaattggaaccattggcagctgcatgcacattattatccgcctctgctccgatccgctacggtgcggaagttcatggtgggatacgagatgctggcccaggctcagcgggacctgacgcctgagcaggccgctgagcgcctgagggctttgcccgaggtccactaccatctaggacagaaagaccgcgaaacagctacaatagcc

SEQ ID NO: 12053 - DNA, 1137 bp, synthetic construct
  misc_feature 1..1137: note = source = /note="Description of Artificial Sequence: Synthetic coding sequence"
  source 1..1137: mol_type = other DNA
atgagccggtccggcacggaccctcagcaacgccaacaggcaagcgaagcggacgcagcagccgcaaccttccgtgccaacgaccatcaacatattagatacaaccctctccaggacgaatgggtgctggtgtcggcacatagaatgaagcgcccgtggcagggacaggtggagccacaacttctgaaaactgttcccagacatgatccactcaaccctctctgtccgggtgcgatcagggcaaatggtgaagtcaatccccaatacgactcgacctttctcttcgataacgatttcccagctcttcaacccgatgcaccttcccctggcccatccgatcatccactgtttcaagcaaagtccgcgagaggggtgtgcaaggtgatgtgtttccatccatggtcagacgtgacccttccgctgatgtcagtgccggaaatacgagctgtggtggacgcctgggcttccgtcactgaagaacttggggcacagtatccatgggtgcagattttcgaaaacaagggggctatgatggggtgttcgaacccccacccacactgtcaggtctgggcatcgtcattcctccccgatattgcacagagagaagaaagaagccaacaagcatacaagagccaacacggggagccgcttctcatggaatattcccgccaggaactccttaggaaggaaagacttgtgctcacttccgaacattggctcgtccttgtccccttctgggcaacctggccttaccaaactctgcttctgcccaggagacatgtccgccgtctccctgaacttacccctgcagaacgggacgacctggcctccattatgaaaaaacttctgaccaagtatgataacctgttcgagacttcgtttccctactccatgggatggcacggagcacctaccggatcagaagctggtgctaactggaatcattggcaactgcatgcccactattacccccctttgcttaggagcgcgactgtgcgcaagtttatggtgggctacgaaatgctggcacaggcccaacgagatcttactcctgagcaagccgcagaaaggctgcgtgcactgcctgaagtgcattaccacctgggacagaaggatagggaaaccgctaccatcgca

SEQ ID NO: 12054 - DNA, 1137 bp, synthetic construct
  misc_feature 1..1137: note = source = /note="Description of Artificial Sequence: Synthetic coding sequence"
  source 1..1137: mol_type = other DNA
atgtctcggtctggaaccgacccgcagcagagacaacaggcgtctgaagccgacgctgcagcggcaaccttccgcgcgaacgatcatcaacatattcggtacaacccgctgcaggacgaatgggtgctcgtctcggcccaccggatgaagcgcccttggcagggtcaagtggaacctcaactgctcaaaactgtccccagacacgaccccctcaatccactgtgcccaggggcaatcagggcaaacggagaggtcaacccgcaatacgactccacctttctcttcgataacgacttccctgctctccaaccggacgctccttcgcctggcccgagcgaccatccgctgttccaggcgaagtccgcacgaggggtatgcaaagttatgtgctttcacccgtggagtgatgtgacccttcctctcatgagcgtgccagagatccgggccgtcgtggatgcctgggcttcagtgactgaagaacttggcgcccagtacccgtgggtgcaaatctttgagaataagggagccatgatggggtgcagcaatccgcacccacactgtcaggtgtgggcgtcatcgttcctgcctgacatcgcccagcgggaagaaagaagtcagcaggcgtataagtcccaacatggcgagccactgttgatggaatactcgcgacaggagctgttgcgcaaggaaagacttgtactgacttcagaacactggctggttctggtgccattctgggcaacgtggccctaccagaccctcctcctgccacgcagacatgtccgcaggctcccggagctgactccggcggagcgcgacgatctcgcgtccatcatgaagaagctgctcaccaaatatgataacctgttcgaaacctcgttcccttactcaatgggttggcatggagcgcccactggatcggaagcaggcgctaattggaaccattggcagttgcacgcccactactacccgccgctcctgaggtcggccactgtgcgcaagttcatggtcggatacgagatgcttgcccaggcacaacgggacctcacccccgagcaagccgccgagaggttgagggccctgccggaagtgcactaccaccttggccagaaagatcgcgaaaccgcgactattgct

SEQ ID NO: 12055 - DNA, 1137 bp, synthetic construct
  misc_feature 1..1137: note = source = /note="Description of Artificial Sequence: Synthetic coding sequence"
  source 1..1137: mol_type = other DNA
atgtcgcgctccgggaccgacccccagcagagacagcaagcctccgaggcagacgctgccgccgcaacttttagggcgaatgaccaccaacacatccgctacaacccgctgcaggacgaatgggtgctcgtctcggcgcatcgtatgaagaggccttggcagggacaggtcgagccgcagttgcttaagaccgtcccgagacacgacccgctcaacccactgtgccctggagccatccgcgccaacggagaagtcaacccacagtacgactccacgttccttttcgataatgacttcccggctctgcagcccgacgcgccgtcccctggaccgtccgaccatccgctgttccaagccaagtcagcccggggtgtgtgtaaggtgatgtgcttccatccttggagcgacgtgactctgcccttgatgtctgtgcctgagattcgcgcagtggtcgatgcgtgggcatccgtgactgaagagctgggagcgcaatacccctgggtccagatctttgaaaacaaaggggccatgatgggatgctcgaatccccacccgcactgccaagtctgggcctcctcatttctgccagatattgcgcagcgggaggagagatcccaacaggcatacaaatcccagcacggagagccattgctgatggaatactctcgacaggaactgctcagaaaggagcggctggtcttgacttcggagcactggctggtgctggtgcctttctgggccacctggccataccagactctcctgctccctcggagacatgtgcgccggctcccagaactgacccccgctgagagagatgacctggcatccatcatgaaaaaactgctcactaagtacgacaacctcttcgaaacctccttcccttacagcatgggatggcatggtgcccccaccgggagcgaagccggagcgaactggaatcattggcagctccacgcgcattactacccgccgttgctgcgctcggccacggtgagaaagttcatggtgggctatgaaatgctggcccaggctcaaagggatctcactccggagcaggcggctgaacggctgcgcgcgttgcctgaagtgcactaccatcttggacagaaggaccgcgaaaccgctactatcgct

SEQ ID NO: 12056 - DNA, 1137 bp, synthetic construct
  misc_feature 1..1137: note = source = /note="Description of Artificial Sequence: Synthetic coding sequence"
  source 1..1137: mol_type = other DNA
atgtcccgctctggcaccgatcctcagcaacgacagcaagcttcggaagccgacgctgctgccgccactttcagggcaaatgaccaccaacatatcagatataaccccttgcaggacgaatgggtgctcgtaagtgcacacaggatgaagagaccttggcagggtcaggtagagccgcagctgttgaagacagttccccggcatgaccccctgaatcccttatgccccggcgccatcagggctaatggagaagtgaaccctcagtacgactcaacgtttttattcgataacgattttcctgcactccaacctgatgcaccgagtcccgggcccagcgatcatcccctgttccaagctaagagcgctcgaggcgtctgcaaggttatgtgcttccacccctggtctgatgtgaccctacccctaatgtccgttcctgagatcagggccgtggtggacgcttgggcttctgtcacagaggaactgggcgcacagtatccctgggtgcagattttcgaaaacaagggggccatgatgggctgtagcaatccccatccacattgccaggtgtgggccagtagctttctgccagacattgcacagcgcgaagagaggagtcaacaggcttataagagtcagcatggtgaaccgctcttaatggagtacagcaggcaggaactgctgcggaaagaaaggctggttttgacgtccgaacactggctggtcctcgttccattctgggctacttggccctatcagacactgctgttgccgcggcgccatgtgagaaggctgccggaactaaccccggccgagagggatgatctggcgtctattatgaagaaattgctgaccaagtatgataatctttttgaaacttcctttccttactcgatgggttggcatggtgcccctactggctcagaagccggagccaattggaaccactggcaattgcacgctcattattacccacccctcctgaggagtgctacggttaggaaattcatggtggggtatgaaatgctggcccaggcccagcgggatctaacccctgaacaggcagccgaaagactgagagcactgccggaagtccattaccatcttggccagaaggatagagagaccgctacaatagcg

SEQ ID NO: 12057 - DNA, 1137 bp, synthetic construct
  misc_feature 1..1137: note = source = /note="Description of Artificial Sequence: Synthetic coding sequence"
  source 1..1137: mol_type = other DNA
atgagcagatcagggaccgatcctcaacagcgtcaacaagcgtctgaagcagacgcagccgccgcaacttttagggccaacgatcatcaacacatccgatacaacccgctgcaagacgaatgggtcctggtgtcggcacaccggatgaaaagaccttggcaaggacaggtggaacctcagctgttgaaaaccgtgccccggcatgaccctcttaatcctctgtgcccgggcgctatccgtgctaacggtgaggtcaacccacaatacgatagcacgtttctttttgataatgatttcccagccctgcaacctgatgcaccttcgcccggtccatcagaccatccactctttcaagccaagtcggccagaggagtgtgtaaggtgatgtgctttcatccctggtcggacgtgacgctccctcttatgagcgtccctgaaattcgggcagtggttgatgcatgggcgtccgtgaccgaggagcttggagcacaatacccttgggtgcagatctttgagaataagggggcgatgatgggttgttcgaacccacaccctcattgtcaggtgtgggcatcatcgtttctgcccgatattgcacagagggaagaaagatcgcagcaagcgtacaagagccagcacggagaaccactcttgatggaatacagcagacaagaacttctgagaaaagagaggcttgttcttacctcagaacattggctcgtgctcgtccccttttgggcaacctggccttaccagacgctcctgcttcctcgcagacacgtccgtcgactccctgagctcacccccgccgaacgcgatgatctggcgtccattatgaaaaaacttcttacgaaatacgacaatctgtttgaaacttccttcccatacagcatggggtggcatggggcaccaactggttccgaggccggtgcgaactggaaccactggcagttgcacgctcattactacccaccacttctgcgctcagcaaccgtgagaaagtttatggttggctacgagatgctggctcaagcccagcgtgatctgactcctgaacaagccgcagagcgtctgcgagcactccccgaagtccactaccatctcggacagaaggaccgtgaaactgcgacgatagct

SEQ ID NO: 12058 - DNA, 1137 bp, synthetic construct
  misc_feature 1..1137: note = source = /note="Description of Artificial Sequence: Synthetic coding sequence"
  source 1..1137: mol_type = other DNA
atgagccggtccggcaccgacccacagcagcgccagcaagcatctgaagcagacgccgccgcggctacctttcgggctaacgaccaccagcacatccggtacaaccccctgcaggatgagtgggtcctcgttagcgcacacagaatgaagcgaccgtggcaaggccaggtcgaacctcagctgcttaagacggtccctcggcacgacccgctcaacccattgtgtcctggtgcgatcagggctaatggagaggtgaacccacagtacgactcaactttcctgttcgacaatgacttcccggcactgcagccagatgccccgtcgccgggcccatcggatcatcctttgttccaagcaaagtcggcgcgaggagtgtgcaaggtgatgtgcttccacccgtggtccgatgtgaccctgccgctgatgtcagtgccagagatccgcgccgtcgtggacgcatgggcgtcggtgaccgaggagctgggggctcagtacccctgggtgcagatctttgaaaacaaaggagccatgatgggatgctccaatcctcatccccattgccaggtgtgggcgagctccttcctgccggacatcgcccagagagaggagcggagccaacaagcgtacaagagccagcacggggaaccgctcttgatggagtattcgcgccaagaactgctccgcaaggaacgccttgtgctgaccagtgaacattggctcgttctggtgccgttctgggccacctggccgtaccagaccctgctgctcccgaggagacacgtgcgtagactgccggagttgactcccgccgaacgcgatgacctcgcctcaattatgaagaaactgctgactaagtacgataatctctttgaaacttccttcccatactcgatgggatggcacggagccccaactggctcagaagccggtgccaactggaaccattggcaacttcatgcacattactaccctcctctgctgcgctccgccaccgtcagaaaattcatggtcggatacgaaatgctcgcgcaagcgcaacgggatcttactccggagcaagctgctgaacgcctgcgggcgctcccagaggtgcactaccacctcggacagaaagacagggaaacggccactatcgcc

SEQ ID NO: 12059 - DNA, 1137 bp, synthetic construct
  misc_feature 1..1137: note = source = /note="Description of Artificial Sequence: Synthetic coding sequence"
  source 1..1137: mol_type = other DNA
atgagcagatcagggacagaccctcagcagcggcagcaggcgtcagaggccgatgcagcagctgccactttcagggctaacgaccaccagcatattcgctataaccctcttcaggatgaatgggtcctggtaagtgcacacagaatgaagcgaccttggcaaggccaggtcgagccacagcttctgaagacagttcccaggcacgacccacttaacccgctctgccctggggccatcagggctaacggagaggtcaacccccagtacgactccacattcctctttgacaacgattttcccgcactgcagcctgacgcgccgtctcccggcccttcagaccacccgttgtttcaagccaagagtgctaggggagtgtgcaaagtcatgtgtttccatccgtggtccgacgtcacactgccactcatgtccgtcccagagattcgcgctgtagtggacgcctgggcctcagtgacagaagagctcggggctcagtacccctgggtgcagatttttgaaaataaaggcgccatgatggggtgctcaaacccacacccccattgccaggtctgggcctcctcttttttgccagatatcgctcagcgagaagagaggagtcagcaagcttacaagagccagcatggcgagccactgctcatggagtacagccggcaagaactcctgcggaaggagcggctggtgctgacttccgaacactggctcgtgctcgtccctttctgggcaacctggccataccagaccttgttgctgccaagaagacatgtaagacggcttccggaacttacacccgctgagcgggatgatctggcatcaataatgaagaaactcctgaccaagtatgacaatctgttcgagacatcctttccgtatagtatggggtggcacggcgcgcccaccgggtctgaggccggcgctaactggaaccattggcagctccacgcacactactacccgcccctgctgagatcagcaaccgtgagaaagtttatggtgggatatgaaatgttggctcaggcacagcgggatctgacacctgagcaggcagcagaacgcttgagggcccttcctgaggttcactatcacctgggccaaaaagaccgcgagaccgcgaccattgcg

SEQ ID NO: 12060 - DNA, 1137 bp, synthetic construct
  misc_feature 1..1137: note = source = /note="Description of Artificial Sequence: Synthetic coding sequence"
  source 1..1137: mol_type = other DNA
atgtcacggtcaggcacagacccccagcagaggcaacaggcctctgaagccgatgcggcagctgctacctttcgcgcgaacgaccatcagcacattagatataaccctttgcaagacgagtgggtacttgtatctgcacatagaatgaaacgcccatggcaaggacaggtggaaccacagctgttgaaaacagtgccaaggcacgatccattgaatcctctttgtcctggagccattcgggccaacggcgaggtaaacccacagtatgatagcaccttcctgtttgataatgattttccggcgttgcaacctgatgctcctagtcctggaccctcagatcaccctcttttccaggcgaagtcagcacgtggggtgtgtaaagtcatgtgcttccacccatggtcggatgtgacactaccactgatgtctgtccctgagatacgcgctgtggtcgacgcctgggccagcgtgaccgaagaactgggagctcagtacccatgggtgcagatattcgaaaacaaaggggccatgatgggttgctctaacccccacccccactgtcaagtgtgggctagctcctttctgccagacattgctcagagagaagaacgttcgcagcaggcgtataaatcacagcacggcgagcccctgctaatggagtactctcgacaagaactactccgcaaagaacgacttgtcctgacctcagagcattggttggtcctcgtgcccttttgggccacctggccatatcagacacttctgctgccacggaggcacgtgcgccggctgcccgagttaacccccgcagagcgcgatgacctcgctagcattatgaagaaactcctcacgaagtatgacaatctcttcgagacctcattcccctatagcatgggatggcacggagctccaaccggctctgaggccggggctaactggaaccattggcagctacacgcacattattacccacccctgctccggtccgcaactgtcaggaagtttatggttgggtacgaaatgctggcacaggcccagagggatcttacacccgagcaggctgcagagagattaagggctttgccggaagtgcactatcacctaggacagaaggatagggagactgccactattgcc

SEQ ID NO: 12061 - DNA, 1137 bp, synthetic construct
  misc_feature 1..1137: note = source = /note="Description of Artificial Sequence: Synthetic coding sequence"
  source 1..1137: mol_type = other DNA
atgtcccgctctgggactgatccgcagcaacggcagcaggcaagtgaggccgatgccgcggctgctacatttagggccaacgaccaccagcacataaggtacaaccccttgcaagatgaatgggtattggtcagtgcccatagaatgaagcggccttggcagggacaggtagagccacagctgctcaaaaccgtcccgagacatgatcccttgaatccactgtgtcctggggctatcagggctaacggagaggttaatcctcagtacgactccaccttcctgtttgacaacgactttccagcactgcagccagatgccccgtctccgggtccatctgaccaccctctgttccaggccaaaagcgctcgcggtgtgtgtaaagtgatgtgctttcacccctggagtgacgtgactctccctctgatgtccgtgcccgagatacgggccgtggtggatgcatgggcctctgtcactgaagagctgggcgctcagtatccctgggttcaaatatttgaaaataagggagccatgatgggctgctcaaacccgcatcctcattgtcaggtatgggcatcttctttcctccccgacattgcacaaagagaggaaagatcccagcaggcctacaaatcccagcacggggagcctctgttgatggagtatagtcgacaggagctgctgcgcaaggagagattggtgttgactagcgaacattggctggtgctggtgccattctgggcgacctggccttaccagacactgctgttgccaagacgacacgtacgcagactccccgagctgacgcccgctgagcgggacgatctggccagcattatgaaaaagctgctgacaaagtacgataacctgttcgaaacatccttcccttattctatgggctggcatggcgctcctaccggttctgaagctggggccaattggaatcactggcagctgcacgctcattactatccccccctcctgcgaagcgcgaccgttaggaaatttatggtggggtatgaaatgctcgcgcaggctcagagagatcttactccagagcaggccgcggagcggttgagagctcttcccgaggtgcactaccatttgggccagaaggacagggagaccgccacaatcgct

SEQ ID NO: 12062 - DNA, 1137 bp, synthetic construct
  misc_feature 1..1137: note = source = /note="Description of Artificial Sequence: Synthetic coding sequence"
  source 1..1137: mol_type = other DNA
atgtcgagatccggtaccgatccacaacagcgccaacaagcgtccgaagcagatgcggcggcggctacctttcgagctaatgaccaccaacacattaggtacaaccctcttcaagatgaatgggtcctcgtctcggcccataggatgaagaggccatggcagggacaggtggaaccccaactgctgaaaaccgtcccaagacatgatcctctcaacccgctttgccctggggccattcgtgcaaacggggaagtgaatccccagtatgacagcacctttctttttgacaatgactttccagcactgcaaccagatgcaccaagccctggaccatccgaccaccccctttttcaagcaaagtcagccagaggagtgtgtaaggtgatgtgttttcatccgtggtcagatgtcactcttcctctgatgtccgtgcctgaaattagagcagtggtggacgcatgggcgtccgtgactgaggaacttggagcacaatacccctgggtgcaaatcttcgaaaacaagggcgctatgatgggctgcagcaacccccatcctcactgccaagtttgggcctcctcatttctccccgacatcgcccagcgcgaagaaagatctcaacaggcttataagtcacagcatggcgaaccgcttctcatggaatactcccgtcaagaacttctgagaaaggagagattggtccttacttccgaacactggctggtcctcgtccctttttgggcaacctggccgtaccagactctgctgctgcctcgccgacatgtgagacgacttcctgagcttactcctgcagagcgcgacgatctggcatcgattatgaagaaacttcttaccaaatacgataatcttttcgaaacctcgttcccttactcaatgggatggcacggagcacctactggttccgaagcaggagcaaactggaaccactggcaactccacgcgcattactacccacctctccttcggagcgcaaccgtgcgcaagtttatggtcggctacgaaatgctggcgcaggcacaacgggacctcacgcctgaacaggccgcagagagactccgtgcgctgcctgaagtccactaccatctgggccagaaggacagagagactgcaactatcgct

SEQ ID NO: 12063 - DNA, 1137 bp, synthetic construct
  misc_feature 1..1137: note = source = /note="Description of Artificial Sequence: Synthetic coding sequence"
  source 1..1137: mol_type = other DNA
atgtctcgcagcggcactgatccgcagcaacgccagcaggcttccgaggcggacgcggccgcagccaccttccgcgctaacgaccaccagcacataaggtacaacccgctccaggacgaatgggtgctcgtgtcagctcaccggatgaagaggccatggcagggacaggttgagccgcaactccttaaaactgttccgagacatgatccactgaatcctctctgtcctggggctataagagccaatggggaggtcaacccccagtacgactcaactttcctgttcgataacgatttcccagctcttcaacccgacgctcccagtccgggtccatccgatcacccgttgtttcaggcaaagtctgctagaggggtttgcaaagtcatgtgcttccacccatggtccgatgtcactttgccactgatgagcgtccccgagatccgggctgtggtggacgcttgggcatccgtgaccgaggaactcggcgcacagtatccatgggttcagatatttgagaataagggggcaatgatgggctgctcaaatccacaccctcactgccaggtgtgggcctcaagttttcttccggatattgcccagcgagaggagagaagtcaacaagcttacaaaagtcagcacggggagcccttgcttatggaatatagcagacaggaactcctgaggaaagagcgcttagtactcacgagcgagcattggcttgtcctcgtgcctttctgggccacgtggccctaccagacactgctactccctagacgacacgtgcgcagacttccagagttgactccagccgagcgtgacgacctcgcttccataatgaagaaactccttacaaagtacgacaatctgttcgaaacatccttcccctatagtatggggtggcacggggccccaaccggcagtgaggccggagccaattggaaccactggcagttgcacgcacactattacccccctctccttcgaagcgcaaccgttcgcaagtttatggtagggtatgagatgctggctcaagcccaaagggatctaacccccgagcaggccgcagagcggttgagggccctgcccgaggtgcactaccacctcgggcagaaagaccgcgaaacagccacaatcgcc

SEQ ID NO: 12064 - DNA, 1137 bp, synthetic construct
  misc_feature 1..1137: note = source = /note="Description of Artificial Sequence: Synthetic coding sequence"
  source 1..1137: mol_type = other DNA
atgagccgatctggtacagaccctcagcagagacagcaggcttccgaggcagacgcagcagctgctaccttcagagcaaatgaccaccagcatatccggtacaatcccctgcaggacgagtgggtgctggtgtccgcgcacagaatgaagcggccatggcaaggacaggtggagcctcagctgctcaagactgtgccaagacacgatcccctcaaccctctgtgccccggcgccattagggctaatggtgaggtgaacccacagtatgattcaaccttcttatttgacaacgatttccccgcactgcagcccgacgctccatctccggggcccagtgatcaccctctgtttcaagccaagagcgcgcggggggtgtgcaaggtaatgtgttttcatccatggagcgacgtgacactgccactgatgtccgtacctgaaatcagagcggtcgtggatgcctgggcatccgtaacagaggagctgggtgcacagtacccctgggtgcagatcttcgaaaataagggagccatgatggggtgttcaaacccgcacccacactgccaggtttgggcttcctcctttctgccagacatcgcccagagagaagaaagaagccagcaagcatacaaatcccagcatggtgagcccctgctgatggagtatagccgccaggaactgctgaggaaagaacgcctggtgctgaccagtgagcactggctggtcttggtccccttttgggcgacttggccttaccaaacactgctgctgccacgccggcatgtgcggcgtctgcctgagctcacgcccgccgagagagatgacttagcaagcatcatgaagaagttgctgacaaaatacgacaatttatttgagaccagcttcccttactctatgggctggcatggagcccccactggctctgaggccggagcgaactggaatcactggcagctgcatgcccactactatcccccgctgcttcggtccgctaccgtccgaaagttcatggtgggctatgagatgctggcccaagcccaacgggatttgacccccgagcaggcggctgaaaggcttcgagccctgcctgaggtccactatcacctgggccaaaaagacagggaaactgcaaccatcgcc

SEQ ID NO: 12065 - DNA, 1137 bp, synthetic construct
  misc_feature 1..1137: note = source = /note="Description of Artificial Sequence: Synthetic coding sequence"
  source 1..1137: mol_type = other DNA
atgtccaggtccggcactgaccctcagcaacgccagcaggccagcgaagcggacgctgcggctgcaacgtttagggctaatgatcaccaacacatcagatataacccactgcaggacgaatgggtccttgtgagcgcccacaggatgaaaagaccctggcaaggccaggtcgagccccagttgctcaaaaccgtgccgagacacgacccactcaatccattatgtcccggcgctatacgagctaatggagaagtcaacccccagtatgacagcaccttcttgttcgataatgacttccctgcacttcagcctgacgcaccctcaccaggcccgtcagatcacccactttttcaggccaagagcgctagaggcgtatgcaaggttatgtgtttccatccctggagcgacgtcacgcttccgcttatgtctgtgccggagatacgggcagtggtggatgcctgggcctctgtgacagaagaactgggggcccagtacccctgggttcagatcttcgaaaacaagggggctatgatgggatgcagcaatccacacccacattgccaggtgtgggcatcatcgtttctgcccgatatcgcccagagggaggaacggtcgcaacaggcctacaaaagccagcacggagagcccctgctgatggaatattcgaggcaagagctgttgaggaaggaaagactggtgttgaccagcgagcattggctcgttttggttccattttgggctacatggccttaccagacccttctgctaccaaggaggcatgtccgtcgactgccagagttaactccagccgagcgggacgacttggcctcaatcatgaaaaagctgctgactaaatatgacaacttattcgagacctccttcccatattcaatggggtggcacggagctccgaccggctcagaggccggagctaactggaaccactggcagctccatgcccactattaccccccactgttgcgttccgctacagtgcgcaaatttatggtaggttatgagatgttggcccaggctcagcgggatttaacccctgagcaggctgctgaacgtctgcgagcattgcctgaagtgcattaccatctgggtcagaaggatcgcgaaaccgctactatagct

SEQ ID NO: 12066 - DNA, 1137 bp, synthetic construct
  misc_feature 1..1137: note = source = /note="Description of Artificial Sequence: Synthetic coding sequence"
  source 1..1137: mol_type = other DNA
atgtcacgtagtgggactgatccccagcaaaggcagcaggccagtgaggccgatgccgctgccgctacttttcgggcaaacgatcatcagcacatccggtataacccactccaggatgaatgggtgcttgtgtcggcgcataggatgaagagaccttggcaggggcaggtagaaccacagctcctgaagactgtccccagacacgaccctctcaatcccctctgccccggagccattcgcgccaacggggaagttaatccccagtatgatagtacatttctattcgataatgatttcccagctctccagcctgatgcacctagtccaggaccatccgaccatcctctttttcaggccaaatctgctcgaggagtctgtaaggttatgtgtttccatccttggtctgacgtgacattaccacttatgtccgtacccgagatccgggcggtcgttgatgcctgggcctcagtgactgaagaattaggggctcagtatccatgggtccagatattcgaaaacaaaggagctatgatgggatgttctaacccccatccccactgtcaagtctgggcatcatcctttctccccgatattgcacagcgggaggaacgaagtcagcaggcatataaatcccagcatggggagcccctactcatggaatatagtcggcaggagctcctgcgtaaagagagactagtgctcactagtgaacactggctcgtgctagttcctttctgggcgacatggccctatcagactttactgctgccgcgaaggcatgttagaaggctccccgagcttactcccgctgaaagggacgatcttgcctccatcatgaaaaaactcctgacaaaatatgacaatcttttcgagacatctttcccatatagtatggggtggcatggagcccccacagggtctgaggcaggagccaactggaaccactggcaacttcatgcccattattatcccccccttttaagatcagcgacagtacgcaagtttatggtgggatatgaaatgctcgcgcaggctcagcgtgatttaacaccagaacaggctgctgaaaggctgagggccctcccagaggtgcactaccacctgggacagaaagatagggaaacggcaactatcgcc

SEQ ID NO: 12067 - DNA, 1137 bp, synthetic construct
  misc_feature 1..1137: note = source = /note="Description of Artificial Sequence: Synthetic coding sequence"
  source 1..1137: mol_type = other DNA
atgtcccggtccggtacggatccacagcaaaggcaacaggcttctgaggctgacgcagcggcagctacttttagggcaaatgaccatcagcatatcagatacaaccccctccaagatgaatgggtgctggtttctgcacacagaatgaaacgcccttggcagggacaggtggagccacagctgttgaagaccgtccctcggcatgaccccctcaaccccctctgtccaggcgcaattagagcaaacggcgaggtaaatccacagtacgactcgacatttctttttgacaatgattttcctgccctccagccagatgcgccttcccctgggccgtctgaccatcccttgtttcaagcgaagtccgctcgcggtgtatgcaaggtcatgtgctttcacccttggagtgatgtgaccctgcctcttatgtcagtgccagagatcagggctgtggtggatgcatgggccagcgtgactgaggagcttggcgcccagtatccctgggtgcagatttttgaaaataaaggcgcaatgatgggctgcagcaatccacatcctcactgtcaggtgtgggcctcctcattcctgccagatatagcccagagagaagagaggtctcagcaggcctacaaaagccagcatggggagcctcttctcatggaatattccaggcaggagcttctccgtaaggagaggcttgtgctcacctcagagcactggctggtcctggtccctttttgggctacttggccttatcagacactcttactgcctcgcagacacgtgaggcgacttcccgagctgaccccagcagagcgggacgatttggctagtatcatgaaaaaacttctgaccaagtatgacaacctattcgagaccagctttccttattcaatggggtggcatggtgccccgaccgggtcagaagccggagccaattggaaccactggcaactgcatgcacactactaccctccgttactgcggtcagctacagtgcgcaaattcatggtgggctatgagatgctggcgcaggcacaacgcgatctgacccccgagcaggccgcagaaagactgcgggcactacccgaagtgcattaccacctggggcagaaggatcgcgaaacagcaacaattgct

SEQ ID NO: 12068 - DNA, 1137 bp, synthetic construct
  misc_feature 1..1137: note = source = /note="Description of Artificial Sequence: Synthetic coding sequence"
  source 1..1137: mol_type = other DNA
atgagccgctccggcactgacccgcaacaaaggcagcaggccagcgaagctgacgcggcggccgccacttttcgcgccaacgaccaccaacacatcagatacaacccgctccaggatgaatgggtgctggtgtccgcccatcggatgaagcggccgtggcaaggacaagtggagccccagctgctcaaaactgtcccccgccacgacccactcaacccgttgtgccccggagccatcagagctaacggggaggtgaacccacagtatgacagcactttcctttttgacaacgacttccccgccctccaaccggatgcaccttcaccgggaccttcagaccacccactctttcaggccaagtcagccagaggcgtctgtaaggtcatgtgttttcatccgtggtcagatgtgactttgccgctcatgtccgttcctgagatcagagccgttgtcgacgcatgggctagcgtgactgaggaactcggggcccagtacccatgggtgcagatcttcgagaacaaaggggctatgatgggatgtagcaacccgcatccgcactgtcaagtgtgggcgtcatccttcctcccagacattgcccagcgggaagaacggtcgcagcaggcctacaaatcgcagcacggagaaccgctgctcatggagtactcacgccaggagctgctgcggaaggaacgtctcgtcctgacctcggagcactggctggtcctggtccccttctgggctacctggccgtaccagaccctcctgcttccgcggcgccatgtgcgcaggctgccggaattgacgcctgcggaacgggacgacttggcctcaatcatgaagaagctcctgactaagtacgacaacctgttcgaaaccagcttcccgtactctatgggctggcacggtgccccgaccggctccgaagcgggagcaaactggaaccactggcagttgcacgcccattactaccctccgctgctgaggtcagcgacggtgcggaagttcatggtgggatatgaaatgctggcgcaggcccagcgggacctgaccccggagcaggcagccgagcgcctgcgcgccctgccggaggtgcactaccatcttggccagaaggatagagaaaccgcaaccattgca

SEQ ID NO: 12069 - DNA, 1137 bp, synthetic construct
  misc_feature 1..1137: note = source = /note="Description of Artificial Sequence: Synthetic coding sequence"
  source 1..1137: mol_type = other DNA
atgtccagaagcggaaccgacccgcaacaacgacaacaagcctccgaagcagatgccgccgctgcaactttccgcgcgaacgaccaccaacacatcaggtacaatcctctgcaagatgagtgggttctagttagcgctcaccgcatgaaaaggccctggcagggccaagtcgaaccacagttgttgaagacagtgcccagacacgatccgcttaatcccctgtgtcccggtgctatcagagctaatggagaggtgaaccctcagtacgattcaactttcctgtttgataatgacttccccgcattacaaccagatgctcctagcccaggcccctcggatcatcccctctttcaggccaagagcgcccggggagtgtgcaaagtaatgtgctttcatccatggtctgatgtgactctgcccctgatgtcggtacccgaaatccgcgcggtggtggacgcttgggctagcgtgactgaagaactgggagctcagtacccatgggtgcagattttcgaaaataagggcgccatgatgggatgttctaatccacatccacattgccaggtttgggcctcttcattcctgcctgacatagcacagcgggaggagcggagccagcaggcctataaatctcagcatggagagccactcctgatggaatattcacggcaagagctgctgaggaaagagcgcctggtcctcacgtccgagcattggctggtacttgtccctttctgggccacatggccgtaccaaaccctcttactgccgcgtcggcatgtcaggaggcttccagaactcacgcccgcagaaagagacgaccttgcgtcaattatgaagaaacttctgacaaagtatgacaatctattcgaaacaagttttccgtattcaatggggtggcatggagctccaacgggttctgaggcgggggctaattggaaccattggcagctgcatgctcactattatcccccgctccttcgaagtgccacagtgaggaagtttatggtggggtacgagatgcttgctcaggcccagcgagacctcaccccagagcaggccgcagagaggctgcgagcacttcctgaagtccactatcatctggggcaaaaggaccgggagactgctaccattgcc

SEQ ID NO: 12070 - DNA, 1137 bp, synthetic construct
  misc_feature 1..1137: note = source = /note="Description of Artificial Sequence: Synthetic coding sequence"
  source 1..1137: mol_type = other DNA
atgtccagaagcggcactgatccgcaacagcgccagcaagcatcggaggcggacgctgccgctgctactttccgggccaacgatcatcagcatataaggtacaatccgcttcaggacgagtgggtgttggtctccgctcaccgcatgaaacgcccgtggcagggacaagttgaacctcagctacttaaaactgtgcctcggcacgatccgctcaatcctctatgcccaggggcgattcgagctaacggcgaggtaaatccacagtacgacagtacgttcctgtttgataatgacttccctgccctgcagcccgacgctccatcccctggtccgtcagatcatcctctattccaggcgaaaagtgcacgcggcgtgtgtaaggtgatgtgcttccacccatggagcgatgtcactttgcccctgatgtccgtgcccgagatacgcgctgtcgtggatgcctgggcgtcggttacggaggagttaggagcccagtatccgtgggtgcagatattcgagaataagggcgccatgatggggtgtagcaacccccaccctcactgtcaggtctgggccagctcttttctgccagacatcgcacagagagaagagagaagtcagcaggcctacaagtcacaacacggggaaccgctactgatggagtacagtagacaggaattgctgcgcaaagagcgccttgttctgaccagcgaacactggctggtgcttgtgcctttttgggcaacgtggccataccaaacgttgctgctgccccgacgacacgtacgtagattgcccgaactgacgcctgcagagagagatgatctggccagcattatgaaaaaactgctgaccaaatacgataacctctttgagaccagtttcccatactctatgggttggcacggggctcctaccggctccgaagccggtgctaattggaatcattggcagctacacgctcactattaccccccactgcttcggtctgcaacagtaagaaagttcatggttgggtacgagatgttggctcaggctcagcgcgatctgactcccgaacaggccgcagagaggctccgtgcgctgccagaggtgcactatcacctcggacagaaggaccgcgagactgccaccattgct

SEQ ID NO: 12071 - DNA, 1137 bp, synthetic construct
  misc_feature 1..1137: note = source = /note="Description of Artificial Sequence: Synthetic coding sequence"
  source 1..1137: mol_type = other DNA
atgtcgaggtccggtactgatcctcaacaaaggcaacaggcctctgaggcggacgccgcagctgcaactttccgagcaaatgatcaccaacacataagatacaatccgctccaagacgaatgggtcttggtcagtgcgcaccgtatgaagaggccgtggcagggtcaggtcgaacctcagctcctaaaaactgtacccagacatgatccgcttaacccactatgtccaggagcaatacgggctaatggtgaggttaacccgcagtatgactcaactttcctcttcgataacgattttcctgcgctacagccagatgccccttccccagggccaagtgatcatcctctctttcaagctaagagcgctcgcggagtgtgtaaggttatgtgttttcacccatggtctgatgtaacgcttcctttgatgagcgtgccagaaattcgtgctgttgtggatgcttgggcatcagttactgaagagcttggggcccaatacccatgggtgcaaatatttgaaaacaaaggagctatgatggggtgttctaatcctcaccctcattgtcaagtgtgggcttctagcttcctacccgatatcgctcaaagagaggaacggtctcagcaggcgtacaagtcccaacatggggagcctctgctaatggagtactcaagacaagagttgctgaggaaggaaagacttgtccttacttctgagcattggcttgtgcttgtgcctttctgggctacttggccctaccaaactctgctcctacctaggcgccatgttcgacgattgcccgaactcaccccggctgagcgggatgatctcgcatccataatgaaaaagttgttaacgaaatatgataatttgtttgagactagcttcccctattctatgggctggcacggagctccaacgggttccgaagcaggcgcaaattggaatcattggcagctgcatgctcattactatcccccattgctgcgcagcgctactgtcaggaaatttatggttggttatgagatgcttgcacaggctcaacgagatctaacgccagaacaagcggccgagaggcttcgagccctcccagaagttcactaccatctcggtcaaaaggatagagaaaccgccactatagct

SEQ ID NO: 12072 - DNA, 1137 bp, synthetic construct
  misc_feature 1..1137: note = source = /note="Description of Artificial Sequence: Synthetic coding sequence"
  source 1..1137: mol_type = other DNA
atgagtaggtccggaacagatccacagcagcggcaacaggcaagcgaggccgacgctgcagctgcaacctttcgagcgaacgaccaccagcacattcgctataaccccctacaagacgaatgggtcttggtgagcgcccacaggatgaaaaggccatggcagggccaagtggagccccagctactgaagaccgtgccaaggcacgaccctctcaacccactttgtcctggtgccatcagggctaatggcgaagtcaacccacagtacgatagcacttttctgttcgacaatgactttcctgccttgcagccagatgctccctctcccggaccctctgatcaccccctcttccaggcgaagtccgcgcgtggagtgtgtaaggtgatgtgctttcatccatggtccgatgttaccctgccactgatgagcgtgcccgaaatcagagctgtggtggatgcctgggcctcagtgactgaggagttgggcgctcaatatccttgggtgcagatttttgagaataaaggggccatgatggggtgctctaaccctcatccccactgtcaagtctgggcttctagcttcctccctgatatcgcccaacgggaagagaggagtcaacaggcctataagtctcagcacggggaacctttgctcatggagtactcacggcaagagctgctcagaaaagaacgcctcgtgctaacttccgaacattggctggtgctcgtaccgttctgggcaacttggccgtaccagaccctgctgctgccccggagacatgtccgccgcctccccgaattgacccctgccgaacgagacgatcttgcttcaataatgaaaaagctcctcacaaaatatgacaatctcttcgaaacctcctttccatattccatgggatggcacggggctcccaccggttcggaggcaggggctaattggaaccattggcaattgcacgctcattattacccccccctgttgaggtctgcgacagtacggaaatttatggtcggatatgagatgctggctcaagcccagcgtgaccttacacctgaacaggctgccgaacgactgagagccctgcccgaggtgcactaccatctcggacagaaagacagggaaacggcgaccattgcg

SEQ ID NO: 12073 - DNA, 1137 bp, synthetic construct
  misc_feature 1..1137: note = source = /note="Description of Artificial Sequence: Synthetic coding sequence"
  source 1..1137: mol_type = other DNA
atgtctaggagtgggacagatccacagcagcgacagcaggcctcagaggccgacgccgccgctgcgacgtttagagctaacgaccaccaacatatcaggtataatcccctgcaggacgagtgggtcctggtgtccgctcatcgcatgaaacgcccctggcaggggcaagtggagccccagctcctgaaaacagtaccccggcatgatcccctcaaccccctttgcccaggcgccattcgggcaaacggggaagtaaatcctcaatatgatagcactttcctcttcgataacgacttccctgccctgcaaccggacgccccatcccctggcccttccgaccaccctctgttccaggccaaatcagccaggggggtgtgcaaagtcatgtgtttccatccatggtctgacgtgactctgcctctgatgagcgtgcccgagattcgcgctgtggtcgatgcctgggcctccgtaaccgaggaattgggagctcagtacccctgggtccagatctttgagaataaaggcgctatgatgggatgctctaacccccacccccactgccaggtctgggcgagctcctttctgccggacattgcccagagagaggagcggagccaacaagcgtacaagtcccagcacggcgaaccacttctgatggaatattcccgccaggaacttcttaggaaagaaagactggtgttgacaagcgagcattggttggtcctcgtgcccttttgggctacgtggccataccagactctgcttctgccacgcaggcatgtgcgcagactgccggagctgacgcccgcagagcgggatgatttggcatctatcatgaaaaagctcctcaccaagtatgacaacctcttcgaaacctctttcccatactctatgggctggcacggggctccgaccggatcagaggccggggcaaactggaatcattggcagctgcacgcacactattacccacctcttctcaggtccgccacggtccgaaaattcatggtgggatacgagatgctggcccaggctcagcgggacctgacccccgaacaagctgcggaaagactcagggctctgcctgaggtgcattaccatctggggcagaaagatagagagaccgccacgatcgca

SEQ ID NO: 12074 - DNA, 1137 bp, synthetic construct
  misc_feature 1..1137: note = source = /note="Description of Artificial Sequence: Synthetic coding sequence"
  source 1..1137: mol_type = other DNA
atgtcaagaagtggaactgatcctcaacaacgtcaacaagctagtgaagcggatgctgctgcagctactttcagagcaaatgatcaccagcatattaggtataatcctcttcaagatgaatgggtgttggtttctgcacatagaatgaaaagaccgtggcagggacaagtagagccacaattgttaaaaactgtgccacgtcatgatccacttaatcccctatgcccaggagccattcgagctaatggagaagttaatccgcaatacgatagtactttccttttcgataacgatttcccagccctgcaacctgatgctccgtcacctggaccaagcgatcacccgctgttccaggctaagagcgcaagaggggtttgtaaggtaatgtgtttccacccatggtccgacgtcactcttcctttaatgtcggtccctgaaatcagggcagtcgtggacgcttgggccagtgtgacggaagaattgggagcccagtatccgtgggtgcaaattttcgaaaataagggagccatgatggggtgttccaaccctcacccgcattgtcaagtttgggcgtcttcgttcctaccagatatagctcaacgagaagagcgcagccaacaagcatacaaaagtcaacacggggaacctttactaatggagtactctaggcaggagctccttcgaaaagaaagattggttctgacaagtgaacattggctagtgcttgttcctttctgggccacatggccatatcaaactcttcttcttccacgtcggcatgtgagacgattaccggaactgactccggctgaacgggatgaccttgcttctatcatgaaaaaactgctcacaaaatacgataaccttttcgagacttcctttccatatagcatgggatggcacggtgcgccaacaggatcagaggctggagccaactggaaccactggcaattacatgcacattattaccccccgcttctgcgttcagccaccgttcgtaagttcatggttggctatgaaatgttggcacaggcacagcgtgaccttacaccagagcaggccgcggaaaggctccgcgccttacctgaagtacattatcatctaggacaaaaagacagagaaacagcaaccatcgcc

SEQ ID NO: 12075 - DNA, 1137 bp, synthetic construct
  misc_feature 1..1137: note = source = /note="Description of Artificial Sequence: Synthetic coding sequence"
  source 1..1137: mol_type = other DNA
atgagtagaagcgggaccgatcctcaacagaggcagcaggctagcgaggcagacgctgcagctgccactttcagagccaacgatcatcaacacatcagatacaaccccctgcaggacgagtgggttctggtttccgcacatagaatgaaaaggccatggcaaggacaggtggaaccccagctgttaaaaaccgtcccccgccacgacccactcaacccgttgtgcccaggagcaatccgcgcgaacggcgaggtgaatcctcagtacgatagtacctttttgtttgacaacgatttccctgcgttacagcccgacgctccaagccctggcccaagcgaccatccactgttccaagccaaatctgcccgtggagtgtgcaaggtgatgtgctttcacccctggtctgacgtgacattacctctgatgagcgtccctgagatcagggcagtcgtggacgcatgggctagcgtgacagaagaattgggagctcagtacccgtgggtgcagattttcgagaacaagggtgcaatgatgggctgcagcaacccacacccacattgtcaggtgtgggcatccagctttttgccagatatcgcccagagagaagaaaggtctcaacaagcctacaaatctcaacatggcgagcctctgttgatggaatactctaggcaggagctcctgcgaaaggagcggcttgtcttaacgtcagagcactggttggttctggtccccttctgggccacctggccctaccaaactctcttgttacctcgaagacacgtccgaagactgccagagctgacaccagcagagcgcgatgatctggccagcattatgaaaaaactccttacaaagtatgacaacctgttcgaaacatccttcccatatagcatgggatggcacggcgccccaaccggctcggaggccggagccaattggaatcattggcagctccacgctcattactatcccccattgttgaggagtgctacagttcggaagtttatggtgggatacgaaatgcttgcccaagcacagagagacctgacccccgagcaagctgctgagaggcttagagcccttcctgaggtccattaccacttgggacaaaaagatagagagaccgctactatcgcg

SEQ ID NO: 12076 - DNA, 1137 bp, synthetic construct
  misc_feature 1..1137: note = source = /note="Description of Artificial Sequence: Synthetic coding sequence"
  source 1..1137: mol_type = other DNA
atgtcacgcagtgggaccgatccacaacaacggcaacaggcatccgaagcagacgccgcggcagcaactttccgcgcaaatgatcatcagcatatacggtataacccactgcaggacgaatgggtccttgtgtcggcacatcgtatgaagaggccctggcaaggccaggtggagccccagcttcttaagacggtgcccaggcatgatccgctgaaccctctgtgtcctggagcgattcgggccaacggagaggtgaacccccaatacgatagcacgttcctctttgataatgattttcctgccctgcagcctgatgcaccttccccaggcccatcggaccatccactctttcaggcaaaatcggcacgaggcgtttgtaaggtgatgtgctttcatccctggtcagatgtcaccctgcccctgatgtcggtgcctgaaatcagagctgtggttgatgcttgggcctcggtcaccgaggaactgggagcccaatatccgtgggtgcagatatttgagaacaagggagccatgatgggctgttccaacccacatcctcattgccaagtgtgggcatcttccttccttccagatattgcccagagagaggaaagaagccagcaggcatacaagtcccagcacggtgaacctctgcttatggaatacagcagacaagagctccttaggaaagaacgccttgtccttacctcggagcattggctcgtattggtgccattctgggcgacttggccatatcaaaccctgctcttgcccaggcgacacgttcggaggctccccgagctgactcccgctgaaagggacgatttggcctcgattatgaagaaacttcttactaaatacgataacctctttgaaacctcgttcccttactcaatgggctggcatggggcacccactggttccgaagcaggagcaaactggaaccactggcaactgcatgcacattactaccctcctttgcttcggtcggcaacggtgcggaaattcatggtgggttacgagatgctggcacaagcacaacgcgaccttactcctgaacaggcagcagaaaggttgagagcgctgcctgaagtgcactaccatctggggcagaaagacagggaaaccgcaaccattgca

SEQ ID NO: 12077 - DNA, 1137 bp, synthetic construct
  misc_feature 1..1137: note = source = /note="Description of Artificial Sequence: Synthetic coding sequence"
  source 1..1137: mol_type = other DNA
atgtcccgcagtggaacagacccccagcaaaggcagcaagcttccgaggcggatgccgcagcggctacatttagagcaaatgaccatcagcatattcgttacaacccattacaggatgaatgggttctggtgagcgcccacaggatgaagcggccatggcaggggcaggtagaacctcagctgttaaaaacagtacctagacatgacccgttgaatcccctgtgtcctggcgctattagagccaacggcgaggttaacccacagtacgattcgaccttcctctttgataatgactttcctgcgctgcagccggacgccccaagccctggcccatctgatcaccccctgtttcaagccaaaagcgcccgaggcgtctgtaaggtgatgtgttttcacccttggtccgatgtgaccctcccactgatgtccgtccctgaaatcagggccgtggtggacgcctgggcgtcagtgactgaagagctgggagctcaatatccatgggtccagattttcgagaacaagggtgctatgatggggtgctccaaccctcaccctcactgccaagtatgggcttcatccttcctgcccgacatcgcgcagcgggaggaacgcagtcagcaggcttacaagagccagcatggagaaccattgctcatggagtattcacgacaggagctcctcagaaaagaacggctggtgttaacctccgagcactggctagtactggttccattctgggccacttggccatatcagacattgctgctccctcggagacacgttaggcgacttccggagctcacacctgcggagcgggacgatctggcttccataatgaagaaactgctcaccaagtacgataatctgtttgagaccagcttcccttatagtatgggatggcatggagcacctacaggtagtgaagccggagcgaattggaaccattggcagctgcatgctcattactatcctcccctgttgcgcagtgccacagtgcgcaaattcatggtgggttatgaaatgctggcccaggcccagcgggacctgacacctgaacaggcggccgagcgccttcgcgccttaccggaggtgcactatcacctcggccagaaggacagagagacagccacgatcgcc

SEQ ID NO: 12078 - DNA, 1137 bp, synthetic construct
  misc_feature 1..1137: note = source = /note="Description of Artificial Sequence: Synthetic coding sequence"
  source 1..1137: mol_type = other DNA
atgtccagatcaggaaccgatccacagcaacgccagcaagcatcggaggccgacgccgcagctgccacgttccgcgcaaacgaccaccagcatattcggtataatccattgcaggatgaatgggtcttggtgtcggcgcatcgtatgaagcgcccatggcaagggcaggtggaaccacaactgctgaaaactgtcccacgccacgatcctctcaacccactctgtcctggggcaattcgcgcaaacggtgaagtcaacccgcagtatgactccacttttcttttcgacaatgattttccggctctgcaacctgacgctccttcgcctggaccgtcggaccatccactttttcaggcaaagtcggcaagaggagtgtgtaaggtgatgtgtttccatccatggtccgatgtcaccctgcccctcatgagcgtccctgaaatcagagccgtggtggacgcctgggcctccgtgaccgaggagctgggggcgcagtacccttgggtgcagatttttgaaaacaaaggcgcaatgatgggatgttcaaatccgcatccacactgccaagtgtgggcgagctcatttcttccagatattgcacaacgtgaagaacgatcgcagcaggcttacaaatctcagcacggagagccactgctcatggagtattccagacaagaacttttgagaaaagagcgcttggtgcttacttcggagcactggctggtcctggttcctttctgggcgacctggccgtatcaaactctcctgctgcctaggcgccatgtgagacgactcccagagttgactcctgcagaaagagatgatttggcctccattatgaaaaagctcctgactaagtacgataacctttttgaaaccagctttccttactccatgggatggcatggcgcacctactggttcagaggccggcgcgaactggaaccattggcaactgcacgcccattactacccacctctcctcaggtcggcaaccgtccggaagtttatggtgggttacgagatgttggcccaagcccaaagagatctgaccccagaacaagcagcagaaagactcagagcacttcctgaagtgcattaccatctgggacaaaaagaccgtgagacggcgaccatagca

SEQ ID NO: 12079 - DNA, 1137 bp, synthetic construct
  misc_feature 1..1137: note = source = /note="Description of Artificial Sequence: Synthetic coding sequence"
  source 1..1137: mol_type = other DNA
atgtccagaagcggcaccgatccacaacagcgccagcaagcttcagaggccgacgcagcggccgccacctttcgcgcgaatgatcaccagcatattcgctacaacccactccaagatgagtgggtgctcgtgagcgcgcaccgtatgaaacggccgtggcagggacaggtggagccgcaattgctgaagaccgtacctcgccacgaccctctcaatccgttgtgtccgggcgcgattcgcgcgaatggtgaagttaaccctcagtatgatagcacattcctgtttgacaacgatttcccagcacttcaaccggatgcgccaagccctggcccctccgaccaccctctgtttcaagccaagagcgcccgcggtgtgtgtaaggttatgtgcttccacccgtggagcgacgtgacgttaccgctgatgtccgtcccagagatacgcgccgttgttgacgcatgggcatctgtgacggaagaattgggtgcgcagtacccttgggtgcagatcttcgaaaataaaggtgcgatgatgggttgtagcaacccgcaccctcattgtcaggtgtgggcgagctctttcctccccgatatcgcccagcgcgaagagcgctcacaacaggcctacaagtcgcagcacggtgagccattgctgatggagtactctcgccaagagttgctacgtaaagagcgcctggtgttaaccagcgaacactggttagtgttggtaccattctgggcgacctggccgtatcagacccttttgttgccgaggcgtcacgtgcgtagattgcctgaattgactcccgcagaacgcgacgacttggctagcattatgaagaagttgctaactaagtacgacaatctgtttgagacgagcttcccgtactccatgggatggcacggtgccccaaccggttctgaagcaggagccaactggaaccattggcaactgcatgctcattactaccctccgctgctgagatctgcgacagtcaggaaatttatggtgggttacgagatgctcgcccaagcacagagagacctgaccccagaacaagccgcagaacggctgcgagcgctgcctgaggtccactaccacttgggtcagaaggaccgcgagactgccaccattgca

SEQ ID NO: 12080 - DNA, 1137 bp, synthetic construct
  misc_feature 1..1137: note = source = /note="Description of Artificial Sequence: Synthetic coding sequence"
  source 1..1137: mol_type = other DNA
atgagtaggtcgggaactgacccccaacagcggcagcaggcctctgaggcagacgccgccgctgctaccttccgcgccaatgatcatcaacacattcggtataacccactccaggatgagtgggtgcttgtgtcagcgcacagaatgaaaagaccttggcagggccaggtagagccacagctgctaaagaccgtgccaaggcacgacccactgaatcccctctgcccgggcgcgattcgcgcaaatggggaagttaaccctcagtatgatagtacatttctattcgacaacgatttccctgccttgcagccagatgctccctcacctggcccttctgaccatccactatttcaggcaaaatcggccagaggcgtttgtaaggtgatgtgttttcatccgtggtccgatgttactcttccactgatgtctgtgccagagatccgggccgtggtggacgcttgggcctctgtaaccgaagagctcggggcccagtacccatgggtgcagattttcgagaataagggcgccatgatgggctgtagtaacccccatccgcattgccaggtatgggccagttcatttctgcctgacatcgctcagagggaagagcggagccagcaagcttataaatcccagcacggagagcctctcctgatggagtactcccggcaagagcttcttagaaaggagcggttagtgctaaccagcgaacactggctggtgctcgtgcctttttgggctacatggccctaccagacgttgctgctgccgcggagacacgtgaggcgtttacccgagttgaccccggccgagcgcgacgatctggcgagcattatgaaaaagctgcttactaaatatgacaatctctttgaaacttcctttccgtattccatgggctggcacggtgcccccacgggctccgaggctggagccaattggaaccactggcaactccatgcccattattacccacccctgcttcggtccgcgaccgtgcggaaattcatggtaggatatgaaatgttggcccaggcccagcgggatctgaccccagagcaggcggcggaacgcctgcgggctctgccagaggttcactaccatttagggcagaaggatcgcgagactgctacgatagct

SEQ ID NO: 12081 - DNA, 1137 bp, synthetic construct
  misc_feature 1..1137: note = source = /note="Description of Artificial Sequence: Synthetic coding sequence"
  source 1..1137: mol_type = other DNA
atgtctaggtctggaacggatccgcagcaaagacagcaggcttctgaagctgacgccgcagcagcaacctttagggctaacgaccatcagcacattaggtataacccactccaagatgagtgggttctcgttagcgctcatcgcatgaagagaccttggcagggacaggtggagccacagttgctgaagacagtcccaagacatgaccccctcaatccactgtgtccgggcgccatacgcgctaacggagaagtgaatccacaatatgactccaccttcctttttgataatgatttccctgccctgcaacctgatgccccctccccaggaccaagcgaccatccattattccaagctaagtctgctagaggagtatgtaaagttatgtgctttcacccttggtctgatgtaaccctgcctttgatgtcagtgcccgagataagggccgtggtggacgcctgggcctcggtcacagaagaactcggggctcaatacccttgggtgcagattttcgaaaacaaaggagcaatgatggggtgcagcaaccctcatcctcattgccaggtgtgggcctcgtctttcctgcctgatatcgctcagcgagaggagaggagccagcaagcatataaatcccagcatggtgagcctttgctgatggagtacagcagacaggaactcctgagaaaagagaggttagtccttacttccgagcattggctggtgcttgttccgttctgggctacctggccctaccaaacactactcctgcctcgtcgccatgtgcggcgattgcctgaactgacccccgccgagagggatgatcttgcctctattatgaaaaaattgctgacaaaatacgacaacctgttcgagaccagcttcccctattctatgggatggcacggcgcccccactggaagcgaagcaggggctaattggaaccactggcagcttcatgcgcactactacccccctttacttcgaagcgccacggttcggaagttcatggtcgggtatgaaatgctggctcaggcccaacgggacctcacccccgaacaagctgctgagagactccgtgctcttcccgaggtgcattaccatctgggtcaaaaggatagggagacagctactatcgcc

SEQ ID NO: 12082 - DNA, 1137 bp, synthetic construct
  misc_feature 1..1137: note = source = /note="Description of Artificial Sequence: Synthetic coding sequence"
  source 1..1137: mol_type = other DNA
atgtcacgatctggcacagatccacagcagcgacaacaagccagcgaggccgacgccgctgctgccacgtttcgtgccaacgatcaccagcatatcaggtacaatcctctgcaggacgaatgggtgcttgtgtccgcccatagaatgaaacgcccctggcaggggcaagtcgagcctcagctcctgaagaccgtccctcgtcatgatcccttgaacccactgtgtcctggcgcaatccgggccaacggcgaagtcaacccccagtatgatagcactttcctatttgacaacgacttccccgccctacaacccgacgccccctcacctggcccttccgaccacccactttttcaggccaaatccgccaggggggtgtgcaaggtcatgtgttttcatccctggagcgacgtcaccctgcctctgatgtctgtgcctgagataagggccgtggtcgacgcatgggcaagcgtgaccgaagaactaggcgcgcagtacccttgggtacagatttttgagaataagggcgcaatgatggggtgtagcaacccccatccccactgccaagtgtgggctagctcattcctccccgatattgcacagcgtgaggaaaggtctcagcaggcatacaagtctcagcacggagaacccctcctcatggagtattcaaggcaggaactcctgagaaaggagcgactagtgctcacctccgaacactggctggtgctggtgcccttttgggctacttggccgtaccagactcttttgctgcccagacgacatgtgcgccggttgcctgagttgacacctgccgaacgcgatgatctggcctccataatgaaaaaattgctgacaaaatacgacaacctctttgaaacatcattcccttatagtatgggctggcacggggcccctaccggaagcgaggcaggcgcgaactggaaccactggcagctgcatgcccattattatcctcccctcctgcgctctgctaccgtgcgaaaattcatggtgggttacgaaatgctcgcacaagcccaacgcgatctgactcccgaacaggccgcagagcggcttcgcgctctgcctgaggtccactaccacctcgggcagaaggacagagagaccgccacaatcgcg

SEQ ID NO: 12083 - DNA, 1137 bp, synthetic construct
  misc_feature 1..1137: note = source = /note="Description of Artificial Sequence: Synthetic coding sequence"
  source 1..1137: mol_type = other DNA
atgagtaggtcaggtactgatcctcagcagagacagcaggcgagcgaagcggatgctgccgccgcgacgttccgagctaatgatcatcagcacataaggtacaaccctctgcaggacgaatgggttctggtgagcgcccatcggatgaaaagaccctggcaaggccaggtggagccccagctgctgaagactgtgcccagacatgacccactgaatcccctgtgccccggcgccatacgagccaacggagaggtcaacccccagtacgattctaccttcctgtttgataatgacttcccagcactgcaacccgacgcgccctcccccggacccagtgatcatccgcttttccaggccaagtcggccagaggggtctgtaaagtaatgtgctttcacccttggagcgacgtcacactcccgcttatgtcagtaccagagattcgcgccgtggtggatgcctgggcaagcgtaacagaggaactcggagcccagtatccatgggtgcagatcttcgagaacaaaggcgccatgatgggatgtagtaacccccaccctcactgccaggtgtgggctagctcattcttgcccgatatagcccaacgagaagaaagatcccagcaggcctacaagtcacagcatggcgaaccactgttaatggaatactcccgacaagagcttctccgaaaggagagactggtgcttaccagtgaacattggctggtcctggtgccattttgggctacctggccctaccagactctcctcttacctcgtagacatgtgcggcgactgcctgaactcacccctgcggagagagatgacctggctagcatcatgaagaagctgctgactaaatatgacaacctcttcgagacctccttcccctactcaatgggttggcacggtgccccgaccgggtccgaggcaggtgcaaactggaaccactggcagttacacgcccattattatccccctctcctgcgatctgctaccgtccgcaaatttatggtgggttacgagatgcttgcgcaggcccagcgcgatttgaccccagaacaagcggcggaaaggctgagagctctccccgaagttcactatcacctcggacagaaagaccgagagacggctacaatcgct

SEQ ID NO: 12084 - DNA, 1137 bp, synthetic construct
  misc_feature 1..1137: note = source = /note="Description of Artificial Sequence: Synthetic coding sequence"
  source 1..1137: mol_type = other DNA
atgtcccgtagtggaaccgacccccagcaacgtcagcaggcctctgaagccgatgccgcggcagccaccttccgagccaacgatcaccagcatatacgctacaatcccttgcaagacgagtgggtgttggtatctgctcatagaatgaagaggccttggcaggggcaggtcgagccacagctactgaaaacggtgcctcgccatgacccattgaaccctctatgtccgggcgcgatcagagctaacggcgaggtcaacccgcaatacgactcaacttttttgttcgataacgacttccctgctctccagcccgacgcacccagccctggacctagcgaccatcctctcttccaagctaagagcgcccgcggcgtgtgcaaagtgatgtgttttcatccttggtcagacgtaaccctgccccttatgtcagttcctgaaatacgagctgttgttgacgcctgggcttctgtcaccgaagagctcggcgcccaatatccttgggtgcagatttttgaaaataagggggccatgatggggtgctccaatccgcatccccactgtcaggtatgggctagctccttcttgccagacatagctcagcgagaggagcggtctcagcaggcatacaagtctcagcacggcgagcctctgctaatggagtattcaaggcaagaactgctcaggaaggagcggctcgtcctaactagtgaacattggcttgtattggtgcctttttgggccacttggccttatcagaccttgttgctcccgcgccggcatgtgaggaggctgcctgaactcacaccagccgagagagacgatctcgcatccatcatgaaaaaactgctcactaagtacgataacttattcgaaacgagctttccttattctatgggttggcacggggccccaacaggctctgaagccggagctaattggaaccactggcagctacacgcgcactattacccccccctgctgcgctcagccacagtgcggaagtttatggttggctacgagatgctcgcacaggctcagcgtgacctaacacctgaacaggccgccgagcgactgagagccctgccggaagttcattatcatctcggacaaaaggatcgagaaactgcgaccatcgct

SEQ ID NO: 12085 - DNA, 1137 bp, synthetic construct
  misc_feature 1..1137: note = source = /note="Description of Artificial Sequence: Synthetic coding sequence"
  source 1..1137: mol_type = other DNA
atgtctcgaagcggaacggacccccagcaacgccaacaagctagcgaggctgatgctgctgcggcaacgtttagagctaatgatcatcagcatattcgatataacccgctgcaggatgagtgggtgctggtctcggctcatcgcatgaagcgaccttggcagggtcaagtcgagcctcagctactaaagactgtccctcgccacgacccattgaatcccctgtgcccgggcgccattcgcgcaaatggtgaggtgaatccccagtacgactctacatttctttttgacaacgactttcccgctctccagcctgatgctcccagcccggggccatctgaccacccactgttccaggctaaaagtgctaggggggtatgcaaggtaatgtgtttccacccatggtccgatgtcacactgcccctgatgagtgtgccagagatacgcgctgtagttgacgcctgggcttctgtgacagaggagctgggcgcccagtacccttgggttcagatatttgaaaataagggcgctatgatggggtgttccaaccctcaccctcactgccaggtgtgggccagctcctttttacctgacattgctcagcgcgaggagcggtctcaacaagcttataaatcacagcatggagagccgcttcttatggagtactcgcggcaggagcttttgagaaaggaacggctggtcctaaccagcgaacactggcttgtcttggtccccttctgggcaacctggccctatcaaaccctgctgctgccaagaaggcatgtgagacgccttccggaattgacccctgccgaacgcgacgacctggcctctatcatgaagaagctgctgacaaaatacgacaacctgttcgaaaccagcttcccatattctatgggctggcatggggcccctaccggcagtgaagctggggcaaactggaatcactggcagctccacgcgcactactatcctcctctcctccgttcagctacagttaggaagtttatggtaggctatgaaatgcttgcacaggctcagagagacctcacccccgaacaggcggccgagaggctgagggcactgcccgaagttcattaccatctgggtcagaaggatagggaaaccgcaaccatcgcc

SEQ ID NO: 12086 - DNA, 1137 bp, synthetic construct
  misc_feature 1..1137: note = source = /note="Description of Artificial Sequence: Synthetic coding sequence"
  source 1..1137: mol_type = other DNA
atgagtcgcagcggtactgaccctcagcaaagacagcaggctagcgaggccgacgctgcagccgctacctttcgagctaacgatcaccagcatatacgatataaccccttacaggatgaatgggtcctagttagcgcacaccgaatgaaaagaccctggcagggccaggtggaaccccagctattaaagacagtgccacgtcatgaccctctgaatccactgtgcccaggcgctattagagcaaatggggaagtgaatccacagtacgactctaccttcctatttgacaacgatttccccgcactccagccagatgcacctagccctggcccaagtgatcatcccttgttccaagctaagtcagccagaggcgtttgcaaggttatgtgcttccacccctggagcgatgtgacacttcctctgatgtccgtccccgagatacgcgccgtggtggacgcatgggcctcagttactgaggagctgggcgcccagtacccatgggttcaaatcttcgagaataagggtgctatgatgggctgttccaatccccatccacattgtcaagtttgggcatccagctttctgcctgatatagcacaacgggaagaaaggtctcaacaggcttacaagtctcaacacggcgaaccactcctgatggagtattctcggcaggaacttctcagaaaggagcgacttgtgctaacttccgaacattggctggttctcgtgccattttgggcaacatggccttaccagaccctgctcctgccaaggaggcatgtgcggaggctgcccgaactgactccagcagagcgagacgatcttgcatcaattatgaagaagctgttaactaagtacgataatttatttgaaaccagcttcccttatagcatggggtggcatggtgccccaaccgggtctgaggctggagccaactggaaccactggcagctccacgcccactattatccaccactgctacggagtgctaccgtcagaaagttcatggtggggtatgagatgttagctcaggcccagagggacctaacaccagagcaggccgctgaaaggttaagagccctccctgaagtgcattatcaccttggacagaaagatcgagaaaccgctacaatcgcc

SEQ ID NO: 12087 - DNA, 1137 bp, synthetic construct
  misc_feature 1..1137: note = source = /note="Description of Artificial Sequence: Synthetic coding sequence"
  source 1..1137: mol_type = other DNA
atgtcccgctcaggaaccgatccacagcaaagacaacaagcttccgaggctgatgccgctgctgccacatttagggctaatgaccatcagcatattaggtataatccgctgcaggatgagtgggttttagtatcggcgcatcggatgaaaaggccatggcaagggcaggttgaacctcagctgttgaaaacggttccgcgtcatgatcccctgaatccgttgtgcccgggagctattcgcgcaaacggagaagttaatcctcaatatgatagcacgtttttattcgataatgactttccagcactgcaaccggatgctccgtctccgggacctagcgatcatccgttgtttcaggctaaatccgcacgaggagtgtgcaaagtaatgtgctttcatccttggtcagatgtcacactgcctttgatgtcggttccggaaatacgcgctgtcgtcgacgcgtgggcgtctgtcacagaagagctgggtgctcaatacccttgggttcagatcttcgaaaacaaaggtgccatgatgggctgttcgaatccccacccgcattgccaggtctgggctagcagttttctcccggacatcgcgcagcgtgaagaaaggtctcagcaagcgtataaaagtcagcatggagaaccactgcttatggagtattcacggcaagaacttcttagaaaagaacgccttgtactcacctcagaacattggcttgtactggttccgttctgggcaacatggccgtaccaaaccttgctgcttccaaggcgccatgttcggcggcttccggaattaacacctgccgaacgcgatgatctggcgtcaatcatgaaaaaactcttaactaaatatgataatcttttcgaaacatcatttccgtatagtatgggttggcacggagcaccaacagggagtgaagcgggagctaactggaaccactggcaactgcatgcgcattattaccctccattgctgcggtctgcgacagtccgcaaatttatggtaggatacgaaatgctagcccaggcgcaacgcgatcttacgccagaacaggcagccgagcgcctgagggcgctcccggaagtccattaccatcttggacagaaagatagagagactgccacgatcgca

SEQ ID NO: 12088 - DNA, 1137 bp, synthetic construct
  misc_feature 1..1137: note = source = /note="Description of Artificial Sequence: Synthetic coding sequence"
  source 1..1137: mol_type = other DNA
atgtcaagatccggtaccgatccacagcaacgccagcaggctagcgaagctgatgccgctgctgctacctttagagctaacgatcaccagcacataaggtacaaccctcttcaggacgaatgggttcttgtgtccgcccaccgtatgaagaggccttggcagggtcaggttgagccacaacttctcaagactgtgcccaggcatgatcctcttaatccattgtgccctggtgccatcagggctaacggtgaggtaaacccacagtatgactctacttttttgttcgacaacgacttccccgctctgcaacctgatgctccatcaccaggtccatctgaccaccctctctttcaggccaagagcgcaaggggagtttgtaaggtcatgtgcttccacccatggtcagatgtgactctgcctctgatgtctgtccccgagatcagagctgtcgttgacgcttgggccagcgtcaccgaggaactgggcgctcagtatccttgggtgcaaatttttgagaataaaggcgccatgatgggctgttcaaaccctcatcctcattgtcaagtgtgggcttctagttttctgcccgatatcgcacagcgcgaagaacgttcccaacaagcttacaagtctcaacacggtgagcctctgctcatggagtactccaggcaggaattgctgcgcaaggagcgtctcgtcttgacatccgaacactggctcgtcctggtgccattttgggctacatggccttaccagactctgttgctgcctcgccgccatgtgaggaggctccctgaactgactcccgcagagagagacgacctcgcctccatcatgaagaaactcctcaccaagtacgacaacctctttgagaccagttttccttactcaatgggttggcacggtgctcctaccggcagcgaagctggagcaaactggaaccactggcaactgcacgcccactactaccctccactgctgagatccgccactgtgaggaagtttatggtgggttatgagatgctggctcaagcccagcgtgatctcactccagagcaagccgccgagcgcctgcgcgccctgcctgaagtccactatcacctgggccagaaggaccgtgaaacagccaccattgca

SEQ ID NO: 12089 - DNA, 1137 bp, synthetic construct
  misc_feature 1..1137: note = source = /note="Description of Artificial Sequence: Synthetic coding sequence"
  source 1..1137: mol_type = other DNA
atgtcccgatctggaactgacccgcagcaacgccaacaggcgagcgaggccgatgctgccgctgccaccttccgggcaaacgaccatcaacacatcagatacaatccgcttcaagatgagtgggtccttgtgtctgcacaccgcatgaagcggccatggcagggacaggtggagccacagctgctcaaaactgtgccccggcatgatccgctgaacccactttgcccgggtgctattcgcgcaaatggagaggtgaacccgcaatacgattcaaccttcctgtttgacaacgatttccctgcactgcagccggacgctccgtcaccgggcccttccgatcatccactctttcaggctaaaagcgccaggggcgtgtgtaaggtcatgtgcttccacccatggtcggacgtgaccctgcccctgatgtcggtcccggaaatcagggctgtggtggacgcgtgggcgtcggtgaccgaagagctgggtgcccagtatccatgggtgcagatcttcgaaaacaaaggggccatgatgggctgctcgaacccgcatcctcactgccaggtgtgggccagctcgtttctgccggacattgctcaacgggaggaaaggtcccagcaagcatacaagtcacagcacggggagccgctgctcatggagtactcccggcaggaactgctgcgcaaagaaagactggtcctgacctcggaacattggctggtgctcgttccgttctgggctacgtggccgtaccagaccctgctgctgcctcgcagacatgtccgccggttgcctgagctgactccagccgagagggacgacttggcctcgatcatgaagaagctgctgacgaagtacgacaacctgttcgaaacttcattcccatacagcatgggatggcacggtgccccgactggatctgaggcgggagcaaactggaaccattggcagctccacgcgcactactatccgccacttctgcggtcggcaactgtgcggaagtttatggtgggatatgaaatgttggcgcaagcccagcgggacctcactccagaacaggcagcagaacgcctcagggcgctgccggaagtgcactaccacctcggacagaaagatagggagactgccactatagct

SEQ ID NO: 12090 - DNA, 1137 bp, synthetic construct
  misc_feature 1..1137: note = source = /note="Description of Artificial Sequence: Synthetic coding sequence"
  source 1..1137: mol_type = other DNA
atgtcacgtagtgggaccgacccccagcaaaggcagcaagccagtgaggccgacgccgccgccgcaaccttccgtgcgaatgaccaccagcatatcagatacaatccactccaggacgaatgggtattggtctcagctcaccgcatgaaacggccttggcagggccaggtggagccccagctattgaaaacagtcccacgccatgatcccttaaaccctctttgcccgggcgctatcagagctaacggtgaagtcaacccccagtacgattcaacttttttatttgacaatgatttcccggctctccaaccagacgccccctctcccggccccagtgaccacccactcttccaggccaaaagtgcgcgaggggtctgcaaagttatgtgctttcacccatggtcagacgtgaccttgcccctgatgtctgtgccagagattagagccgtggtagacgcgtgggctagtgttacggaagaactgggcgcccagtacccctgggtgcagatatttgaaaataaaggggctatgatgggatgttctaatcctcatcctcactgccaggtgtgggctagtagcttcctccccgacattgctcagagggaggaacggagtcaacaggcctacaaatcccagcatggggagccacttctcatggaatactcgcggcaggaactgctaagaaaagagagacttgtgctgacaagtgagcattggctggttttggtccctttttgggctacctggccataccagaccctcctcctcccccggcggcatgtgaggcggctgcccgaacttactccagctgaacgagacgacctggcttctatcatgaaaaagctgctgaccaaatacgataacctgttcgagacctcctttccatactccatgggttggcatggagctcctactggtagcgaagccggcgccaactggaatcactggcagctacatgcccactattatcctcctctgctccgaagtgccaccgtgagaaaattcatggtcggatatgaaatgcttgcgcaggcacagagagacttgacacccgagcaggccgctgagcgactgagggccctgcccgaggtccattatcatcttggccaaaaagaccgggagaccgccactatcgcc

SEQ ID NO: 12091 - DNA, 1137 bp, synthetic construct
  misc_feature 1..1137: note = source = /note="Description of Artificial Sequence: Synthetic coding sequence"
  source 1..1137: mol_type = other DNA
atgtctaggtctggtacagacccgcagcagcgccagcaggcctccgaagccgatgccgccgcggccacttttcgcgcaaatgaccatcaacacattcggtacaatcctctccaggatgagtgggtgctcgtgtccgctcatcgtatgaaaagaccttggcagggccaggttgagcctcagctcctgaaaaccgtgcctcggcatgatcccctgaaccccctatgccccggagccatcagggccaacggagaagtcaacccgcagtatgacagcacgttcctgttcgacaacgacttccccgctctgcagcctgacgcaccctcacccggaccaagcgaccacccattattccaagccaaaagtgcacggggagtgtgcaaggtgatgtgttttcatccctggagtgacgtgaccctgcctctcatgtcagtacctgagatacgggccgtagtagacgcttgggccagcgtgacggaggagctgggcgcccagtacccatgggtgcagatctttgagaacaagggggcaatgatggggtgtagcaatccccacccccactgtcaggtttgggcaagctcgtttctccccgacatcgcccagagggaggagcgctctcagcaggcctataagagccaacatggcgaacctctgctgatggaatatagccgccaggagctgctccggaaagagcgtcttgtcttgacctcagaacattggttggtgttggttccgttctgggctacatggccctaccaaacactattgctgcctcgacgacatgttcggcggttgcccgaactcacccccgctgaaagagacgacctcgcttctataatgaagaaactcctgacgaaatatgataacctgttcgagacaagtttcccttactcaatgggctggcacggggcccctacgggctctgaggctggagccaattggaaccactggcagctgcacgcccattattaccctcctctgctgagatccgccacagtacggaagtttatggtgggttatgagatgttggctcaggcccagcgggacctaacaccggagcaagcggctgaaagattgagagccttacctgaggtgcattatcatctgggacagaaggatcgagaaactgctacaatcgcc

SEQ ID NO: 12092 - DNA, 1137 bp, synthetic construct
  misc_feature 1..1137: note = source = /note="Description of Artificial Sequence: Synthetic coding sequence"
  source 1..1137: mol_type = other DNA
atgtcacgctcgggaactgatcctcaacaaagacagcaagcatccgaagccgatgcagcagcagctaccttccgcgcgaacgatcaccagcatattcgatacaaccctctgcaggacgaatgggtgcttgtgtcagcgcatcgcatgaagcgcccttggcagggccaagtggagccccagcttctgaaaactgtgcctagacatgatcccctgaatcctttgtgtcccggcgcgattcgagcgaacggggaagtgaatccacaatacgattcgacttttctttttgacaacgattttcctgcactgcaaccagatgcaccgtcccccggtccctcggatcaccctcttttccaggccaagtcggcacggggagtgtgtaaagtgatgtgtttccatccttggtcagatgttactctccctctcatgtcagttccagaaattcgcgcagtcgtcgatgcatgggcctcagtgactgaggagctgggagcacagtacccatgggttcaaatcttcgaaaacaagggggccatgatgggttgctccaacccacatcctcattgccaggtctgggcatcgtcctttcttcccgacatcgcgcagcgcgaagagagatcacagcaagcatacaagtctcagcatggtgagcctcttctgatggaatattcgaggcaggaacttctgagaaaagagagacttgtccttacttccgaacattggcttgtcttggtgcccttctgggcaacctggccttaccaaaccttgcttcttcccaggagacatgtgcgtaggctcccggaacttacccctgccgagcgagatgatctggccagtattatgaagaaactgcttaccaaatacgataatctgtttgaaaccagctttccttacagcatgggttggcatggggcgccgaccggttccgaagcgggcgctaactggaaccactggcagctgcacgcgcactactaccccccactgctgcggtccgcaaccgttcgtaagtttatggttgggtacgagatgttggcccaggcccaaagggacctcacgccagagcaggctgcagaacgtttgcgcgcactcccggaagtccactaccacctgggtcaaaaagaccgggaaacggcgactatcgca

SEQ ID NO: 12093 - DNA, 1137 bp, synthetic construct
  misc_feature 1..1137: note = source = /note="Description of Artificial Sequence: Synthetic coding sequence"
  source 1..1137: mol_type = other DNA
atgtcgcgttcgggtacggatccgcaacaacgacaacaagcgtcggaagcggatgcggcggcggcgacgtttcgtgcgaatgatcatcaacatatacgttataatccgttacaagatgaatgggtattagtatcggcgcatcgtatgaaacgaccgtggcaaggtcaagtagaaccgcaattattaaaaacggtaccgcgacatgatccgttaaatccgttatgtccgggtgcgatacgtgcgaatggtgaagtaaatccgcaatatgattcgacgtttttatttgataatgattttccggcgttacaaccggatgcgccgtcgccgggtccgtcggatcatccgctatttcaagcgaaatcggcgcgtggtgtatgtaaagttatgtgttttcatccgtggtcggatgtaacgttaccgctaatgtcggtaccggaaatacgtgcggtagtagatgcgtgggcgtcggtaacggaagaattaggtgcgcaatatccgtgggttcaaatatttgaaaataaaggtgcgatgatgggttgttcgaatccgcatccgcattgtcaagtatgggcgtcgtcgtttttaccggatatagcgcaacgtgaagaacgttcgcaacaagcgtataaatcgcaacatggtgaaccgctattaatggaatattcgcgtcaagaattattacgtaaagaacgattagtactaacgtcggaacattggctagttttagttccgttttgggcgacgtggccgtatcaaacgttactactaccgcgacgtcatgtacgtcgtctaccggaattaacgccggcggaacgtgatgatttagcgtcgataatgaaaaaattactaacgaaatatgataatctatttgaaacgtcgtttccgtattcgatgggttggcatggtgcgccgacgggttcggaagcgggtgcgaattggaatcattggcaactacatgcgcattattatccgccgctattacgatcggcgacggtacgaaaatttatggttggttatgaaatgctagcgcaagcgcaacgagatttaacgccggaacaagcggcggaacgtctacgtgcgctaccggaagttcattatcatttaggtcaaaaagatcgtgaaacggcgacgatagcg

SEQ ID NO: 12094 - DNA, 1137 bp, synthetic construct
  misc_feature 1..1137: note = source = /note="Description of Artificial Sequence: Synthetic coding sequence"
  source 1..1137: mol_type = other DNA
atgagccgcagcggtaccgatccgcaacaacgccagcaagcgtcggaagcggatgctgccgccgcaacttttcgcgcgaacgatcaccagcatatccgctacaatccgctgcaggacgaatgggtccttgtgtccgcccaccgcatgaagcggccatggcagggacaggtggagccgcaactgctgaaaactgtgcctagacatgacccactcaacccactgtgtccaggagccatcagggcgaacggagaggtgaacccgcagtacgactcaactttcctctttgacaatgacttcccagcactgcagccggacgcccccagcccgggtccgtctgaccatccgcttttccaggccaagtccgcgaggggagtctgcaaagtgatgtgcttccatccttggagcgacgtcactctgcctctcatgtccgtccccgaaatccgggctgtcgtcgacgcgtgggcatcggtgactgaagaattgggagcgcaatacccgtgggtccagatcttcgaaaacaagggtgccatgatgggatgttccaacccccatccacactgccaagtgtgggcatcgagctttctccctgacatcgcccagagagaggagaggtcccagcaggcgtacaagtcccaacacggcgaacctttgctgatggaatattcccgccaggaactgctccgcaaggaacgcctcgtgctgacgtccgaacattggctggtcctggtgccgttctgggccacttggccgtaccaaaccctgctgctcccacgccgacacgtgcggcggctgccagaactcacccctgccgagcgggacgaccttgccagcatcatgaagaagttgctgaccaaatacgataacctgtttgaaacctcctttccatactcgatgggctggcatggcgccccaactggatctgaggcgggtgccaactggaatcactggcagctccacgcccactactatccgccactcctgagatcggcaaccgtgaggaaattcatggtggggtacgaaatgcttgcccaggcacagcgggacctgaccccagaacaggcggccgagcggctgagggcgcttcccgaggtgcactaccacttgggccagaaagacagagaaactgcgactatcgcc

SEQ ID NO: 12095 - DNA, 1137 bp, synthetic construct
  misc_feature 1..1137: note = source = /note="Description of Artificial Sequence: Synthetic coding sequence"
  source 1..1137: mol_type = other DNA
atgtcgaggagtggtaccgatcctcagcagcggcaacaggcttcagaagcagacgccgcagcggcaacgtttcgggccaacgaccaccagcatattaggtataatccccttcaggatgaatgggtcctagtaagtgcacatcgcatgaagaggccgtggcagggccaggttgaacctcagctacttaaaaccgttccccggcatgatccgctcaatcctctctgcccgggcgccatacgcgccaatggcgaggtgaacccacagtacgacagcacgtttctcttcgataatgacttccctgctctgcaaccagatgctccttcccccggaccctctgatcaccccttgttccaagcaaaatcggctcgaggagtatgcaaagtgatgtgttttcatccttggtccgatgtgacgctacctctgatgagcgtcccagagataagagccgtagtggacgcttgggcgtccgtaactgaggagctgggtgcgcaatacccctgggtccagatttttgaaaacaagggagccatgatgggttgtagcaatcctcatccccattgtcaagtttgggcttcctcttttctgccagacattgcccaacgagaagagagatcccagcaggcatataagagtcagcatggggaacctctactgatggagtatagtcgccaagagctcctcaggaaagaacgcctggtgcttacgtcggagcattggctggttcttgtcccattctgggcaacgtggccttaccagaccctgctgctcccgcgccggcatgtgaggcggctgcccgaattgacgcctgcggaacgagacgacctggcaagtataatgaagaagctccttactaagtacgataatctgtttgaaacatccttcccctacagcatgggttggcacggcgcacccactggctctgaagcaggagctaactggaaccactggcagctacatgcacactactacccacctctgctcagaagtgctacggttcggaaatttatggtgggctacgaaatgctagctcaagcccaaagggatttgacgcctgagcaggcagcagagcgcttacgggcactgccagaggtacactaccacttggggcagaaggatcgagagacagccaccatcgcc

SEQ ID NO: 12096 - DNA, 1137 bp, synthetic construct
  misc_feature 1..1137: note = source = /note="Description of Artificial Sequence: Synthetic coding sequence"
  source 1..1137: mol_type = other DNA
atgtcacgcagcggaaccgacccccagcaaaggcagcaggcttccgaagctgacgcagctgcagcaacattccgggcaaacgatcatcaacatataagatacaacccgttgcaggacgagtgggtgctagtctccgcccacagaatgaaacgaccatggcaaggtcaggtcgaaccccagctactcaaaaccgtacccagacatgatcccctgaacccactgtgtcccggagctattcgggccaatggggaagtcaatccacagtatgattctacatttctgttcgataacgacttccctgccctgcagcccgacgcaccaagccccggcccttccgaccaccccttgttccaagctaagtctgctagaggcgtctgcaaagtcatgtgcttccatccctggtcagatgtgaccctgccactaatgtcagttccagagatcagagccgtggtagatgcttgggcctccgtgaccgaggagctaggcgcccagtatccttgggtacagatcttcgagaataagggcgcaatgatggggtgctctaatccacatccacactgccaagtctgggccagttccttcctgcccgacatcgcccagcgggaggagaggtcacagcaagcctataagtcacaacatggcgaacccctgttgatggaatatagccgacaggaactcctccgaaaggaacggcttgttctcaccagcgagcactggctcgttctagtccctttctgggctacctggccctaccagacccttttgctgcccagaaggcacgtgcgaaggctgcccgagctgaccccagccgaaagggatgatctggcctctatcatgaagaaacttctaacgaaatacgataacctattcgaaacgtcttttccttactctatgggctggcatggagctcctacgggaagcgaggcgggcgctaattggaatcactggcagctgcatgctcattattacccccctttgttacgatcagctacagtgagaaagtttatggtcggatacgaaatgttggcacaggcccagcgggatttaacaccagagcaagcagccgagcgtttgcgcgcgttgccagaagtgcactaccatttggggcagaaggatagggaaactgctaccattgcc

SEQ ID NO: 12097 - DNA, 1137 bp, synthetic construct
  misc_feature 1..1137: note = source = /note="Description of Artificial Sequence: Synthetic coding sequence"
  source 1..1137: mol_type = other DNA
atgtcgcgatctggaaccgaccctcaacaaaggcagcaggcatcggaagccgatgcagcagcagcaaccttcagggccaatgaccaccaacatattcgctacaatcctctgcaggatgaatgggtgcttgtgtcagcacatcgtatgaagaggccttggcagggtcaggtggaaccccagttgcttaagaccgtccctcgccacgatcccctgaacccactctgtccaggagcaattagagcaaatggcgaggtcaatccacaatacgacagcacgtttctgttcgataacgatttcccggccctgcaaccggacgcaccatcgcctggtcccagcgatcaccccttgtttcaagccaaatcggcccgtggagtgtgtaaggtgatgtgttttcatccctggtcggacgtcaccctgccgctcatgtccgtgcctgaaatccgggcggtggtggacgcatgggcatcggtcaccgaggaactcggggcacaatacccttgggtccagattttcgaaaacaagggagcgatgatgggttgttcgaaccctcatccccattgtcaagtgtgggcatcgtcctttctgcctgacatagcacaaagagaggagcgatcccagcaggcatataagtcacaacatggagagcctctcctgatggaatactcccgccaggagttgctgcggaaggagaggctggtccttacgagcgagcattggcttgtcctcgtcccattttgggcgacctggccttaccaaaccctcctcctccctcgccggcatgtccgtagactgccagaattgactccagcggaacgagacgatctcgcatccattatgaagaagctccttaccaaatacgataacctcttcgagacttcgtttccttacagcatgggatggcatggagcaccaactggcagcgaggcaggcgcgaactggaaccattggcagctgcatgcccactattaccctcctcttttgcggtcagcgactgtgagaaagtttatggtcggctacgagatgctggcacaagcccagcgcgatctcaccccagagcaagcggcagaaagattgcgggcactgccggaagtgcactaccacctgggacaaaaggaccgcgagactgcaaccattgca

SEQ ID NO: 12098 - DNA, 1137 bp, synthetic construct
  misc_feature 1..1137: note = source = /note="Description of Artificial Sequence: Synthetic coding sequence"
  source 1..1137: mol_type = other DNA
atgtccaggtcggggacagatccacaacaacgccagcaagcatcagaggcagatgcggcagccgccacattccgggcaaacgaccatcagcatattcgttataatcctttgcaggacgagtgggtactcgtttcagcccaccgcatgaaacgaccgtggcaaggacaagttgaacctcaattgctcaaaactgtcccgagacacgatcccttgaaccccctatgccccggtgcgattcgtgcgaacggcgaggtgaaccctcagtatgactctacatttttatttgataacgactttccagccttgcaacctgacgctccgagcccgggtccctccgaccatccactttttcaggcgaagtccgcccgcggggtctgtaaggttatgtgttttcatccgtggtctgacgtgaccttgcccctcatgagtgtaccagagatccgggcggtagttgatgcatgggcaagtgttacagaagagttgggggctcagtacccctgggttcagatttttgaaaacaaaggagccatgatggggtgcagtaacccacacccacactgtcaagtttgggcctcgtccttccttccagacatcgctcagcgagaggagagaagccagcaagcctataaatctcaacatggtgagccactactcatggagtactccaggcaggaattactgcgaaaagagagactggtcttaacaagcgagcattggctcgttctcgttccattctgggctacgtggccataccagacgctactgctcccgcgacgacatgtcagaaggcttccagaacttacccctgcagagagggacgatctggctagtataatgaaaaagctgttgactaagtacgataacctttttgagacgagcttcccctacagcatgggatggcacggcgcaccgaccggcagtgaagctggcgcgaattggaaccattggcaacttcatgctcattactaccctccgttgctccgaagcgctacagtccgcaagttcatggtcggatatgaaatgctggcgcaggcacagcgggaccttacccccgaacaggctgcggaacgacttcgggccttgccagaggtgcattatcacctggggcaaaaggatagagagactgcaaccattgcg

SEQ ID NO: 12099 - DNA, 1137 bp, synthetic construct
  misc_feature 1..1137: note = source = /note="Description of Artificial Sequence: Synthetic coding sequence"
  source 1..1137: mol_type = other DNA
atgtccagatcggggaccgatcctcagcagcgccaacaggcttcggaggctgatgctgctgcagctacctttcgggcaaatgatcatcaacacattcgctacaatccgctgcaagatgaatgggtgcttgtgtccgcccatcgcatgaagaggccgtggcagggacaggtggaaccccaactgctcaagaccgtccctcggcacgacccgctcaaccctctctgcccgggggcaatccgggccaacggcgaggtgaaccctcaatacgacagcacctttctcttcgacaatgatttccctgccttgcagcctgacgctccttcgccgggcccgtccgatcacccactgtttcaagctaagtccgcgcggggcgtctgcaaggtgatgtgcttccacccctggtcggatgtcaccctgccactgatgagcgtcccggaaatcagagctgttgtggacgcttgggcatctgtgaccgaagagctgggcgcgcaatacccatgggtccagatcttcgaaaacaaaggtgccatgatgggatgttccaacccccatccgcattgtcaggtgtgggcttcctcatttctgccggacattgctcaaagggaggagagatcacagcaggcttacaagtcgcagcatggagagccccttctcatggaatactcccgccaggaactcttgcggaaggagcgcctcgtcctgacctcggaacactggttggtgctggtgccgttctgggcgacgtggccgtaccagactcttctgctcccacgccgacacgtccgtaggctgccggaattgactccggcagagagagacgatctcgcttcaatcatgaagaagctcctcaccaaatacgacaatctgttcgaaacctcattcccgtattcaatgggatggcatggcgccccaaccgggtctgaggccggagctaactggaatcactggcaactccacgcccactattacccaccgctccttagatccgcgaccgtgcgcaagttcatggtggggtacgagatgctcgcacaagcacagcgcgacctgacgccagaacaggccgcggaacgactgcgggcgctgccggaagtgcattaccatctgggccaaaaagaccgggaaaccgccactatagcc

SEQ ID NO: 12100 - DNA, 1137 bp, synthetic construct
  misc_feature 1..1137: note = source = /note="Description of Artificial Sequence: Synthetic coding sequence"
  source 1..1137: mol_type = other DNA
atgagcagatcaggaactgatccgcaacaacgccagcaggcatcggaggctgatgctgcggctgcaaccttccgcgctaacgaccaccagcatatcagatataacccgttgcaggacgaatgggtgttggtatcggcccatcggatgaagcggccgtggcaaggccaggtggaaccgcaactgctgaaaacggttccacgccatgatcctctgaatccactgtgtccaggcgcgatcagggcaaatggagaggtgaacccgcagtacgactccacgtttctgttcgataatgatttcccagccctccaaccagacgctccgtcacctggccccagcgaccatcctctctttcaggcaaaatccgcgaggggcgtgtgcaaagtcatgtgcttccacccgtggagcgacgtgactctcccgctgatgagcgttccagaaatccgcgccgtggtcgacgcatgggcttccgtgactgaggaactcggagcccagtacccttgggtgcagatattcgagaacaagggagccatgatgggttgttcaaatccgcacccgcattgccaggtctgggcatcgtcgtttctcccggatatcgcgcagcgggaagagcggagccagcaggcctacaaatcccaacatggcgaacccctcctgatggagtacagcagacaggaactgctgcgcaaagagcgtctcgtcctgacgtcggagcactggctggtccttgttcccttctgggcaacctggccgtatcagacgttgctgctgccacgcaggcacgtgagacgcctcccagagcttacccctgccgagcgggatgacttggcatccatcatgaagaagctgctgactaaatacgacaatttgttcgaaacttcattcccttattcgatgggatggcacggtgccccgactgggagcgaagcaggagctaactggaaccattggcaactgcatgcccattactacccgcctcttctgcggagcgcgactgtgcgaaagttcatggtcggatacgagatgttggcccaagctcaacgggatctgaccccagaacaggccgcggaaagactgcgggctctgcctgaggtgcactaccatctcggccagaaggaccgcgaaaccgcgaccatcgct

SEQ ID NO: 12101 - DNA, 1137 bp, synthetic construct
  misc_feature 1..1137: note = source = /note="Description of Artificial Sequence: Synthetic coding sequence"
  source 1..1137: mol_type = other DNA
atgtctaggtcaggaaccgacccacagcaacgacagcaggcatcagaagcagacgcagctgcagcaacctttagggcgaatgatcaccagcacatcaggtacaatcctcttcaagatgaatgggtgctcgtgtcagcacatcgcatgaaaagaccgtggcaaggccaggtggagccacagcttctgaaaaccgtgcctcgccatgatccgctgaacccactttgcccgggagctattcgcgctaacggagaagtcaacccacagtacgatagcacttttctgtttgacaacgactttccagcactccaacccgacgcaccctctccagggccttccgatcatcctctgttccaggcaaaaagcgcaaggggagtctgtaaagtcatgtgttttcatccttggagcgatgtgaccctgcccctcatgtccgtccctgaaattcgagccgtggtcgatgcctgggcaagtgtgactgaagagcttggagcacagtacccgtgggtccagatcttcgagaacaagggtgcgatgatgggatgttcgaaccctcatccgcattgtcaggtgtgggcctcgtcatttctgcccgacattgcacagcgtgaagaaagatcgcagcaagcatataagtcgcagcatggggaaccattgcttatggagtattccaggcaagaacttttgcggaaggaacgcttggtacttacctctgagcattggctggtcctcgtccccttctgggctacttggccataccaaactcttctgctgcctcggagacacgtgaggagactgcccgaacttactccagcagagcgggatgacctggcatcgattatgaagaagctgttgaccaagtacgataatctgttcgaaacttcgtttccttattccatgggatggcacggtgcacctactggttccgaagcgggggccaattggaatcattggcaactccatgcacattactaccctccactcctgagatcggccactgtgcgaaagtttatggtcggatacgaaatgctcgcacaagcgcagcgcgatctcacccctgagcaggcagccgagcggctcagggctcttcccgaagtgcattaccatttgggccaaaaggaccgcgaaaccgccaccatagcc

SEQ ID NO: 12102 - DNA, 1137 bp, synthetic construct
  misc_feature 1..1137: note = source = /note="Description of Artificial Sequence: Synthetic coding sequence"
  source 1..1137: mol_type = other DNA
atgagtcggagcggaacagatccgcaacagaggcagcaagcctctgaagctgatgccgcggccgcaacattccgcgccaacgatcaccaacatatccgctataatcccctgcaggacgagtgggtgttggtgtccgctcaccggatgaaaaggccctggcaggggcaggtcgaaccccagctgctgaagaccgtccctcggcatgaccccctgaatcccctttgcccaggtgccatccgtgccaatggggaggtcaatcctcagtatgatagcacttttctgttcgataatgatttcccagcattacagccagatgctccatcgccaggcccatctgatcatccactgttccaggctaagagtgcaaggggtgtctgcaaagtgatgtgtttccatccttggtcggacgtgacgctgccgctaatgtctgtacccgagatcagggctgtagtcgacgcttgggcctctgtgacagaagagcttggcgctcagtatccttgggtgcaaatttttgagaataagggagcaatgatgggttgcagtaacccccatcctcactgtcaggtttgggcctcaagctttctgccagacattgcacagagggaagagagatctcagcaggcctacaaaagccagcacggagaacccctcttaatggaatattcacgccaggaattgctccgcaaagaaagattagtccttacttctgagcactggttagttctggtccccttctgggccacctggccttaccaaactttgttattgcccaggagacatgtcagacggctgccagagttaacccccgccgaaagggatgatctggcttctattatgaaaaaactgctgaccaaatacgacaacctgtttgaaacatctttcccttatagtatgggttggcacggcgctccaaccgggagcgaagcgggggccaactggaaccattggcagcttcatgcacactattacccccctctcctccgaagcgccacagtgagaaagtttatggttggatatgaaatgcttgctcaagcgcaaagggacttaacgcctgaacaggcagcggagagactacgggcacttccggaggttcactatcacctaggccagaaagatagagaaacagctaccatagcc

SEQ ID NO: 12103 - DNA, 1137 bp, synthetic construct
  misc_feature 1..1137: note = source = /note="Description of Artificial Sequence: Synthetic coding sequence"
  source 1..1137: mol_type = other DNA
atgtccagatccggtaccgaccctcagcaaagacaacaagcctccgaagcagacgctgcggccgcaacgtttagggcaaacgaccatcagcacatccggtacaacccactgcaagacgagtgggttctcgtcagcgcacacagaatgaaacgaccttggcaaggtcaggtcgagccccagctcctcaagactgtccctcgacatgaccctcttaacccactgtgccccggtgcaattagagcaaacggtgaggtgaatccacaatacgattcgacgtttctctttgataatgactttccagcacttcaacccgatgcaccctctcctgggcctagcgatcatcctttgttccaggcgaagtcagcgcgtggcgtgtgcaaagtgatgtgttttcacccctggtcggatgtgaccctgccactcatgtccgtgccggaaatcagagcagtcgtggacgcgtgggcttcggttaccgaagaacttggggcacaatacccttgggtacagattttcgagaataagggggccatgatgggatgtagcaaccctcatcctcattgtcaggtgtgggcatcgtcatttcttccggacatagcacagcgcgaggaaagatcccagcaggcatacaagtcgcaacatggtgagccactgctgatggaatactcgcgccaagaactgcttcggaaggaacgtcttgtgctgacgtcggaacactggctggtccttgtgccgttttgggctacttggccttaccaaacgctgcttctccctcgtcgccacgtgcgaaggctgccagaactgacgcctgccgaaagggatgatctcgcaagcattatgaagaagctgcttacgaagtatgataacctctttgaaacctcgtttccatactcgatgggatggcatggggcaccgactggatccgaagccggcgcaaattggaaccactggcaactgcatgcacactactaccctcccctcctccgtagcgccactgtgcgtaagtttatggtcggatacgaaatgctggcacaggcacaacgtgatttgactccagagcaggcggcagaaaggcttagagcattgccagaggtgcattaccatctgggacagaaagatcgggaaacggctaccattgct

SEQ ID NO: 12104 - DNA, 1137 bp, synthetic construct
  misc_feature 1..1137: note = source = /note="Description of Artificial Sequence: Synthetic coding sequence"
  source 1..1137: mol_type = other DNA
atgtcgaggtcgggaactgatccccaacaacgccaacaggcatcagaggcggatgcagccgcggcaacttttagggcaaatgatcaccagcatatccggtacaacccactccaagatgagtgggtgcttgtctccgcgcatcgcatgaaaagaccttggcagggacaagtggaaccgcagctgttgaaaaccgtgcctaggcatgatcctttgaaccccctttgtccaggcgccatccgcgcaaacggtgaagtcaatcctcaatacgattcgacgtttctgtttgacaatgattttcccgcactccaaccagacgccccatcgcctgggccctcggatcatcctctgtttcaagcaaaaagcgcaagaggcgtgtgcaaggtgatgtgttttcatccgtggtccgatgtcaccctgcctctcatgagcgtccctgaaattagagcagtggtggatgcctgggcctcagtgaccgaggagctcggtgcgcagtacccctgggttcagatctttgagaataaaggggccatgatggggtgctccaacccgcacccacactgtcaggtgtgggcatcgtcattcctgcctgacatagcacaacgcgaagaaagaagccaacaggcttacaagtcgcagcatggtgagcccctgctgatggaatacagccgccaagagctcctgcgcaaggaacgcctcgtgcttacttcggaacattggctggtgctcgtcccattttgggcaacttggccataccaaactctcctgctgccacggcgtcatgtgagacggttgcctgaactcactcccgcagaacgcgatgatcttgcaagcatcatgaagaaactgctgaccaagtacgataatctgtttgaaacgtcgttcccttactcaatgggctggcatggtgcacccaccggttctgaggcaggtgccaattggaaccattggcagcttcacgcccactactaccctccgctgcttagaagcgccaccgtgaggaagtttatggtcggatacgaaatgctcgcacaagcccagcgcgatcttacccctgaacaagctgcggagagactgcgtgcactcccagaagtgcactaccatcttggccaaaaggatagggaaaccgcaactatcgct

SEQ ID NO: 12105 - DNA, 1137 bp, synthetic construct
  misc_feature 1..1137: note = source = /note="Description of Artificial Sequence: Synthetic coding sequence"
  source 1..1137: mol_type = other DNA
atgtcgcgctctgggacggaccctcagcagcggcagcaggcctcggaggcggatgccgcagcagcgaccttccgcgccaacgaccaccagcacatccgctacaaccctttgcaggatgagtgggtgctcgtctcggcccacagaatgaagcgaccatggcagggtcaagtggaaccacagctcctgaaaactgtgccgagacatgacccgctgaacccactctgtcccggagctatcagggcgaatggcgaagtgaacccgcaatacgattcgacctttctgttcgataacgacttcccggctctccagccggacgctccgtcccctggcccatcagatcatccactgttccaagctaaatcagctagaggagtgtgtaaagtgatgtgctttcatccatggtccgatgtgactctcccactgatgtctgtccctgaaatcagagctgttgttgacgcttgggcctcggtcactgaagaactcggcgcacaatacccttgggtgcaaatcttcgagaacaagggtgccatgatgggatgctcaaacccgcatccacactgccaggtgtgggcatcctcgtttctcccggatatcgcccagcgcgaggaacgcagccagcaggcttacaagtcgcagcatggcgaaccgctgctgatggaatactcaagacaggaactcttgcggaaagaacgccttgtcctcacttcggaacattggctggttctggtccctttctgggcgacctggccgtaccagaccctgcttctgccgagaaggcacgtgcggagactgcccgaactgactccagccgaacgcgacgacctcgcttcaatcatgaagaagctgcttactaagtacgacaacttgtttgagacgtcgttcccttatagcatgggctggcacggagccccgaccggatccgaagccggagctaattggaaccactggcaattgcatgcacattactatccgccgcttctgcgctcggccactgtgaggaagttcatggtcggatacgaaatgttggcacaagcccagcgcgacctcactccagagcaagcagcggaacgcctgcgggccctcccagaggtccactaccatctgggacagaaagaccgcgaaaccgcaacgatcgcg

SEQ ID NO: 12106 - DNA, 1137 bp, synthetic construct
  misc_feature 1..1137: note = source = /note="Description of Artificial Sequence: Synthetic coding sequence"
  source 1..1137: mol_type = other DNA
atgagccgctcaggaacggacccacaacagagacaacaggcatccgaggctgacgcggcggcggcaacctttagggcgaatgaccatcaacacataaggtacaaccctctgcaggacgaatgggttctcgtgagcgcacacaggatgaaaagaccttggcaaggacaggtggaaccgcagctgctcaagaccgtgccaaggcacgaccctctgaaccctctttgcccaggagccatcagagccaacggcgaggtcaacccgcagtacgacagcacctttctgttcgacaacgatttcccagccctgcagcctgatgcaccaagcccaggcccctcggatcatccgctttttcaagcaaaatcggcgcgcggagtgtgcaaagtgatgtgcttccatccatggagcgatgtcactctcccattgatgtccgtgccggaaatcagagctgtggtggacgcctgggcctcagttactgaagagctcggagctcagtacccgtgggtgcagatcttcgagaacaagggagctatgatgggctgcagcaacccgcacccgcactgccaggtctgggcctcgtctttcctgccagacattgcccagcgggaagaacggtcccagcaggcttacaagtcgcaacacggagaacctctcttgatggaatactcccgccaggaactcctccgaaaggagcgtctggtcctgacttcggagcattggcttgtccttgtccccttctgggccacctggccataccagactttgttgctgccgcgcagacacgtgcggcgcctgccagaactgaccccggccgagagggatgatcttgcttcaatcatgaaaaagctcctgactaagtacgataaccttttcgagactagcttcccgtacagcatgggatggcatggtgcacccaccggctccgaggccggagcaaactggaatcactggcaacttcatgctcactactatccaccgctgctgcgctcggcaaccgttagaaagtttatggtcggatacgaaatgcttgcacaggctcagcgcgatctgactcccgagcaggcggctgagcgcctcagagccttgccagaagtgcattaccatctgggacagaaggatcgcgaaacggcgaccattgcc

SEQ ID NO: 12107 - DNA, 1137 bp, synthetic construct
  misc_feature 1..1137: note = source = /note="Description of Artificial Sequence: Synthetic coding sequence"
  source 1..1137: mol_type = other DNA
atgagccgatcaggcactgatcctcagcaacgccaacaagctagcgaagccgacgcagccgcagcaactttccgggctaatgaccaccagcatataagatataaccccctgcaggacgagtgggtgttggttagtgctcaccgaatgaaacgaccctggcagggacaggtcgagccccagcttttgaaaaccgtcccgagacacgatcctctcaatcccctctgtccgggtgcgattcgcgccaacggcgaggtcaaccctcagtatgactctacctttcttttcgacaacgacttcccagcactgcagcctgacgccccgagtcccgggccttcagatcatccactattccaggcaaaaagcgcccgcggagtgtgtaaggtgatgtgctttcacccatggagcgatgtaacactgcccctgatgtcagtgccagagattcgcgcggtagtggatgcctgggcctccgttaccgaagagttgggggctcagtatccatgggttcagatcttcgagaacaaaggtgcgatgatgggatgctccaaccctcatccacactgtcaggtctgggcctcaagctttcttccagatattgcccaaagagaagagcggagtcagcaggcatataagtcacagcacggagaaccactattgatggaatatagtcgtcaggagttgctccgaaaagagaggctcgtgctcactagtgaacattggctcgttctggtcccattttgggcaacctggccgtatcagaccctgctgctaccccggcgccacgtccggaggctgccggaattgacccctgctgagcgcgatgatttagcttctattatgaaaaaactgctgactaaatacgataatttgtttgagactagttttccctactcaatgggctggcacggggcacccaccggaagcgaggcaggggcaaattggaaccattggcagctccacgcgcactattatccgccccttctgcgtagcgccacggtgaggaaattcatggtgggttatgaaatgctcgcacaggctcaacgggacttgactcccgaacaagcagccgagaggctgagggctctacccgaggtgcattaccatctgggacaaaaagatagagagacagcaactattgcc

SEQ ID NO: 12108 - DNA, 1137 bp, synthetic construct
  misc_feature 1..1137: note = source = /note="Description of Artificial Sequence: Synthetic coding sequence"
  source 1..1137: mol_type = other DNA
atgtcacgttccggtaccgatccacaacagcgtcagcaagccagcgaggcggatgccgccgccgccacgttccgcgctaatgaccaccagcacatccggtacaaccccctgcaggacgagtgggtcctggtctctgcgcatcgcatgaagaggccgtggcaaggacaggtcgagccccaacttctcaagaccgtcccccgtcacgacccacttaacccactgtgtcccggtgcgatccgtgccaacggtgaggtcaaccctcagtacgactccacctttcttttcgataatgatttccctgcacttcagcctgatgccccctctcccggtccaagcgatcaccccctgttccaagctaagtcggctcggggcgtatgcaaggtgatgtgctttcacccctggtcggacgtcaccctgcctctcatgtccgtcccggagattcgtgccgtggtggatgcttgggcttccgtcactgaggaattgggtgctcagtacccctgggtccagatctttgagaacaaaggcgccatgatgggctgctcgaacccccacccccactgccaggtctgggcgtcgagcttcctccctgacatcgcccagcgcgaggagcgctcccagcaggcctacaagtcccagcacggggagccgttgttgatggagtactcaagacaagaattgcttcgaaaggagcgcctcgttcttactagcgagcattggctggttctggttcctttttgggctacctggccctaccagaccctcctactcccgcggcggcatgtgcgtcgactgccggaattgactcccgccgagcgcgacgacctcgctagtattatgaagaaactgcttacaaagtatgacaatctcttcgagaccagctttccttactctatggggtggcacggagccccaactggctcagaagccggcgcgaactggaatcactggcagctgcacgctcattactacccgccgctcctcagaagcgccaccgttcggaagttcatggtcgggtacgagatgctggcgcaggcccaacgcgatctgacacctgaacaggccgccgagcgtcttcgggccctgcccgaggtacactaccacctgggtcaaaaggaccgggagaccgccaccattgcg

SEQ ID NO: 12109 - DNA, 1137 bp, synthetic construct
  misc_feature 1..1137: note = source = /note="Description of Artificial Sequence: Synthetic coding sequence"
  source 1..1137: mol_type = other DNA
atgtcgcggagcggaactgacccccagcagcgccagcaagccagcgaggccgacgcggcagctgccacgtttagagcaaacgatcaccagcatatccgctacaacccgttgcaggacgagtgggtgctggtcagcgcacaccgcatgaagcgcccatggcaagggcaagtggagcctcagctgcttaagactgtgccaagacacgatccgctcaacccactgtgtccaggagccattagggccaacggggaggtgaatccgcaatacgatagcactttcctgtttgataatgatttcccggcgctccagccagacgccccttcgccggggccatccgatcacccactgtttcaggctaagtcggcaagaggagtttgcaaggtgatgtgctttcacccatggtccgacgtgaccctgccgttgatgtccgtcccggagatcagggcggtggtggatgcctgggcaagcgtgactgaggaactgggagcccagtacccctgggtgcagatcttcgaaaacaagggcgctatgatgggttgctcaaacccccacccgcactgtcaagtgtgggcctcttccttcctccccgacattgcacaacgggaagaacggagccagcaggcatacaaatcccaacatggagagccgctgcttatggaatactcgaggcaggaactgctgagaaaggaacgcctggtgctgacttccgagcattggcttgtgctggtgccgttctgggctacttggccgtaccaaaccctcctgcttcctcggcggcacgttaggcgcctgccagaactgaccccggcggagcgcgacgatctggcctccatcatgaaaaagctgctgactaaatacgacaacctcttcgaaacctcgtttccttactcgatgggctggcatggtgccccgaccggatccgaagctggagccaactggaatcactggcagctccacgcacactactaccccccgcttctgcgtagcgctactgtgaggaaattcatggtgggctacgaaatgctggcccaagcgcagagagacttgacgccggaacaagccgcagaaagactgcgggcgctgccggaagtgcattaccacctgggacagaaggaccgggagactgctactatcgcc

SEQ ID NO: 12110 - DNA, 1137 bp, synthetic construct
  misc_feature 1..1137: note = source = /note="Description of Artificial Sequence: Synthetic coding sequence"
  source 1..1137: mol_type = other DNA
atgtctcgatccggtactgaccctcaacaacgccagcaggcatccgaagctgatgcagcggctgcaacttttagagcgaacgatcatcaacacatcagatacaatcctcttcaggacgagtgggtgctcgtcagcgcgcaccgcatgaagaggccgtggcaaggccaggtggaaccccaactgctgaaaacggttcctaggcatgatcccttgaatcctctctgcccaggagcaattcgggcaaacggggaagtgaacccccaatatgactcaacgtttctcttcgacaatgacttccctgcactgcaacctgacgcgccttcaccaggtccatcagatcatcctcttttccaagctaagtcggcaaggggggtctgcaaagtcatgtgttttcatccttggtcggacgtcactcttcctttgatgtcagtcccggaaataagagcggtggtggacgcatgggcatcagtcaccgaagagctcggcgcgcagtacccttgggtgcagattttcgagaacaagggagcgatgatgggttgttcgaacccacatccgcactgccaagtgtgggcctcgtcattcctccctgacatagcacaacgggaagaacgaagccaacaggcatacaagtcgcaacacggagagcctctgcttatggagtactcgagacaggaactgttgagaaaggaacggcttgtgttgacttccgagcattggcttgtgctcgtgcctttctgggccacttggccataccagacccttctgcttccgcggcgtcatgtgcgtagactcccagagctgaccccagcagaacgtgatgaccttgcttcgattatgaaaaaacttctcactaaatacgataacttgtttgaaacctcgtttccctacagcatgggatggcatggagcaccgaccggaagcgaagcaggggcaaactggaatcactggcagctccacgcacattactaccctccattgctgcggagcgcaaccgtgcggaagttcatggtgggctacgaaatgctggcccaagcgcaaagggaccttaccccggagcaagccgctgagcgattgagagcactgccagaagtgcactatcatcttggtcaaaaagatagagaaactgcaacgattgca

SEQ ID NO: 12111 - DNA, 1137 bp, synthetic construct
  misc_feature 1..1137: note = source = /note="Description of Artificial Sequence: Synthetic coding sequence"
  source 1..1137: mol_type = other DNA
atgagccgttcaggaactgatccacaacaaagacaacaagctagtgaagctgatgctgcagctgcaacttttcgtgctaatgaccatcaacatattcgttataatccattacaagatgaatgggttttagtttctgcacacagaatgaaaagaccatggcaaggacaagttgaaccacaattacttaagacagttcctagacatgatccattaaatcctttatgtcctggagcaattagagccaatggagaagttaatcctcagtatgactcaacatttctttttgataatgattttccagcattacaaccagacgctccttcccctggaccatcagatcatcctttatttcaggctaaatctgcacgaggtgtttgtaaagttatgtgttttcacccatggtcagacgttactcttccattgatgtctgtaccagaaataagagcagtcgttgatgcttgggcaagtgttacagaagaacttggagcacaatatccatgggttcaaatatttgaaaataaaggtgcaatgatgggatgttcaaatcctcatcctcattgccaagtttgggcatctagtttccttccagatattgcacaaagggaagagagatcacaacaagcatataaatctcaacatggagaaccattattaatggaatattcaagacaagaattattaagaaaagaaagacttgttctaacatcagaacattggttagtcttagttccattttgggcaacatggccatatcaaacattacttcttccaagacgacatgttagaagacttccagaattaacaccagcagaaagagatgatttagcttctattatgaaaaaattattaaccaaatatgataatttatttgaaacatcatttccatacagtatgggttggcatggtgctccaacaggatcagaagctggtgccaattggaatcactggcagttacatgctcattactatccaccattgttaagatcagcaacagttcgtaaatttatggttggatatgaaatgttggctcaagctcaaagagaccttacaccagaacaggctgcagaaagattaagagcacttccagaagtacattaccatttaggtcaaaaggatagagaaacagctacaattgct

SEQ ID NO: 12112 - DNA, 1137 bp, synthetic construct
  misc_feature 1..1137: note = source = /note="Description of Artificial Sequence: Synthetic coding sequence"
  source 1..1137: mol_type = other DNA
atgtctcgtagtgggaccgaccctcaacagcgtcagcaggcctctgaagcggatgccgctgctgccacatttcgtgctaacgatcaccaacacatccggtataacccccttcaagacgagtgggtcttagtgtccgcccatcgcatgaagcggccttggcaaggacaggttgagccacaactcctgaaaactgtaccacggcatgatcctctaaaccccttgtgtcccggcgctatacgcgccaacggcgaggtgaacccgcagtacgatagcacattcctgttcgacaacgactttcctgcacttcaaccggatgcaccgtcccccggcccgagcgaccatccactttttcaagctaaatccgcacgtggtgtgtgcaaagtcatgtgttttcatccgtggagcgacgtgactctcccactgatgagtgtccctgagatacgcgctgtggttgatgcttgggcatctgtgactgaagagctgggggcacagtacccttgggtgcagattttcgagaacaaaggtgccatgatgggttgcagcaacccacatcctcattgccaggtctgggcgtctagtttcctacccgacattgcccagagagaggagcgatcccagcaggcgtataagtctcaacacggcgagcccctactcatggagtattctcgtcaggagctgctgcgaaaagagagattggtgttgacttctgagcattggctggtgctcgtaccgttttgggcaacgtggccttaccagactctgctgttgcctcgtcgccatgtgagacgcctgccggaacttacaccagctgaaagagatgaccttgcatctataatgaaaaaattgttgacgaagtacgataatctgttcgagacttccttcccatatagcatgggctggcacggcgcgcctaccggttctgaggccggcgccaattggaaccactggcaacttcatgcccactattacccccccctcctacggtcggccaccgttaggaaattcatggtgggatacgagatgcttgcccaggcacagcgcgatttgacaccggagcaggctgctgagcgcctcagagcgcttccagaggtccactatcatctgggacaaaaggaccgcgaaacagcgacgatcgcg

SEQ ID NO: 12113 - DNA, 1137 bp, synthetic construct
  misc_feature 1..1137: note = source = /note="Description of Artificial Sequence: Synthetic coding sequence"
  source 1..1137: mol_type = other DNA
atgtctagaagcggcacggacccgcagcaaaggcagcaagccagtgaggcggatgccgctgctgccacatttcgcgcgaatgaccatcagcatatccgctacaacccactgcaagatgagtgggttcttgtctcagcccacaggatgaagaggccctggcagggccaggttgagccgcagcttctcaagactgtgccccgccatgaccctctcaaccctctttgtccaggcgctatcagagctaacggtgaggtaaacccccaatacgattctactttcctgtttgacaacgacttcccagctctgcagccggatgctccctcaccgggaccctccgaccatcccctgtttcaagcgaaatctgcgaggggtgtgtgcaaggtgatgtgcttccacccatggtccgacgtcactttgccgttgatgagcgttcctgagatccgcgccgttgtggatgcatgggcctctgtgactgaggaacttggcgctcagtacccctgggtgcagatctttgaaaacaaaggtgccatgatgggttgctccaatcctcatccccattgccaggtatgggctagctcattcctccccgatatcgctcagagggaggagcgcagtcaacaagcgtacaaatcccagcatggcgagcctttgctgatggagtacagtaggcaggagctgctgagaaaggaacgcctggtcctcacttccgaacactggctggtgctggtgcccttttgggcaacttggccctaccagacactcctgttgccacgcagacacgtgcgccgcctgcctgagttgacccccgcggagcgcgatgatcttgcctccatcatgaaaaagctgcttactaaatatgataacctgttcgagacctctttcccgtactccatgggttggcatggagctccaactggcagcgaagccggtgcaaactggaaccactggcaactgcatgcacactactatcctcctctcctgagaagcgctacagtaagaaagttcatggtcggctacgaaatgctggcacaggcccagagagacctcactccagaacaggccgctgagaggctcagggcgctcccggaggtccactatcacttgggccagaaagaccgcgaaaccgccacaatcgcc

SEQ ID NO: 12114 - DNA, 1137 bp, synthetic construct
  misc_feature 1..1137: note = source = /note="Description of Artificial Sequence: Synthetic coding sequence"
  source 1..1137: mol_type = other DNA
atgagtagaagcgggactgatccccagcaaagacaacaggcatccgaagccgatgcagccgcagcaacctttagagccaacgatcatcagcatatacgatacaatccattgcaggacgaatgggtgctggtttcggcccatcggatgaagcgcccttggcaagggcaggtggaacctcagttgctcaaaactgtacccagacatgatccccttaatcctctttgtcctggggcaatccgcgctaacggcgaggtgaaccctcaatacgactcaacctttctgttcgataatgattttcctgcactgcaacccgacgcaccgagtcctggaccgagcgaccatcctctcttccaagcgaagtccgctcgaggagtgtgcaaagtgatgtgtttccacccctggtcggatgtcaccctcccgctcatgtcagtgccagaaattagagcagtggtggatgcatgggcaagcgtgaccgaggagctgggtgcacaatacccttgggttcagatttttgaaaacaaaggtgcgatgatgggatgcagcaacccccatccgcactgtcaagtctgggcatcatcgttcctgccagatatcgcacagagggaagaaaggagtcaacaagcgtataagtcccagcacggtgaacccctgctcatggaatatagcagacaagaacttttgcgaaaggaaaggttggtcctgacgtccgagcactggcttgtgcttgtgcctttttgggcaacttggccttaccaaacccttctgctcccccgtcgccacgtgcggcgactgccggaactcacccccgcagagcgcgatgacctcgccagcattatgaagaagctgcttaccaaatacgataacctttttgagacttcgttcccatactcgatgggctggcatggagcacctaccggttccgaagcaggagcgaactggaatcattggcagctgcacgcccattactacccccctctgcttcgttcggcgacggtccgcaagtttatggtcggatacgagatgttggcccaagcacagcgggaccttaccccagagcaagcagcagaacgccttcgggctctcccagaagtccattaccaccttgggcaaaaggacagagagactgccactattgca

SEQ ID NO: 12115 - DNA, 1137 bp, synthetic construct
  misc_feature 1..1137: note = source = /note="Description of Artificial Sequence: Synthetic coding sequence"
  source 1..1137: mol_type = other DNA
atgtctagatcgggtactgatccccagcagcgccagcaagcttccgaggctgacgctgcagctgcaaccttccgcgccaatgatcatcagcacatcaggtataaccccctccaggacgaatgggtgctcgtgtccgcccacaggatgaaacggccatggcaggggcaggttgagccgcagttgctgaaaactgtgccaagacacgaccccctcaaccctctgtgtcctggcgccattcgggctaatggtgaggtcaatccacagtatgattctacatttctcttcgataatgacttcccagcactccaacccgacgccccttctcccggcccgagcgaccatccattgttccaggccaagagtgcgcggggtgtgtgtaaagttatgtgttttcacccatggagcgatgtcaccctgccactaatgtccgtgcccgagatacgggcagtcgtagacgcatgggctagcgtgacagaggaactcggcgcccaatatccctgggtccagatttttgagaacaagggggcgatgatgggctgcagcaatccacatcctcattgccaggtgtgggcctctagctttctacccgacatcgcccagcgtgaggagcggtcacagcaggcctataaaagccagcacggagaacctctcctcatggagtattcaagacaggaactgctccgtaaggagcggctggttctgacatcagaacattggctggtcttagtacccttttgggccacttggccttatcagactctcttgctccctcgacgacacgtgaggcgcttacctgagctgacaccagcagaacgggacgacctagcatcaattatgaagaagcttttaaccaaatacgataacctcttcgaaaccagctttccctactcaatgggatggcacggggccccaactgggtccgaggctggcgccaactggaaccactggcagctgcacgcgcattactatcctccactactgcgttccgccactgtgcggaagttcatggtgggttatgagatgctggcgcaggcccaaagagaccttacccctgagcaggcagccgagcggctgagggcactgcccgaggttcattaccacctgggccaaaaagacagagagacggcaacaatcgca

SEQ ID NO: 12116 - DNA, 1137 bp, synthetic construct
  misc_feature 1..1137: note = source = /note="Description of Artificial Sequence: Synthetic coding sequence"
  source 1..1137: mol_type = other DNA
atgtccagatcagggactgacccacaacaacgccagcaggcttcggaagctgacgctgccgccgcgaccttccgggcgaacgatcaccagcacatccgctacaatccgctgcaggacgaatgggtcctcgtctcggcgcatcggatgaaacgcccgtggcagggccaggtcgagccacaactgctcaagaccgtcccgcgccacgacccgctcaaccccttgtgtcctggcgccatcagggcaaatggagaggtgaacccacaatacgattcaactttcctgttcgacaacgatttcccagcccttcagccagacgcaccatcaccaggaccgtccgaccacccactgttccaggcaaagtcagcaagaggcgtctgtaaggtcatgtgctttcacccgtggagcgacgtcacccttccgctcatgtcggtccccgaaatccgggcagtcgtggatgcatgggcctccgtgaccgaggaactgggagcacagtacccatgggtgcagatctttgagaacaaaggagcgatgatgggatgctcgaatccgcatccgcactgccaggtgtgggctagctccttcctccctgatatcgcccagcgggaggagaggtcccagcaggcttataagtcgcaacacggggagccactcttgatggagtacagccgccaggaactgctgcggaaggagcgccttgtgctgacttcggagcattggctcgtgctggtccctttctgggcgacttggccgtatcagactctccttctgcctaggcgccacgtgagacgcctgcccgaactgaccccggcggagcgggacgatctcgctagcattatgaagaaactgctgaccaagtacgataatctctttgaaacctctttcccgtactcgatgggctggcacggagccccgactgggtctgaagccggggctaactggaatcattggcaacttcacgcccattactacccgcccttgctgcggtcggcaaccgtacggaagttcatggtgggatacgagatgctggcccaagcccagcgcgacctcacccctgagcaggccgcggagagactccgggcactcccagaggtgcactaccatctgggccagaaggaccgggaaacggccaccatcgct

SEQ ID NO: 12117 - DNA, 1137 bp, synthetic construct
  misc_feature 1..1137: note = source = /note="Description of Artificial Sequence: Synthetic coding sequence"
  source 1..1137: mol_type = other DNA
atgtcccggtccgggacagatccacagcaacgtcagcaggcctccgaggcagacgccgccgctgccacttttcgagccaacgatcatcagcatatacgatacaatcctctgcaggatgaatgggtcctggtatcggctcaccggatgaagcgaccctggcaaggacaggttgagcctcagttgctcaaaaccgttcctagacacgaccctctcaatcctctgtgtcccggcgctataagagccaatggggaggtcaatcctcaatatgactcaacattcctgttcgacaatgactttccagccctccagcctgatgcccccagcccagggccttctgaccaccctctgtttcaagctaaatcggctaggggagtctgcaaggtgatgtgtttccatccgtggagcgacgtgacattgccgctcatgagcgtcccagaaatccgggccgtggtggatgcctgggcctcagtgacggaggaactgggggctcagtacccctgggtgcagatcttcgagaacaaaggtgccatgatgggatgttcaaacccacacccccattgccaagtgtgggcatcttcctttctgcctgacatcgcacaacgggaagaaaggtcacaacaggcatataagtctcagcatggggaaccactgttgatggaatactcccgccaggagttgttgcgtaaggagagactggtactgacaagcgagcattggttggtccttgtgcccttctgggcaacctggccctatcaaaccctgctgctgccacggagacacgtaaggaggcttccggagctcacacccgctgaaagggacgacctggccagcattatgaagaaacttctgacaaagtacgacaacctcttcgagacctccttcccgtacagcatgggctggcatggcgcccccactggtagcgaggctggcgccaattggaatcactggcaactgcacgcacattattacccccctttgcttagatcggccactgttcgaaagttcatggtgggctacgagatgctggctcaagcccagcgggatttaacaccggagcaggccgccgagagattaagggccctgcctgaagtccattatcatctcggccagaaagacagggaaaccgctaccatcgca

SEQ ID NO: 12118 - DNA, 1137 bp, synthetic construct
  misc_feature 1..1137: note = source = /note="Description of Artificial Sequence: Synthetic coding sequence"
  source 1..1137: mol_type = other DNA
atgtcccgctcgggtaccgacccgcagcagcgccagcaagcctccgaggccgacgcagccgcagccaccttccgggccaatgaccaccaacacatccgctacaacccgctgcaggacgagtgggtcctcgtgtcggcgcatcgcatgaaaagaccgtggcaagggcaggtcgaaccgcagctccttaaaactgtgccgcggcatgaccctcttaacccattgtgtccgggagccatccgcgccaacggcgaggtgaacccgcagtacgactccaccttcctcttcgacaacgacttcccggccctccagccagatgctccgtcgccgggcccctccgatcatccgctgttccaggccaagtcagcgagaggtgtgtgcaaagtcatgtgctttcatccatggtccgatgtgactcttcctctgatgtcggtgccggaaatccgggcagtggtggatgcatgggccagcgtgactgaggagctgggtgcccagtacccgtgggtccaaatctttgagaataagggagccatgatggggtgttcaaacccccacccgcactgccaagtgtgggcctcctcgttcctcccagatatcgcccagagagaagaaagatctcagcaggcttacaagtcgcagcacggggaaccgctgctgatggaatactcaagacaagaactgctgcgcaaagaacggctcgtcctcacctcggagcactggctggtgctcgttccgttctgggcaacgtggccttaccagaccttgttgctgccgcggagacacgtgcgcagactgccggagcttaccccggcggagcgcgacgatctggcttcaatcatgaagaagctgcttaccaagtacgataacctgttcgaaacctcatttccgtacagcatggggtggcacggcgcgcccactggatctgaggccggagccaactggaaccactggcaacttcacgctcactactaccccccgctcctcaggtcggctaccgtgcggaagttcatggtgggatatgagatgctggcccaagcgcagcgcgatctcaccccagaacaggccgccgaaagactgagggctctcccggaagtgcattaccatttggggcagaaggatcgggaaaccgcgactattgca

SEQ ID NO: 12119 - DNA, 1137 bp, synthetic construct
  misc_feature 1..1137: note = source = /note="Description of Artificial Sequence: Synthetic coding sequence"
  source 1..1137: mol_type = other DNA
atgtctcgaagcggcactgatccacagcagcgacaacaggccagtgaggccgacgcagccgctgccacttttcgagcaaacgaccaccaacacattcgctataatccactccaagacgagtgggtcctggtctctgcccaccggatgaagcgtccctggcagggccaggtggagccgcagctactaaagacggttccgcggcacgacccgctcaatccgctgtgtcccggagcaatccgagcgaatggcgaggtcaatccacagtacgattccacgtttctgtttgacaatgactttcccgcactgcaaccggatgcaccctcccccggcccatcggaccatcctctgttccaagccaagagtgcccgcggcgtgtgcaaggtcatgtgcttccatccctggagcgatgtgaccctgccgttgatgtccgtccccgagattagagcggttgtcgacgcctgggccagcgttaccgaagagctgggcgcccagtatccctgggtccagatcttcgagaacaagggcgcaatgatgggatgcagtaatccacacccacattgccaagtgtgggcaagcagctttctgcccgatattgcccagagggaagaacggtcccaacaagcttacaagtcgcagcacggagagcctctgctgatggagtactcccgacaggaactactcagaaaggagcggctggtgctaaccagtgagcattggctggttcttgtgcccttttgggcaacctggccatatcaaaccctgctgctgccacgtcgtcatgttcgtcgcttacctgaactgaccccagctgagagggatgatctcgcctcaattatgaaaaagcttctgaccaaatatgacaacctttttgagaccagttttccatattcgatgggatggcacggtgccccgacgggaagcgaggcaggcgcgaattggaatcattggcagctgcacgcccactactacccgcccctcctgcgtagcgccactgttcgtaaatttatggtgggctacgagatgcttgctcaagcccagcgcgacctgacacccgagcaggccgccgagagattacgagcccttccggaagtgcactaccacctgggccaaaaggatcgtgagacagccacaatcgct

SEQ ID NO: 12120 - DNA, 1137 bp, synthetic construct
  misc_feature 1..1137: note = source = /note="Description of Artificial Sequence: Synthetic coding sequence"
  source 1..1137: mol_type = other DNA
atgtcaagatcaggaaccgatcctcagcaaagacaacaggcatccgaggctgatgcagcagcagccactttcagagcaaatgaccatcaacacatccgatacaatccacttcaggacgagtgggtgctcgtctcggcacaccggatgaagcggccctggcagggacaggtggaaccacagctgttgaaaacggtgcctagacatgatcctctcaacccactgtgcccgggcgcgatacgggcaaacggagaagtgaaccctcaatatgattcgacttttctgtttgataacgattttcctgccctgcagccagacgcaccctcgcctggcccaagcgatcatcccctttttcaagcgaagtcggccagaggcgtgtgtaaggtcatgtgttttcatccatggagcgacgtcaccttgccattgatgagcgtgcctgagattagagccgtggtcgatgcctgggcttccgtcaccgaagagctgggagcccaatacccctgggtgcaaatctttgaaaacaaaggagccatgatgggatgttccaacccacaccctcactgccaggtgtgggcctcatcatttctgccagatattgcacagagggaggaaagaagccaacaggcttacaaatcccaacacggagaacccctcctcatggaatacagccgccaggagctgctgcgaaaggaacgcctggtcctcacttcggagcattggctcgtcctcgtgccattttgggcaacttggccttaccaaactttgttgctcccgcggcggcatgtcaggaggctcccagaacttacccccgcggaaagggatgatcttgcttcaataatgaaaaaacttcttaccaagtacgacaacctgtttgaaactagcttcccatactcgatgggttggcacggcgctcccactggatcggaggcaggcgccaactggaatcattggcaactgcatgcacattactacccgcctttgctgcggtcggcaaccgtgcggaagtttatggtgggatacgagatgctcgcacaggcacaaagagatcttactccagagcaggccgcagaaaggctccgcgcacttccagaggttcattaccatctggggcagaaggaccgtgaaacggcgacgattgcc

SEQ ID NO: 12121 - DNA, 1137 bp, synthetic construct
  misc_feature 1..1137: note = source = /note="Description of Artificial Sequence: Synthetic coding sequence"
  source 1..1137: mol_type = other DNA
atgtctcggtcaggcacagatcctcagcagcggcagcaggctagtgaagccgacgctgcggctgcgaccttccgggctaacgaccaccaacacatcaggtataatcccctgcaggacgagtgggtgctggtgtcagcgcaccgcatgaaaaggccatggcagggccaggtggaaccgcagctgctcaagaccgtcccacggcatgacccactgaaccccctgtgccctggcgcgattagagccaacggagaagttaacccccagtacgatagcacattccttttcgataatgactttcctgccctacaacccgatgctcctagcccaggcccgtcagaccatccgttgttccaggctaagagcgctcgcggagtgtgtaaggttatgtgtttccatccttggtccgacgtcacactacccttgatgtcagtgcccgagatcagggcagtggtcgacgcctgggctagcgtcacggaggagctgggtgcacagtatccttgggtgcaaattttcgagaataagggggctatgatgggctgttcaaaccctcatcctcactgccaagtgtgggcttctagttttctcccagatattgcgcagcgcgaggaacggtcacagcaggcttacaaatctcaacatggtgaacccctgcttatggaatactctcgccaggaacttctccgcaaggaacgactggtgcttaccagcgagcattggcttgtgttagtgcccttctgggccacctggccctatcagacgctcttgttgccacgccgccatgtcagacgcctacctgagcttacgcccgcagagcgggacgatctagcctctattatgaaaaagttgttaaccaagtacgataacctattcgagacatcctttccctatagtatgggctggcatggcgctccgacgggcagcgaggccggcgccaattggaaccactggcagctccatgctcattactatccgcctttgctgagatcagccactgtgcggaagttcatggtgggttatgagatgctcgctcaagcacagcgggatcttaccccagaacaggccgccgagcggttacgagctctgcccgaggttcactaccacctgggtcaaaaggatcgagaaaccgcgactattgct

SEQ ID NO: 12122 - DNA, 1137 bp, synthetic construct
  misc_feature 1..1137: note = source = /note="Description of Artificial Sequence: Synthetic coding sequence"
  source 1..1137: mol_type = other DNA
atgtcgagatccggtaccgacccccagcaaagacaacaggcgtcagaagcagatgcagcagccgcaaccttcagagccaatgatcaccaacacattagatacaaccctcttcaggacgagtgggtcctggtgagcgcacatcgtatgaagcgcccttggcaaggccaggtggaaccccagctgcttaaaaccgtccctcggcatgaccctctcaacccactttgcccgggagcaattagggccaacggtgaagtgaatccacaatatgactcgactttcctttttgataatgatttcccggccctgcaacctgatgcaccatcgcctggacctagcgatcatcctctgttccaggccaaatcagcaaggggagtgtgtaaggtgatgtgttttcacccttggtcggatgtcaccctcccactcatgtccgtccccgaaattagagcagttgtggatgcatgggcatccgtcactgaagaactgggggcacagtacccttgggtgcagatttttgaaaacaaaggtgcaatgatgggatgctcaaatccccatccgcattgtcaagtgtgggcatcgtcgttccttcctgatatcgcccaacgagaggagcgttcacaacaagcgtataagagtcagcacggagagcctctgttgatggaatactcgcgccaggagttgttgagaaaggagcgcctggtgttgacttcagaacactggctggtccttgtgccgttttgggcaacctggccataccagacccttcttctgcctcgacgtcatgtgcgacgcctgcctgaacttactccggcagaaagggatgacctcgcatccataatgaagaagctgcttaccaaatacgataaccttttcgaaacctctttcccttactccatgggctggcacggggctccaactggtagcgaggcaggtgcaaattggaaccattggcagcttcacgctcactactacccaccactccttcgttcggccactgtgagaaagtttatggtgggctatgagatgcttgcccaagcacagcgggatcttacgccggaacaagctgcggagcggctgcgagcgcttccagaagtacattaccacctcgggcaaaaggatcgcgagacggcaaccatagct

SEQ ID NO: 12123 - DNA, 1137 bp, synthetic construct
  misc_feature 1..1137: note = source = /note="Description of Artificial Sequence: Synthetic coding sequence"
  source 1..1137: mol_type = other DNA
atgtcgcgcagcgggaccgacccgcagcagaggcagcaagcgtccgaggcagatgctgcagcggccaccttcagggcgaacgatcaccagcacatccggtacaacccgctccaggatgagtgggtgctcgtctcagcacacagaatgaaacggccttggcaaggacaggtggagccgcagctgctgaaaaccgtcccgaggcacgatccgttgaatccgctctgcccgggggccatccgggcaaatggagaagtgaacccacaatacgacagcacttttctcttcgacaatgacttcccggcgttgcaaccagacgccccttcgcctggaccctcagaccatccgctgtttcaggccaaatcggctcggggagtgtgtaaggtgatgtgcttccacccctggtcggacgtgaccctgccactgatgagcgtccctgaaatccgggccgtcgtggatgcatgggcttccgtgaccgaagagctgggcgctcagtacccgtgggtgcagatcttcgagaataagggcgcgatgatgggatgctcaaaccctcatccacactgtcaggtgtgggcctccagcttcctgcctgacatcgcacaacgtgaggagcggtcgcagcaagcatacaaatcccagcacggggaacctctgctgatggagtattccagacaagaactgctgagaaaagagcgtctggtcctcactagcgaacattggcttgtcctggtcccgttctgggccacctggccgtaccaaaccctgctgctgcctcggcggcacgtgcgtcggcttcctgagctgactccagcggagcgggacgacctcgcttcaatcatgaagaagttgctgactaagtacgacaacctgtttgaaacctcattcccctactctatgggttggcacggagctccgaccggctcggaggccggagccaattggaatcactggcagctgcacgcacactactacccaccgctcctcaggtccgccactgtgcgcaagtttatggtcggatacgaaatgttggctcaggctcagcgcgatttgaccccagagcaagccgccgaacgcctccgggcactgccggaggtgcattaccatctcggccagaaagatcgagaaaccgccacgatcgcc

SEQ ID NO: 12124 - DNA, 1137 bp, synthetic construct; identical to SEQ ID NO: 12065
  misc_feature 1..1137: note = source = /note="Description of Artificial Sequence: Synthetic coding sequence"
  source 1..1137: mol_type = other DNA

SEQ ID NO: 12125 - DNA, 1137 bp, synthetic construct
  misc_feature 1..1137: note = source = /note="Description of Artificial Sequence: Synthetic coding sequence"
  source 1..1137: mol_type = other DNA
atgtcccgctcaggaacggatccgcagcaacgacaacaggccagcgaagctgacgccgcggcggctactttccgggcgaacgaccatcaacacatccggtacaacccgctgcaggatgaatgggtgctcgtgtcggcccaccgcatgaagcggccttggcaaggacaggtggaaccgcaactcttgaaaaccgtcccacgccacgacccactgaatccactctgcccgggggcgattcgtgcgaacggggaagtgaatccgcaatatgacagcactttcctcttcgacaatgatttcccggccctgcaacccgacgccccatctccgggtccgtccgatcacccactctttcaagcaaagtcagccaggggtgtgtgcaaggtgatgtgtttccacccgtggtcagacgtgacgctcccactgatgtcagtcccagagatcagagctgtcgtcgacgcgtgggcatcggtgactgaagaactgggagcccagtacccttgggtgcagatcttcgaaaacaagggtgcgatgatgggatgctccaacccacacccgcattgccaggtgtgggcctcgtcgtttctccccgacatcgcgcaaagggaggaacgatcccagcaggcgtataagtcccagcacggagaacccctgttgatggaatattcccgccaggagcttcttcggaaagagaggctcgtgttgactagcgagcactggctggtcctggtgccattttgggccacctggccgtaccagacccttttgctgccgagacgccacgtgaggcggctgccagaactgactccagcggagcgggacgatctggcgtcaattatgaaaaagctgctgactaagtacgataacctgttcgaaacctccttcccatactcgatgggatggcatggcgccccgactgggtccgaagcgggggcgaattggaatcactggcagcttcatgctcattactacccgccattgcttagaagcgctaccgtccgcaaattcatggtcggatacgaaatgctcgcacaggcccaacgcgacctgaccccagagcaagccgccgagcgcctgcgcgcactgccggaggtgcactaccacctgggacagaaggacagggaaaccgccactatcgcc

SEQ ID NO: 12126 - DNA, 1137 bp, synthetic construct
  misc_feature 1..1137: note = source = /note="Description of Artificial Sequence: Synthetic coding sequence"
  source 1..1137: mol_type = other DNA
atgtcccgttcgggaactgacccccagcagcgacagcaggcatcagaggcagatgccgccgccgcaacttttcgtgcaaatgaccatcaacatattcgctacaacccgcttcaagatgaatgggtgcttgtcagcgcccatcgcatgaaaagaccatggcaaggccaggtggaaccacaactgctcaagacggtccccagacatgatcccctcaaccccctgtgtcctggagctatccgggctaacggtgaggtgaaccctcaatacgattccaccttcctttttgacaacgatttccctgctctgcagccggatgcaccttcacctgggccatccgatcatccgctcttccaggcaaagtcggcacgcggcgtgtgtaaggttatgtgttttcacccatggtccgatgtcaccctgccactgatgagcgtgccagaaatccgggcagtcgtcgacgcgtgggcatcggtcaccgaggaattgggtgcacaatatccttgggtgcagatttttgagaacaagggggcaatgatgggatgtagcaatccacatcctcactgtcaggtctgggcttctagcttcctcccagatattgcccaacgcgaggagcgcagccagcaagcctacaagagccagcatggcgaaccactgctgatggaatacagccgacaagagcttcttagaaaggagagacttgttctgacgagcgaacattggctggtgcttgtccccttttgggcaacgtggccataccagaccttgcttctgcctagacgccatgtgcggcggctccctgagcttactcctgcagaaagggacgacctcgcatcgatcatgaagaagctgcttactaagtatgacaatctttttgaaacctcgtttccttactcaatggggtggcatggagcacctaccggttcggaagccggtgccaattggaatcattggcagctccacgcacactactacccaccactgcttaggtccgcaaccgtcagaaagtttatggtgggatacgaaatgctggctcaggcacaaagagacttgacccctgaacaggcagcagaaagacttcgggccttgcccgaagtgcattaccacctcggacagaaagacagagaaactgccactattgca

SEQ ID NO: 12127 - DNA, 1137 bp, synthetic construct
  misc_feature 1..1137: note = source = /note="Description of Artificial Sequence: Synthetic coding sequence"
  source 1..1137: mol_type = other DNA
atgtccaggtcgggcaccgatccacaacagcgccagcaggcatcagaagccgacgccgctgcagccactttccgcgccaatgatcaccaacacatcaggtacaatccactgcaggacgagtgggtcctggtttcagcccaccggatgaagcgcccttggcaaggccaggtcgaaccgcaactgcttaagaccgtcccgcggcatgatccgctgaacccgctctgccctggagccatccgagcaaatggagaggtgaatcctcaatacgacagcaccttccttttcgacaacgatttcccggcgctccaacctgacgctccgtcgccaggtccgtcggaccatccactctttcaggcgaagtcggcaagaggagtgtgcaaagtgatgtgttttcatccttggtccgacgtgaccctccctctcatgagcgtcccggaaatccgggccgtcgtggatgcgtgggcgtcggtcactgaggagctgggtgcccagtacccgtgggtgcagatctttgagaataagggagccatgatgggctgctccaaccctcatccgcactgtcaggtgtgggcgtccagcttcctgccggacattgcccagcgcgaagagaggtcccagcaggcatataagtcacagcacggcgaacctctgcttatggaatactcgcggcaggaacttcttaggaaggaacgcctcgtgctcaccagcgaacattggctcgtcctggttccgttctgggccacctggccttaccaaactctcctgctgccacgccggcacgtccgaagattgccggagctgactccggcagagagagacgatttggcgtcgattatgaaaaagttgctgactaaatacgacaacctctttgaaacgagctttccgtacagcatgggatggcacggggccccgaccggatcagaggcgggggccaattggaaccattggcagcttcatgcccactactacccaccgcttctgcgctcagccaccgtgcgcaagttcatggtcggctacgaaatgctggcgcaagcccagcgcgatctgaccccggagcaggctgcggaacgcttgagagcgctgccggaagtgcactatcacctcgggcagaaggatagagaaaccgcgactatcgca

SEQ ID NO: 12128 - DNA, 1137 bp, synthetic construct
  misc_feature 1..1137: note = source = /note="Description of Artificial Sequence: Synthetic coding sequence"
  source 1..1137: mol_type = other DNA
atgtcgagaagcggaaccgatccgcagcagcgccagcaggcctcagaggctgacgcggccgccgccactttccgggcaaacgaccatcaacacatccgctacaatcccctgcaggacgagtgggttcttgtctccgcgcacagaatgaaaaggccttggcaagggcaggtggagccgcagctgttgaaaactgtgccacgccacgatcctctgaacccactttgcccgggggcaatccgggcaaatggagaagttaacccccaatatgattccactttcctgttcgacaatgattttccggctctgcagccggacgccccttcccctgggccaagtgaccaccctctgttccaggctaagagcgctcggggcgtttgcaaggtgatgtgcttccacccttggtccgacgtgactctgccgctgatgtcagtcccggagatccgcgcggtggtggatgcatgggcgtcagtgactgaggagctgggagcacaatatccgtgggtgcaaatcttcgagaataagggggcaatgatgggctgctccaacccgcacccgcactgtcaagtctgggcgagctccttcctgccagatatcgcacagcgcgaagagcgctcccagcaagcgtacaaatctcagcacggagaacccctcctgatggaatactcaaggcaggaattgctcagaaaagaacgccttgtgctgacctcagaacattggctggtgctcgtgcctttctgggccacctggccctatcagaccctcctcctgccgagacgccatgttagaaggctccctgagctcaccccagccgagcgggacgatttggcttcaataatgaagaagctgctcacgaagtacgacaatctgttcgaaacttcatttccatactcgatgggctggcacggagctccaactggctcagaagcgggggcgaactggaaccattggcaattgcacgcacattactacccaccgctgctgcggtcggccacggtccggaagttcatggtgggatacgagatgctggcccaagcgcagcgcgatcttaccccggagcaagctgccgagcggctgcgcgccctccccgaggtccactaccatctcgggcagaaggacagagaaactgcgactattgcc

SEQ ID NO: 12129 - DNA, 1137 bp, synthetic construct
  misc_feature 1..1137: note = source = /note="Description of Artificial Sequence: Synthetic coding sequence"
  source 1..1137: mol_type = other DNA
atgtctaggtccggaaccgacccccagcagcgacaacaagctagcgaggctgatgctgctgccgcaacttttcgagccaacgatcaccaacacattcgatacaacccactgcaggatgagtgggtgctggtttccgcacatcgcatgaagcgtccttggcaaggacaagttgagccacagttattgaaaaccgtacccagacacgaccctctgaaccccctctgccccggtgcgatcagagcaaacggggaagtgaatccgcagtatgacagcacctttctcttcgacaatgatttccccgcactgcagccagacgccccctcacctggaccgtccgatcacccactgtttcaagcaaaaagcgcccgaggggtgtgcaaagtaatgtgtttccacccgtggtcagatgtcaccctccccctaatgtctgttcctgagataagagctgtcgtggacgcctgggcatctgtcaccgaagaactcggtgcccagtatccctgggtgcagatttttgagaacaaaggggcgatgatggggtgcagtaacccacatcctcattgccaggtttgggcctcgtccttcctgcctgacatcgcccaacgggaagaaaggtctcagcaggcatacaaatctcagcacggggagccactgctcatggaatactcgaggcaggaactgctaagaaaggagaggctcgtccttacttccgagcactggctggtactggttccattttgggccacctggccataccaaaccctactattacctcgaagacatgttcgaagactgccagaactgacacccgcggagcgggacgatttagcttctattatgaagaaactactgaccaagtacgataacctgttcgagacaagtttcccctactccatgggttggcatggagctccaactggctccgaagcgggcgccaactggaaccattggcagttacacgctcactattaccctccgctgctcaggtcagctactgtgcgaaagtttatggtgggatacgaaatgctggctcaggctcagcgagatttgactcctgaacaggctgccgagcgactccgtgcgctgcctgaagtacactatcatctggggcagaaggacagggagaccgcgaccattgca

SEQ ID NO: 12130 - DNA, 1137 bp, synthetic construct
  misc_feature 1..1137: note = source = /note="Description of Artificial Sequence: Synthetic coding sequence"
  source 1..1137: mol_type = other DNA
atgagccgctctggaacagacccgcaacagagacagcaagctagcgaagccgatgcagctgctgccacttttcgcgcgaacgaccatcaacatatcaggtataacccacttcaagatgaatgggttttggtgtccgcgcatcgaatgaagaggccatggcaaggccaagtagagccgcagctacttaagaccgtccctaggcatgatccgctgaatcccctctgtcctggtgccatccgtgccaatggtgaagtgaatccccagtatgactcgacgtttttatttgacaatgatttcccggcattacagccagacgcaccgagccctggcccatctgatcatccgttattccaagcaaagtctgcccgcggtgtctgcaaggttatgtgctttcacccgtggtccgatgttactctcccgctaatgtcggttccagaaatccgggcagtggttgacgcttgggcaagcgtcaccgaggaattgggtgctcaatacccttgggtccaaatttttgagaataaaggcgcgatgatggggtgtagtaatcctcatcctcattgtcaagtatgggcctcttcttttttgccggatatcgcgcaacgggaggaaagatcacaacaggcctataagtcacaacatggagaaccacttttgatggagtactcaagacaagaattacttagaaaagaaagacttgtacttacgagcgaacattggctggtacttgttccgttttgggcgacttggccttaccagacccttcttttaccgcgacggcatgtccggcgccttcctgaattaactccagcggaaagggatgatctagctagtataatgaaaaagttattgacgaaatatgataatctgtttgaaacgtcttttccatatagcatgggctggcatggagcgccaaccgggtcagaagcgggggctaattggaatcattggcagctgcatgctcactattatccgcctcttctgcgatcagctaccgttaggaaatttatggtagggtatgaaatgcttgctcaggcccaaagagatctgacacccgaacaagccgcagagcgtctacgtgcattacctgaggtacattaccaccttggccaaaaagatagagagacagctacgattgcg

SEQ ID NO: 12131 - DNA, 1137 bp, synthetic construct
  misc_feature 1..1137: note = source = /note="Description of Artificial Sequence: Synthetic coding sequence"
  source 1..1137: mol_type = other DNA
atgtcgcgcagtggtaccgatccccagcagcgccagcaggcaagcgaagccgatgcagccgctgccacgttcagggccaatgaccaccagcacatccgttacaatcctctgcaggatgaatgggtcttggtgtctgcccaccgaatgaagcggccctggcagggtcaggtggagcctcagctgttaaagaccgtcccacggcacgaccctctgaaccccttatgtccgggggcgatccgcgcaaacggcgaggtgaacccccaatacgactctacttttttgtttgacaatgatttcccagcacttcaacccgacgccccatccccaggtccctcggatcatccactgttccaggcaaagtctgctaggggggtgtgcaaagtgatgtgtttccacccttggtccgacgtgaccttaccacttatgagtgtcccagagatccgtgcagtcgtggatgcatgggcaagtgtcacagaagagctgggtgctcaatatccgtgggtccaaattttcgagaataagggggctatgatgggatgtagtaatccacatccccactgccaagtttgggctagctccttcctccccgacattgctcaaagggaagagcgctcacagcaggcttacaaatcccagcatggcgagccactgttaatggagtactcccgccaggagctactcagaaaagagagacttgtgcttacttctgagcactggctggtgcttgtgccattctgggccacatggccataccagaccctactgctcccccggcggcatgtacggcgtctccctgaactcactcccgcggagcgggatgacctcgcaagtattatgaagaaattgctcaccaagtacgacaatctcttcgagactagtttcccgtacagcatggggtggcacggagcccctactggttctgaggccggcgccaactggaatcactggcagctgcatgcccactactacccacccctgctgaggagtgccacagtgaggaaattcatggttggctacgaaatgctcgctcaggcccaacgggacctcacacccgagcaggccgccgagaggcttagggccttgcctgaggtgcattatcacctgggacagaaagaccgcgagactgccaccatagca

SEQ ID NO: 12132 - DNA, 1137 bp, synthetic construct
  misc_feature 1..1137: note = source = /note="Description of Artificial Sequence: Synthetic coding sequence"
  source 1..1137: mol_type = other DNA
atgagcagaagtggaactgatccacagcagaggcagcaggcttctgaggctgatgccgctgccgcgacatttcgcgctaacgaccaccaacatatcagatacaaccccttgcaagatgaatgggtattggtgtccgcccatcggatgaaacgcccttggcagggccaggtggaaccccaactgctcaagacagtcccaaggcacgaccccttgaaccccctgtgccctggtgctattagagctaacggggaagtgaacccacaatatgactctacctttctgtttgacaatgatttccctgcgttgcaaccagacgcaccaagtcccgggcctagcgatcatccacttttccaggccaaaagcgctaggggtgtgtgtaaggtcatgtgtttccatccctggtccgatgttactctgcccctgatgagcgtgccagaaatcagggctgtggtggatgcctgggcttcagtgactgaggaacttggagcgcagtacccatgggtgcagatattcgaaaacaaaggcgcaatgatgggatgcagcaaccctcacccccattgccaagtatgggctagttcatttctgccggacatagcccagagggaagagaggtctcagcaggcgtacaaatcccaacacggcgaaccactcttgatggagtactctcgccaagagctccttaggaaggagcgactggtgttgacatccgaacattggctggtgttggtgccattttgggcaacctggccttaccaaaccctgcttctgccaagacgtcacgtcagacggttgccggagcttacccccgctgagagggatgacctcgctagtatcatgaagaagctgttgaccaagtatgacaatctgttcgaaacctcatttccttattctatgggatggcatggtgcacccacaggttctgaagctggcgccaactggaaccactggcaacttcacgcacactattaccctcccctgctgagatccgccactgtgcgcaaattcatggttggctatgaaatgctggcccaggcccagcgggacctcacccccgaacaggcagctgaacgactgagggccctccccgaagtgcattatcatttgggccagaaggacagagagacagccacaattgct

SEQ ID NO: 12133 - DNA, 1137 bp, synthetic construct
  misc_feature 1..1137: note = source = /note="Description of Artificial Sequence: Synthetic coding sequence"
  source 1..1137: mol_type = other DNA
atgtctcggtccggtacggatccgcaacagcgccagcaagctagcgaagcagatgctgccgccgcgacgttccgcgccaatgaccatcagcacatacggtacaacccattacaggacgaatgggttctggtctcagctcaccggatgaagaggccctggcagggtcaagttgaaccccagcttctcaagacagtgccccggcacgatcccttgaacccactctgcccaggggctattcgggctaacggggaagttaacccccagtacgattctacattcctctttgataatgactttccagcgcttcagccggatgcaccttcacctgggccctccgatcacccccttttccaagctaaatccgctcgaggagtgtgtaaagtaatgtgtttccacccatggtctgacgtgaccctgccgctgatgtctgtgcctgaaattcgggcagtggtcgacgcatgggccagtgttaccgaagagctgggcgctcaatacccctgggtccagatcttcgagaacaaaggcgcaatgatgggctgctctaatccccatcctcattgtcaggtatgggcttcatctttcctacctgacatcgcccagcgagaagagcggtcacagcaggcatataaatcacagcacggcgagcccctgttgatggagtactcaagacaagaactgttgcggaaagaacgcctggtcttaacctccgaacactggctggtgctagtgcctttctgggcaacttggccctatcagactcttctgcttcccagacgtcacgttagacgcctgcccgagctgacccccgccgaaagagatgacctggcatcgatcatgaagaagttgcttactaagtacgacaacctcttcgaaaccagtttcccctactcaatgggttggcacggagcacccacggggtcagaggcaggcgcaaactggaatcattggcagttgcatgcacactattaccctccattacttaggtccgctaccgtcagaaagtttatggtcgggtacgagatgctggctcaggctcagagggatctaacacctgagcaggcagccgagcgactacgcgccctgccagaggtacattaccacttgggacagaaagatcgagaaactgctacgatagct

SEQ ID NO: 12134 - DNA, 1137 bp, synthetic construct
  misc_feature 1..1137: note = source = /note="Description of Artificial Sequence: Synthetic coding sequence"
  source 1..1137: mol_type = other DNA
atgagccgctccggtaccgatccacagcaacggcagcaggccagcgaggcagatgccgccgcggccacgttccgcgcgaatgaccatcagcatatccgctacaacccacttcaagatgagtgggttctcgtctcggcccatcgcatgaagcgaccctggcagggacaggtagaaccccagctactaaaaacagtccctcggcacgaccccctgaaccccctgtgtcctggcgcaatcagggcaaacggagaggtgaatcctcaatacgattcgactttcctgttcgataatgatttcccagcactgcaaccagacgcgccgtcaccaggtccatcagaccaccccctctttcaggccaagtccgctaggggcgtgtgtaaggttatgtgcttccacccttggtcagacgtgacactcccactgatgagtgtgcctgagatcagggccgtggtcgacgcatgggcatcagtgaccgaggagcttggagcacagtatccgtgggtgcagatcttcgagaataagggcgcaatgatgggctgttctaacccccaccctcattgtcaggtctgggcctcttctttcctgcctgatatagcacagcgggaggaaaggagccaacaggcctataagtcccagcacggcgaaccactgctgatggagtatagccgccaggagctgcttcggaaggagagattggtgctgacatccgaacactggttggtcctggtccccttctgggctacctggccctaccagaccttgcttctaccgcggcggcacgttaggcggttgcccgagcttacacccgctgagagggatgacctcgcgtcaattatgaaaaagctactgacgaagtatgacaacctgttcgaaacatcattcccttacagcatgggttggcatggcgcacccactgggtctgaggcaggtgccaattggaaccactggcagcttcacgctcattactacccacccctcctgcggtccgccaccgtgaggaagttcatggttggatatgaaatgctagcccaagcgcagagggacttgacccctgagcaggcggctgagcgcctaagggccttacctgaagtacactaccacctcggccagaaggaccgcgagactgccacgatcgct

SEQ ID NO: 12135 - DNA, 1137 bp, synthetic construct
  misc_feature 1..1137: note = source = /note="Description of Artificial Sequence: Synthetic coding sequence"
  source 1..1137: mol_type = other DNA
atgtctagatccggcacagaccctcagcaaagacagcaggcttccgaggccgacgccgctgcggccacctttcgcgccaacgatcaccagcatatcagatataaccccctgcaggatgagtgggtgctggttagcgcacacagaatgaagcgcccttggcagggacaggtggagccccagctgctcaagacggtgccgcgacacgacccactcaacccactctgcccaggagcaatccgcgccaacggcgaagtcaatccacagtacgattccaccttcctctttgacaacgatttccctgcattgcagccggacgctccctcacctggccccagtgatcacccactgtttcaggcaaagagtgcacgtggcgtctgcaaggtgatgtgtttccatccctggtcggacgtcacactgcccctaatgtcggtgccggagatccgtgcggtagtggacgcttgggccagcgtcaccgaggagttgggtgcacagtacccttgggttcagatcttcgagaacaagggagcaatgatggggtgttctaacccgcacccccattgccaggtctgggctagttctttcctgcccgacattgcccagcgagaagagcggagccagcaggcctacaagtcccagcacggcgaaccgctgctcatggagtactctcgtcaggagctgctgcgtaaggagcgcctggtgctcacgtccgagcattggctggtactggtccccttttgggccacctggccgtatcagaccctgcttcttcctcgtcgtcacgtccgccgcttgccggagctgaccccggccgaacgggatgacctggcgtcgatcatgaagaagcttctgaccaaatatgacaatttgttcgagacgtctttcccatactccatgggatggcatggcgcacccaccggctccgaggcaggagcaaattggaatcattggcaacttcatgctcattattacccgccgttgcttcgctccgccaccgtgcgcaagttcatggtgggatacgagatgctcgcccaggctcagcgcgacctgacccccgagcaggccgctgaacgtctacgtgctctcccagaggttcactaccacctcggccaaaaggatcgtgagacagctacaatcgcg

SEQ ID NO: 12136 - DNA, 1137 bp, synthetic construct
  misc_feature 1..1137: note = source = /note="Description of Artificial Sequence: Synthetic coding sequence"
  source 1..1137: mol_type = other DNA
atgtctcgaagcggaacggatccacaacaaagacagcaggcttcagaggccgatgcggccgcagcgacttttcgtgctaacgaccaccagcatataagatacaaccccttgcaagacgagtgggtacttgtttctgcgcatcgtatgaagagaccttggcaaggccaggtggagcctcagttgctgaagacagtgccccgacacgacccgctgaaccccttatgcccgggggcaattagagctaacggagaggtcaatccccagtacgattctacctttctgttcgataatgattttccagctctccagccagacgcgcctagcccaggtccctctgatcaccccttgttccaggctaagtctgcacgcggcgtatgcaaagttatgtgttttcacccatggagcgatgtcactctcccactcatgtctgtgcctgaaattagagccgtcgtcgacgcctgggcgtcagttaccgaagaactgggagctcaatacccatgggtgcaaatcttcgagaacaagggcgcgatgatgggctgttccaacccccatccccactgtcaggtctgggcctctagctttttgcccgatattgctcagagggaggagcgaagccagcaggcttataagagccagcacggagagcccctgttgatggaatactcacgacaggaactgctgcgtaaggaacggcttgtgctaacctctgagcattggctcgtgctggttcctttttgggccacgtggccataccaaaccctgttgctaccacgacgacatgttcgtagactgcctgaactgactccagcggagcgagatgacttagcaagtattatgaagaaactcctgactaagtatgacaatctattcgaaacctctttcccttatagcatgggttggcacggggccccaaccggtagtgaggccggggctaattggaaccactggcagttgcacgcgcattactacccaccccttcttagaagtgccactgttagaaaattcatggtaggatatgaaatgcttgctcaagcacaacgtgatcttacccctgagcaagctgctgaaaggttgcgagccctacctgaggtccactaccacctaggccaaaaggaccgggagactgccacaattgct

SEQ ID NO: 12137 - DNA, 1137 bp, synthetic construct
  misc_feature 1..1137: note = source = /note="Description of Artificial Sequence: Synthetic coding sequence"
  source 1..1137: mol_type = other DNA
atgtcgcgttcgggtacggatccgcaacaacgacaacaagcgtcggaagcggatgcggcggcggcgacgtttcgagcgaatgatcatcaacatatacgatataatccgttacaagatgaatgggtactagtatcggcgcatcgtatgaaacgaccgtggcaaggtcaagttgaaccgcaactactaaaaacggttccgcgacatgatccgttaaatccgttatgtccgggtgcgatacgagcgaatggtgaagtaaatccgcaatatgattcgacgtttttatttgataatgattttccggcgctacaaccggatgcgccgtcgccgggtccgtcggatcatccgctatttcaagcgaaatcggcgcgtggtgtatgtaaagttatgtgttttcatccgtggtcggatgttacgctaccgctaatgtcggtaccggaaatacgagcggtagttgatgcgtgggcgtcggtaacggaagaactaggtgcgcaatatccgtgggtacaaatatttgaaaataaaggtgcgatgatgggttgttcgaatccgcatccgcattgtcaagtttgggcgtcgtcgtttctaccggatatagcgcaacgagaagaacgttcgcaacaagcgtataaatcgcaacatggtgaaccgttactaatggaatattcgcgtcaagaactattacgaaaagaacgactagttctaacgtcggaacattggttagtactagtaccgttttgggcgacgtggccgtatcaaacgctattattaccgcgacgacatgttcgacgtttaccggaactaacgccggcggaacgtgatgatctagcgtcgataatgaaaaaactattaacgaaatatgataatctatttgaaacgtcgtttccgtattcgatgggttggcatggtgcgccgacgggttcggaagcgggtgcgaattggaatcattggcaactacatgcgcattattatccgccgctactacgttcggcgacggtacgtaaatttatggtaggttatgaaatgctagcgcaagcgcaacgtgatctaacgccggaacaagcggcggaacgattacgtgcgttaccggaagttcattatcatttaggtcaaaaagatcgtgaaacggcgacgatagcg

SEQ ID NO: 12138 - DNA, 1137 bp, synthetic construct
  misc_feature 1..1137: note = source = /note="Description of Artificial Sequence: Synthetic coding sequence"
  source 1..1137: mol_type = other DNA
atgtccagatcaggaacagatccacaacaaagacaacaagcaagtgaagcagacgcagcagctgcaacttttagagcaaatgatcatcaacatattcgttataatccacttcaagatgaatgggttttagttagtgctcatagaatgaaaagaccatggcaaggacaagtcgaacctcaattacttaaaactgttccaagacacgatccactaaatccactttgtcctggagcaataagagctaatggtgaagtaaatccacaatatgatagtactttcttatttgataatgattttccagctcttcaaccagatgcaccatctccaggaccatctgatcatccattattccaagctaaatcagcaagaggtgtttgtaaagttatgtgtttccatccatggtcagatgtaacattaccattaatgtcagttccagaaatacgtgcagtagttgatgcatgggcttcagttactgaagaattaggagctcagtatccatgggttcaaattttcgaaaataaaggagctatgatgggatgttctaatcctcatccacattgtcaagtatgggcatctagtttcttaccagatatagcacaaagagaagaaagatcacaacaggcatataagtcacaacatggagaaccacttttaatggaatactcaaggcaagaattattaagaaaagaacgtttagttctaacaagtgaacattggcttgttttagttccattttgggctacatggccatatcaaactcttttacttccaagacgacatgttagaagattgccagaattaacaccagcagagagagatgacttagcttcaattatgaaaaaattattaacaaaatacgacaatttattcgaaacatcatttccttattcaatgggttggcatggtgctccaacaggatcagaggctggagctaattggaatcattggcaattgcatgctcattattatccaccacttttaagatctgctactgtaagaaaatttatggtgggatatgaaatgcttgctcaagcacaaagagaccttactccagaacaagccgcagaaagattaagagcattacctgaagtacattatcatcttggtcaaaaggatagagaaacagcaactatagca

SEQ ID NO: 12139 - DNA, 1137 bp, synthetic construct
  misc_feature 1..1137: note = source = /note="Description of Artificial Sequence: Synthetic coding sequence"
  source 1..1137: mol_type = other DNA
atgagtcggtccggcacggacccccagcaacgtcaacaggcctccgaggccgatgctgccgccgctacttttagggccaatgaccatcagcacatcagatataacccgctgcaggatgagtgggttcttgtgagcgcccatcgcatgaaacggccctggcagggacaggtggaaccccaacttctaaagaccgtgccgagacatgatccactgaatcccttgtgcccgggagctatacgggccaacggggaagtcaacccccaatacgattcgacattcctgtttgacaatgacttccctgctcttcagccagatgcacccagccctggaccatctgatcatcccctgttccaggccaagtctgcccggggcgtctgtaaggtgatgtgcttccacccatggtcagatgttacacttccgctaatgtccgtgccggagattagagcagtggtagatgcctgggcctctgttactgaggagctcggtgcacaatacccatgggtgcagatcttcgaaaacaagggggccatgatgggatgctcaaaccctcatccacactgccaagtttgggcctcttctttcttgcccgacatagctcagagggaggaacgttcgcagcaggcctataaaagccaacacggagaacctcttctgatggagtatagccgccaggagctgcttcgtaaggagcggcttgtgctcacaagcgaacattggctcgtattggtgccattctgggcaacttggccctatcaaacgttactccttcctcggagacatgtccgtagactgcccgaactcacgccggctgagcgggatgacctggccagtattatgaaaaagctgctgaccaagtatgataaccttttcgagacgtcatttccgtactctatggggtggcacggcgcccctacaggttcagaggccggcgccaattggaaccactggcagctgcatgcacactactaccccccgttgctgcgcagtgctacagtccggaaatttatggtgggctatgaaatgctggcccaggcccaaagggatctgactcctgagcaggcagcagagagactaagagctctcccagaggtacactaccacctaggacagaaagacagggaaacagcaacaatcgct

SEQ ID NO: 12140 - DNA, 1137 bp, synthetic construct
  misc_feature 1..1137: note = source = /note="Description of Artificial Sequence: Synthetic coding sequence"
  source 1..1137: mol_type = other DNA
atgtcaagatcaggtaccgatccccagcagagacagcaggcttccgaggccgacgcagcggccgccaccttcagggcaaatgaccaccagcacattcggtacaatcccctccaggatgagtgggtgctcgtgagtgcccaccggatgaagaggccttggcagggccaggtcgagccccagctgctcaagacagttccccgccacgatcccttaaacccgttgtgccctggagcgatccgggctaacggagaggtcaaccctcagtatgacagcactttcctcttcgataacgatttcccggcactccagccagatgcaccttcacccggtccttctgatcaccctttgttccaagcaaaatctgctcgcggggtgtgcaaagtcatgtgcttccatccgtggtctgacgtgacactgcctttgatgtccgtcccagagatcagggccgttgtagacgcgtgggcttcagtcacggaagaactcggagcacaatatccgtgggttcaaatctttgaaaataaaggggctatgatggggtgctcgaacccacatccacactgtcaggtgtgggcgagttcctttctgcctgacattgcacagcgagaagagaggagtcagcaggcttacaaatcacaacatggagagcccttgctgatggagtatagccgccaggagctgctgcgtaaagaaaggctcgttctgacctccgaacactggctcgtgttggtgccgttctgggcgacatggccgtatcagaccctgttactcccaaggcggcacgtgcgtcgccttccagagctgactcctgctgagcgtgacgatctggcttctataatgaagaaactgttgacaaagtatgacaacttattcgagacaagcttcccgtacagcatgggatggcacggagccccaaccgggtccgaggccggcgctaactggaaccattggcagctgcatgcccactactacccaccactgctgaggagtgccaccgtgagaaagtttatggtgggctacgaaatgctggcacaggcacaaagagacctgactccagaacaggctgccgagcgtctgcgagctttacccgaagtgcactaccacctgggccagaaggatagagaaactgctacaatcgct

SEQ ID NO: 12141 - DNA, 1137 bp, synthetic construct
  misc_feature 1..1137: note = source = /note="Description of Artificial Sequence: Synthetic coding sequence"
  source 1..1137: mol_type = other DNA
atgagtagatccgggacagacccgcagcaaagacaacaagcttctgaagcggacgctgctgcagcgacctttcgagctaacgaccatcaacacattcgatacaatccactgcaagacgaatgggtacttgtgtctgcccaccgaatgaaaagaccgtggcaaggacaggtcgagccacagttgctaaaaactgtgccgagacacgacccactaaacccactctgtcctggagctatcagggccaatggagaagtgaaccctcagtatgactctacatttttattcgataacgactttccagcccttcaaccggacgctccatcgccaggaccatcagaccacccacttttccaggcgaagtccgcacggggagtctgtaaagttatgtgcttccatccatggagcgatgttacgctccctctcatgtccgtgcccgagatcagagctgtggtggacgcctgggcctctgtgacagaagaactgggagctcaatatccatgggttcagatcttcgagaacaaaggggccatgatgggatgttctaacccgcacccacactgccaggtatgggcatctagcttccttcctgacattgctcagcgggaagaaaggtcacaacaagcctataagtcacaacacggagagccattgcttatggagtactcacgtcaggaattgctcagaaaggagcgccttgtgttgacatcagaacactggctggttctcgtgccattctgggccacatggccataccagacattgctgttgcccagacgtcatgtgcggcgacttccagaactgactcctgctgaacgagacgacctcgcatcaattatgaagaagctactgacaaagtatgataatcttttcgagacatcattcccgtacagtatgggatggcacggagctccaacgggatccgaagcaggtgcaaactggaatcattggcaattgcacgcacactattatcccccgctgttgcgctcggccactgttcgtaagtttatggtcggatatgaaatgcttgcgcaagctcagagagatctcactcctgaacaagctgccgagagactcagagctcttccggaggtccattatcatctgggtcaaaaggacagggaaactgcaactatagca

SEQ ID NO: 12142 - DNA, 1137 bp, synthetic construct
  misc_feature 1..1137: note = source = /note="Description of Artificial Sequence: Synthetic coding sequence"
  source 1..1137: mol_type = other DNA
atgtcacggtcaggcaccgacccacaacagcgacagcaggcctctgaagcagacgcagctgctgcaacattccgagccaacgaccatcagcatatcagatataacccattgcaggatgaatgggtcctggtgtcagcccaccgtatgaagcgcccgtggcaaggccaggtggaaccccagctgctaaagacagtgcccagacatgatcccctgaacccactctgcccaggagctattcgagccaatggagaagttaatccgcagtatgatagcaccttcctctttgataacgattttcctgcattgcagccggacgcccctagccctggacctagtgaccacccgcttttccaggcaaaatccgctcgcggggtgtgtaaggtgatgtgcttccacccgtggagcgacgtgaccttacccctgatgtccgtacccgaaatcagggccgtcgtcgatgcctgggctagcgtcactgaagagctaggtgcccaatatccatgggtccagatctttgagaataagggagcgatgatggggtgtagcaacccacaccctcactgtcaagtttgggcatctagcttcctgcccgacattgcacagagagaagagagatctcagcaggcttacaagagccagcacggtgagcctctgctaatggagtactcgcgacaggaattgctgcgaaaggaacgtctcgtgctgaccagtgagcattggctggtccttgttcctttttgggcaacctggccctatcaaacactgttattgcctcgaaggcatgtccggcggcttcccgaactgacccccgcagaaagagatgacctggcctcgatcatgaagaagctgcttactaagtacgataatctttttgaaacctcttttccctactccatgggctggcacggtgccccaacagggagcgaagctggcgcaaactggaaccattggcagttgcacgcacactattatcctccgctgttgagaagtgcaaccgtgcgcaagttcatggtcgggtacgaaatgctcgcacaagctcagagagatttaactcccgagcaggctgctgaaaggttgcgggccctgccagaggtccattatcacctgggtcagaaggaccgggaaactgccacgatcgcc

SEQ ID NO: 12143 - DNA, 1137 bp, synthetic construct
  misc_feature 1..1137: note = source = /note="Description of Artificial Sequence: Synthetic coding sequence"
  source 1..1137: mol_type = other DNA
atgtcgcggtcgggaactgatcctcagcagcgccagcaagccagcgaagctgacgcagccgccgctaccttcagagccaatgatcaccagcatatccggtacaatccgctgcaggatgaatgggtactggtgtcggctcatcgcatgaaacggccgtggcaaggacaggtggaaccccagctccttaaaaccgtcccacgccatgacccgctcaatcctctttgccctggtgccattcgggccaacggagaggtgaacccccagtacgactcaacgtttctgttcgacaacgacttcccggcgctgcagccggatgccccttcgccaggcccctcggaccatccactgttccaggcgaagagcgcgagaggggtgtgcaaggtgatgtgttttcacccctggtctgacgttaccttgccgctgatgagtgtgccagagatccgcgctgtggtggacgcgtgggcctccgtcactgaagagctgggagcccagtacccgtgggtgcagatcttcgaaaacaagggagccatgatggggtgcagcaacccacacccgcattgccaagtctgggcttccagcttccttccggacatcgcgcaacgagaggaacgttcacaacaggcctacaagtcccaacatggagaacctctgctcatggagtattcccgccaggagctcttgcggaaggagcggctggtgttgacctcagaacactggctggtcctggtgccgttctgggcaacttggccgtaccagaccctgctgctccctcgccgccatgtccggcgcctgccggagctcactcctgcagagagggatgacctcgcatccatcatgaagaaattgctcactaagtacgacaaccttttcgaaacctcgttcccgtactcaatgggatggcacggcgccccaacgggttccgaagcaggcgccaattggaaccactggcagctccacgcccactactacccaccactgctgagaagcgcgaccgtgagaaaatttatggtgggctacgagatgctggctcaagcgcaacgcgatctcactcccgaacaggcggcggagaggctgagagcactgccggaagtccactaccacctcggacaaaaggatagggaaactgccaccatcgca

SEQ ID NO: 12144 - DNA, 1137 bp, synthetic construct
  misc_feature 1..1137: note = source = /note="Description of Artificial Sequence: Synthetic coding sequence"
  source 1..1137: mol_type = other DNA
atgtcgaggtccggaaccgatccacaacagagacagcaggcatcagaagctgacgctgctgcagccacttttcgagcaaacgaccaccaacatattagatataatccgctgcaagatgaatgggtcctggtttctgcccaccgcatgaaacggccgtggcagggccaggttgaaccccagcttcttaaaaccgtcccgcgacatgacccactgaacccgttgtgcccaggggccatcagagctaacggagaagttaacccgcagtatgactcgacgtttctcttcgataatgacttccccgcactacagcccgacgcaccgtcacccgggccttcagatcacccattgttccaggcgaagtcagcacgcggtgtctgtaaagttatgtgttttcacccttggagcgacgttaccctgcctctgatgtccgttcccgagatccgggcggtggttgatgcctgggcgtcagttacagaagagctgggagcgcagtatccatgggttcagatctttgagaataaaggtgccatgatgggctgcagcaatccacatccccactgtcaagtttgggcttcgtcattcttacctgatattgcgcagcgagaggaacgaagtcaacaggcgtataagagccagcatggagaaccgctcctcatggaatactctcgccaagaactcctccgcaaggagcggctcgtgctcacgagcgagcattggttggtccttgtgccgttctgggcaacatggccttaccagactttgctacttcctcgacgccacgtacgccgtctgcccgaattaactccggcggagcgggacgatctggcgtcgataatgaagaagctgctaaccaagtatgacaacctattcgagacaagcttcccgtactctatgggttggcatggtgccccgactggatctgaggcgggagctaattggaatcattggcaacttcatgcccattactaccctcctttactgcgcagtgcgactgtgcgcaagttcatggtcggctatgagatgctcgcgcaggcccaacgcgatctgactccagaacaagccgcagagcgccttcgcgcgttgccggaggtccactatcatctcggccaaaaagacagggaaactgccacgatcgcg

SEQ ID NO: 12145 - DNA, 1137 bp, synthetic construct
  misc_feature 1..1137: note = source = /note="Description of Artificial Sequence: Synthetic coding sequence"
  source 1..1137: mol_type = other DNA
atgtcccgttcaggcacggacccccagcagcgacaacaagcatccgaggccgacgcggcagcagccacctttcgcgcgaatgaccaccagcacatccgttacaaccctcttcaagatgagtgggtgctggtatctgcccaccggatgaagaggccgtggcaaggccaggtggaaccccagctcctgaagaccgtgcctcgccacgacccgcttaaccctctctgtcccggggctataagagccaatggggaagtcaacccacagtatgactcaaccttcttgttcgataatgatttccctgcactgcagcccgatgctccgtcacctggaccctctgatcaccctttgtttcaggctaaatctgcaaggggcgtgtgtaaagtaatgtgcttccacccatggtcggatgtcacactcccgctgatgtccgtccccgaaattagagccgtggtggatgcatgggcctctgtgacagaggaactgggtgctcagtatccctgggtccagatttttgagaataagggagctatgatggggtgttccaacccccatccccactgtcaggtttgggcatcttcattcctccctgatatcgcccagcgggaggagcgtagccaacaggcttacaagagtcagcatggagagccactcctgatggagtattcgcgtcaggagctgctgcgcaaagaaagactcgttttaacttctgagcattggctcgtgctcgtcccattctgggcaacctggccatatcagacacttctgctgccaaggaggcatgtgcggaggctgcccgagcttacacctgccgaaagagacgacctggcaagcataatgaagaagctcttgaccaagtatgataatctgttcgaaacatcattcccatacagcatggggtggcacggtgcgcctacgggctccgaggccggcgccaactggaatcattggcagttacacgcccattactacccacccttactgaggagtgccacagtgagaaagtttatggtgggctatgagatgctggcacaggcccaacgggaccttacgccagagcaggcagcagaacgcttgcgagccctgccagaggtccactatcatctcggtcagaaagatcgcgagacagctacgattgcc

SEQ ID NO: 12146 - DNA, 1137 bp, synthetic construct
  misc_feature 1..1137: note = source = /note="Description of Artificial Sequence: Synthetic coding sequence"
  source 1..1137: mol_type = other DNA
atgagcagaagtggaaccgacccccagcagaggcagcaggcaagcgaggccgacgccgccgctgccacattcagggccaacgatcaccagcacatccgttacaatccactgcaggatgagtgggtcctggtgtctgctcatcgtatgaagaggccctggcagggacaagtggaaccacagctcttgaaaaccgtgccccgccatgaccccctcaatcccctgtgcccaggcgctattagggcaaacggagaggtgaaccctcagtacgatagcaccttcctcttcgacaacgactttccagcacttcagcccgatgctccaagtcccggccccagtgaccatcctctcttccaggccaaatcagcacgtggtgtatgcaaggtgatgtgtttccatccttggtccgatgttaccttgcccctcatgagcgtgcccgagattagggctgtggtggacgcttgggcatccgtgaccgaggagctgggtgctcagtacccctgggtgcagattttcgagaataagggtgccatgatgggatgtagcaacccccatccccattgccaggtgtgggctagttccttcctgcctgacattgcccaacgtgaggagaggagccagcaagcttataaaagccagcacggagaacctcttttgatggaatattccaggcaagagctgcttcgtaaggaacgcttggtcctgacaagcgagcactggcttgtactcgtacctttttgggctacatggccctatcagacactgcttctgcctaggagacacgtgagacgccttcctgagctgacacccgccgaacgtgacgatcttgcttccatcatgaaaaagctgctcacaaagtatgataatctgtttgagacttcattcccatatagcatgggttggcatggcgcccccaccggatccgaagccggcgcaaactggaaccattggcaactgcatgcacactattatcctcccctgttgcgttctgccacagtgcgcaagttcatggtgggctacgaaatgcttgctcaggctcagagagacttgactccagagcaagctgccgaacgccttcgcgctttgccagaagtccactatcacttgggacagaaggatagggagacagctactatcgca

SEQ ID NO: 12147 - DNA, 1137 bp, synthetic construct
  misc_feature 1..1137: note = source = /note="Description of Artificial Sequence: Synthetic coding sequence"
  source 1..1137: mol_type = other DNA
atgagtcgttctggtactgatccacaacaaagacaacaagcttcggaagctgatgctgcagcagcgaccttcagagctaacgatcaccaacacattcgatataacccattacaggatgagtgggttttggtttcagcgcaccgaatgaaacgtccttggcagggccaggtggaaccacagctcttaaagaccgtcccacgtcatgatcctcttaatccactttgcccaggtgcaataagagctaatggcgaagtaaacccacagtatgattcaactttcctgttcgataatgactttcctgcgttgcagccagatgcaccatcacctggtcctagtgaccatcccttgtttcaggccaagtctgctcgaggcgtgtgcaaagttatgtgttttcacccttggagtgatgtcaccctgccacttatgagtgtgccagaaataagggccgtggttgatgcatgggcatcagttaccgaagagctgggagcccaatatccttgggtccagattttcgaaaacaagggtgctatgatgggttgctctaaccctcatccacactgtcaagtttgggcctcctcttttctacctgatattgctcaaagggaggaacgatcacaacaagcttataaatcccagcatggagaaccacttcttatggaatatagtagacaggaactcctccgtaaggagcgacttgtgcttacaagcgagcattggcttgtgctcgtgcctttttgggctacctggccataccaaacgttgctacttccgaggcgtcacgttcgacgcttacccgagctcactcctgctgaaagagatgatcttgctagcataatgaagaagttgctcacaaagtatgataaccttttcgagacctcatttccttatagtatgggatggcatggagctccaactgggtcggaggccggagccaattggaatcactggcaactgcatgctcattactatccacctctgctgcggtccgctaccgtgagaaagttcatggttggatacgaaatgcttgcgcaggctcaaagggatttgacgcctgaacaagcagctgagcgtcttcgagcgttgccagaagttcattatcatttaggacaaaaggatcgggagaccgctacaatcgcc

SEQ ID NO: 12148 - DNA, 1137 bp, synthetic construct
  misc_feature 1..1137: note = source = /note="Description of Artificial Sequence: Synthetic coding sequence"
  source 1..1137: mol_type = other DNA
atgtcccgatccgggacagacccccagcagagacagcaggcaagtgaagctgatgccgccgccgccacattccgagccaacgatcaccagcacatacgatataaccctctccaggatgaatgggtgcttgtgtcagcccatcggatgaaaagaccctggcagggacaggtggaaccacagctgctaaagacagtcccaaggcatgatcccctcaatcccctatgccctggagctatacgcgctaacggggaagtcaacccccagtatgattctacttttttatttgataacgatttccccgccttacagcctgatgctccatcacccggacctagtgatcacccactcttccaggccaaaagtgccagaggagtctgtaaagtgatgtgttttcatccatggtccgatgtgactctacccctcatgtccgtccccgaaatcagggcagtcgtcgatgcttgggcatctgtgactgaagagctcggggcccagtacccctgggtccaaattttcgaaaacaaaggggccatgatgggatgtagtaatccccatcctcactgtcaggtgtgggcttcctcgtttttacctgacatagctcagagggaagaacggtcccagcaggcttataaatcccagcatggggaacctctgcttatggaatattctagacaggaactgcttcggaaagaaaggctggtgttaacttccgaacattggctcgtgctcgtgcccttttgggcaacatggccatatcagacactacttcttccccggcgacatgtccgacgcctcccagagctcacaccagcggaaagggacgatttagcttcaataatgaagaagctcctgacaaagtatgacaaccttttcgaaacttcttttccttactcaatggggtggcacggggctcctactgggtctgaagccggggcaaattggaatcattggcagcttcatgctcattattatccacctctactgaggtccgccactgtgcgcaaatttatggtaggatatgagatgcttgcccaggcccagcgggatcttactccggaacaggcagccgaacggctccgggctctgcctgaagttcactaccacctgggacagaaagatcgagagacagccactatagct

SEQ ID NO: 12149 - DNA, 1137 bp, synthetic construct
  misc_feature 1..1137: note = source = /note="Description of Artificial Sequence: Synthetic coding sequence"
  source 1..1137: mol_type = other DNA
atgagtcgctctggaacggatccccagcagaggcagcaggcatccgaggcagatgcagctgctgcgacatttagagccaacgaccatcaacatattaggtataacccgctgcaggatgagtgggtgctggtcagcgcacatagaatgaaaagaccatggcaaggtcaggtagagccccagctgctgaaaacagtgcctaggcacgacccgttaaacccgctgtgtccaggtgccatccgggccaacggcgaggttaacccgcaatacgattctacatttctcttcgataatgatttccccgccttacaacccgatgctccaagtccgggcccctctgaccatccactcttccaggccaagtcagcacgcggtgtctgtaaagtgatgtgtttccatccctggtctgatgtaacgcttcccctgatgtcagtgccagagattcgggccgtcgtcgatgcatgggcgagcgttactgaggagctgggcgctcagtatccatgggtgcagatatttgaaaacaaaggtgccatgatgggatgctccaatccccatcctcactgccaggtctgggcgtcttctttcctgccggatatcgctcagcgtgaggagcgtagccaacaagcttacaaatctcagcacggcgaacccctgctaatggaatattctcggcaggaattgctccgaaaagagagattggtgctaacttccgaacattggctagtcctcgtcccattctgggcaacgtggccatatcagacgctactactgcctcgtaggcacgtccgaagactgccggagctgacacctgctgaacgcgatgatctcgcctcaataatgaaaaaacttctaacgaaatatgataatctatttgaaacatccttcccatacagcatgggatggcacggcgccccgaccggttctgaagcaggagctaactggaatcactggcagttgcatgcccactactaccctccccttctgcggtccgctacagttcggaagtttatggtcgggtatgagatgttagcacaggctcagagagatctgacgcctgagcaggcggcagaaagactccgcgctctgcccgaagtgcactaccatctgggacaaaaggacagagagaccgccacaatagcc

SEQ ID NO: 12150 - DNA, 1137 bp, synthetic construct
  misc_feature 1..1137: note = source = /note="Description of Artificial Sequence: Synthetic coding sequence"
  source 1..1137: mol_type = other DNA
atgagccgcagcgggaccgatccgcagcagcgtcagcaggcgtctgaagcggatgctgccgctgcgacgtttcgggcgaacgatcatcagcacatccgctacaaccctctgcaggacgaatgggtgctggtgtctgcacacagaatgaagcgtccgtggcaaggccaggttgaaccgcagttgctgaagaccgtccctcgacatgatcctctgaatccgctgtgcccaggcgccatacgtgcaaacggagaggtcaatccgcaatacgacagcacattcctatttgataacgatttccctgcattacaacctgacgcgccttcgccgggtccaagtgatcatccgctgttccaagccaaatctgctcgaggtgtgtgtaaggtgatgtgcttccatccgtggagcgatgtgaccctgcccctgatgtctgttccagagataagggcagtggtcgatgcgtgggcttccgttaccgaggagctgggcgcgcagtacccatgggtccagatctttgagaataagggtgcaatgatggggtgtagcaatccacaccctcactgccaggtctgggcgtcaagctttctgccagatatcgcacaacgcgaggagcgcagccagcaggcctataaaagccagcacggtgagccgttgctcatggagtatagccgccaagaattactgcgaaaggaaaggctggtcttgaccagcgaacactggcttgttctagtgcctttttgggcgacgtggccatatcaaaccttgctgcttccgcggcgccacgtgcgccgcctgcccgagctcaccccggcggaacgcgatgatcttgcatctatcatgaagaagctgctgacgaagtatgataacctgttcgagacctccttcccctactcgatgggatggcatggggcgccgaccggtagcgaagcaggagctaactggaatcactggcagctgcatgcacactactacccgccactgctgcggagcgcgaccgttagaaagttcatggttggttatgagatgctggcccaggctcagcgtgatctgacgccggagcaggccgcagagcgtctcagggcattgccagaagttcattaccatctgggccaaaaggacagggaaacggcaaccatcgct

SEQ ID NO: 12151 - DNA, 1137 bp, synthetic construct
  misc_feature 1..1137: note = source = /note="Description of Artificial Sequence: Synthetic coding sequence"
  source 1..1137: mol_type = other DNA
atgagcagatcagggacagatccgcagcagcgacagcaggcctccgaggccgatgctgctgcggctacattcagggctaacgaccaccagcatatccgttataaccctctgcaggatgagtgggtcttggtttccgctcacagaatgaaaagaccctggcagggccaagtcgaaccacagttgctgaagacggtacccagacacgaccctttgaaccctctgtgccccggagctattcgcgcaaatggggaagtgaacccccaatacgattccactttcctattcgacaatgatttcccagcactccagcccgatgccccaagcccaggcccgtccgatcaccctctcttccaggccaagagcgcacgaggcgtatgtaaagtgatgtgtttccacccgtggtcagatgtcacactcccattaatgtccgtcccagagattcgtgcggtggtagacgcctgggcctccgtcacagaagaactgggggcccagtacccctgggtgcagattttcgagaacaaaggggctatgatgggatgttctaatccgcacccgcattgtcaggtctgggcatccagttttttacctgacatcgctcagagggaggagcgcagccaacaggcgtataaaagccagcatggcgagcccctgctcatggaatactcccggcaggagctgctgcgtaaggagcggctggtacttactagcgagcattggctggtcctggtccctttttgggccacatggccctaccaaaccctgttactgccgcgccgtcacgttcgaaggctgccggaattgacaccggcggagagggacgacctggcctcaatcatgaagaagctgcttacaaagtatgataatctctttgagacatcttttccttacagtatgggttggcacggggcccccaccggttccgaagctggcgccaactggaaccactggcagctgcacgctcattattacccaccactactcaggtcggcaaccgtacggaagtttatggttggatatgagatgctcgcccaagcccagcgggatcttaccccggagcaagcagcggaaagacttcgggccctccccgaggtgcattaccatctggggcagaaagacagagagactgctaccatcgcc

SEQ ID NO: 12152 - DNA, 1137 bp, synthetic construct
  misc_feature 1..1137: note = source = /note="Description of Artificial Sequence: Synthetic coding sequence"
  source 1..1137: mol_type = other DNA
atgtcccgcagcggcacggacccccagcagaggcagcaggccagcgaagcagatgccgcagccgcaacttttcgcgctaatgaccatcagcacataagatataaccccctgcaggatgagtgggtattggtgtcggcccaccgaatgaagcgtccgtggcagggacaggtggagccccagctgctcaagactgtgccgaggcatgatccgctgaacccgctctgtccaggagcaatccgcgccaatggcgaggtcaacccgcagtatgactcgacgtttctgtttgataacgacttcccggcactacagccagacgctccctcccccggcccctccgatcaccccctgttccaggctaagagcgctcgaggcgtctgcaaggtgatgtgttttcatccttggtccgacgtgacactgcccctgatgagcgtcccggaaattcgcgccgtggtagatgcttgggcatctgtgactgaagagttgggggcccaatacccatgggtccaaatattcgaaaacaagggggcgatgatggggtgctcgaatccccacccgcattgtcaggtgtgggcctcgagctttctgccggatatcgcacaacgcgaggagcgatcccagcaggcctacaagtcacaacatggagagccactgctgatggaatacagtcgccaggagcttttgcgcaaggagaggcttgtgctgactagcgagcattggctggtgctggttcctttttgggccacttggccctaccagacgctgttgctaccccgcaggcatgtgcgacgcctgcccgaactcacgcccgccgagcgcgatgatttagcctcgatcatgaagaagctgttgacaaaatatgataacctttttgaaacatcttttccttactcgatgggctggcacggcgcccccaccggctccgaggcaggagcgaactggaaccactggcagttacacgcgcactactatccccccctgctgcgcagcgctacagtacgcaagttcatggtgggatacgagatgctggcccaggcacagcgcgacctcactccggagcaggcggccgaacgcctgcgagccctgccggaagttcattaccatctcggtcagaaggacagagaaacggcgacgattgct

SEQ ID NO: 12153 - DNA, 1137 bp, synthetic construct
  misc_feature 1..1137: note = source = /note="Description of Artificial Sequence: Synthetic coding sequence"
  source 1..1137: mol_type = other DNA
atgtctagatccggaactgacccccaacagcggcagcaagcttcagaggcagatgcggccgcggcgactttcagagctaacgaccatcagcacattagatacaacccattgcaagatgagtgggttctcgtgagcgcccacaggatgaaacggccctggcagggccaggtggagcctcagctcctgaagactgtgcccagacatgacccactcaaccccctgtgtcctggcgccatccgcgctaatggtgaggtgaatccccaatacgattcaacgttcctgtttgataatgactttccggcgctccaacccgacgccccgagcccaggtcctagcgatcacccactgttccaggctaagtccgctaggggcgtttgcaaggtgatgtgtttccacccatggtcagacgtcactttgcctttgatgtctgtcccggagatacgagcagtggtggacgcctgggccagtgttactgaggagctcggtgcccagtacccatgggtgcagatttttgagaacaaaggcgcaatgatgggttgtagcaacccccatccacactgtcaggtttgggcttcttcattcctgccagatatcgctcagagagaagagagatctcagcaggcctacaagagtcaacatggagaacctctcctcatggagtacagccggcaggaactcttgcgcaaggaacggctggtccttacctctgaacactggctggtactggtgccgttctgggcgacatggccgtaccagactctgctcctgccaagacggcatgtgaggcgcctgcctgagctgactcctgccgagagggacgatttggcctctatcatgaagaagctgctcacaaagtatgacaacctctttgagaccagttttccttattccatgggctggcacggtgcgccaaccggtagcgaggctggtgctaattggaaccactggcagctccatgctcactactatcctccccttcttagaagcgcgacggtcaggaagttcatggtcggttatgaaatgttggctcaagcccagcgcgaccttacccccgagcaggccgcagagaggctgcgagccctgccggaggtgcattatcacctggggcagaaggatcgggaaaccgcaacaattgct

SEQ ID NO: 12154 - DNA, 1137 bp, synthetic construct
  misc_feature 1..1137: note = source = /note="Description of Artificial Sequence: Synthetic coding sequence"
  source 1..1137: mol_type = other DNA
atgagcagaagtggcacagatcctcagcagcgccaacaggcttcagaggccgacgccgctgccgcaactttcagagctaatgatcatcagcatatccgctacaacccgctgcaagatgagtgggtgctcgtctctgctcacaggatgaagcgtccttggcagggacaggttgaaccacaactgttgaagaccgtacctcgacacgatccactgaaccctctatgtcccggcgcgatccgagcgaacggcgaggtgaacccacagtacgattcaacatttctcttcgacaatgatttcccagcgctgcaaccagatgcccctagccccggaccctcggaccacccactgtttcaagctaaaagtgcacgcggagtttgcaaggttatgtgtttccatccatggtccgacgtaaccctgcctctgatgtcagttcccgaaatcagagctgtggtggatgcctgggcctccgtgaccgaggagttgggtgcccaatacccatgggttcagatcttcgagaataaaggcgccatgatggggtgtagtaacccccaccctcactgtcaggtgtgggcttcctctttcctgcccgatatagcccagagagaggaacgatcccagcaggcttacaaaagtcagcacggtgaaccacttcttatggagtacagccgccaggaactgctgcgtaaagaacggctagtcttaacatctgaacattggttggtgctcgtgcccttttgggccacgtggccctatcagaccctgctacttcctagaagacacgtccgacgcttgccggagctgactcctgccgagagggatgatctggcctccataatgaaaaagctcctgactaagtatgacaatctttttgaaacatccttcccctatagtatgggttggcatggggctccaacaggatcagaagccggcgctaactggaatcactggcagctgcatgcacattactaccctccgctgctccggagcgccacggtgagaaaattcatggtggggtatgagatgctcgcccaggcccaaagggacttaactcccgagcaagctgcagaaagactccgggctcttcccgaggtgcattatcatctgggccagaaggaccgcgagactgccactattgct

SEQ ID NO: 12155 - DNA, 1137 bp, synthetic construct
  misc_feature 1..1137: note = source = /note="Description of Artificial Sequence: Synthetic coding sequence"
  source 1..1137: mol_type = other DNA
atgagtcgatccggaacagaccctcagcagagacaacaggcaagcgaggccgacgccgcagcagctaccttccgcgccaatgatcaccagcacattcggtataatccactgcaggacgagtgggtgctcgtgtctgcccaccggatgaagagaccttggcaggggcaggttgaaccacagctgcttaaaacagtcccacggcacgatcccttaaaccccctgtgcccaggtgcgataagggcgaacggcgaagtaaaccctcagtatgacagcacatttctgtttgataatgacttccccgcacttcagccggacgcacccagccctgggccttctgatcatccgttgttccaggccaagtctgctagaggcgtgtgtaaggtgatgtgttttcacccttggtccgacgtcactcttcccctaatgtccgtgcccgaaataagagccgtggtcgatgcgtgggcttctgtgacggaggagctgggtgcacaatacccttgggtccagatctttgagaacaagggggcaatgatgggctgctcaaaccctcaccctcactgtcaggtgtgggcttcaagctttttgcctgacattgctcagcgtgaagagcgtagtcagcaggcttataaatcccaacatggcgagccactgctgatggaatatagcaggcaagaactgctccggaaagagaggttggtgcttactagtgagcattggctcgtcttggtgcccttctgggccacctggccataccagaccttgcttcttccgaggcgtcacgttcgacggctccccgaactgacaccagctgagagagatgacctggcgagcattatgaaaaagctgctgacgaaatatgacaatctgtttgaaacaagcttcccctacagcatgggatggcatggagccccgacgggatcagaggccggtgccaactggaatcactggcagttgcacgcgcactactacccgccactgcttaggagtgccacagtgcgtaagttcatggtgggctacgaaatgctagcacaggcccagagagatctgacaccagaacaagcagccgagcggttgagggccctgcccgaagtgcactatcaccttggacagaaagatagagaaactgcaactattgct

SEQ ID NO: 12156 - DNA, 1137 bp, synthetic construct
  misc_feature 1..1137: note = source = /note="Description of Artificial Sequence: Synthetic coding sequence"
  source 1..1137: mol_type = other DNA
atgtcacgatccggaaccgacccacagcagaggcagcaggcatccgaggcagacgcagccgctgcaaccttccgggcaaatgaccaccagcacattcggtataaccccctccaggacgaatgggtgttggtttccgcgcataggatgaaaagaccctggcagggtcaggtggagccacagctgctgaagactgtgcctagacacgaccccttgaacccactgtgtcctggagctattagggcgaatggtgaagtgaatccccagtatgacagcacttttctgttcgataatgacttcccagccctccagcccgatgcacctagtcccggaccgagtgaccacccactgtttcaagccaagagtgcaagaggcgtctgcaaggttatgtgctttcacccatggtccgatgtgaccctgcccctgatgtccgtgcccgagattcgggctgtagtagatgcctgggcatcagtaaccgaggagctcggtgcgcagtacccgtgggtgcagatctttgagaataaaggggccatgatgggctgctcaaatcctcacccacattgtcaagtgtgggcatccagcttcctgcccgacatcgctcagagggaagagcggtcccagcaagcctataagtcacaacacggcgaacctttgctgatggagtattctcggcaggaacttctccgaaaagagcggctggtgctcacatcagaacactggttggttctcgtccccttttgggctacgtggccataccaaacgctgctgctgcctcggcggcacgttcgaagactgccggagctcactccagccgaacgcgacgatctcgcctctattatgaagaagctgctcacaaagtacgataacctgtttgagactagctttccctactccatggggtggcacggcgcccctacaggaagtgaggctggtgccaactggaaccactggcagctccacgcacattactatccacccctcctgcggtctgcgacggttagaaagttcatggttgggtacgagatgctggcgcaagcccaaagagacctgacacccgagcaggccgcagagagactgagagctctgccagaagtgcactaccatttgggacagaaagacagagaaactgctacaattgcc

SEQ ID NO: 12157 - DNA, 1137 bp, synthetic construct
  misc_feature 1..1137: note = source = /note="Description of Artificial Sequence: Synthetic coding sequence"
  source 1..1137: mol_type = other DNA
atgtctagatcagggaccgaccctcagcagagacaacaggcttctgaagccgacgccgccgccgcaacctttcgcgctaatgatcaccaacatatacggtataaccccctacaggacgagtgggtgttagtgtcagcccatcgaatgaaaaggccttggcagggccaggtggagcctcagctgctgaaaacagtcccaagacacgaccctctgaatcccctctgccctggtgcaattagggcaaatggagaggtgaaccctcagtacgatagcaccttcctgtttgacaacgattttcccgcactgcagcccgacgccccttctccaggaccctcagaccaccctctgtttcaagcaaaatctgctagaggcgtttgcaaagttatgtgctttcacccatggagtgatgttaccctgcccctgatgtctgtgcccgaaatccgagccgtggttgacgcctgggcctccgttactgaagagctgggggcccagtatccatgggtgcaaatctttgaaaacaaaggcgctatgatgggctgcagcaatccccaccctcactgccaggtgtgggctagcagttttctacccgatatcgctcagcgagaggaaaggagccagcaggcatacaagtcccagcatggggaaccattactcatggagtatagtagacaggaactgcttaggaaggaacggctggtgctgacctccgaacattggctcgttctggtgcctttctgggccacatggccttatcagacactattgctgcctcgcagacatgtgcggcgcctccctgaactaactcccgccgaaagagacgatctggcctctatcatgaaaaagctgctgactaaatatgataacctgttcgagactagcttcccttattccatgggctggcatggcgcacctacaggcagcgaggctggtgcaaactggaaccactggcaacttcatgcacactactaccctcccttactgcgctctgcaacagtcagaaagttcatggtgggctatgaaatgctcgcccaggctcagcgggatttaacccctgaacaggctgcagagcgactcagagcactacccgaagtgcactaccacctgggtcagaaggatagggagaccgcaaccatcgct

SEQ ID NO: 12158 - DNA, 1137 bp, synthetic construct; identical to SEQ ID NO: 12140
  misc_feature 1..1137: note = source = /note="Description of Artificial Sequence: Synthetic coding sequence"
  source 1..1137: mol_type = other DNA

SEQ ID NO: 12159 - DNA, 1137 bp, synthetic construct
  misc_feature 1..1137: note = source = /note="Description of Artificial Sequence: Synthetic coding sequence"
  source 1..1137: mol_type = other DNA
atgtccagaagtggcaccgatcctcaacagagacagcaggcctcagaggcagatgcggctgcagctactttcagagctaacgaccatcagcacatacgttacaatccactgcaggacgaatgggtcctcgtttcagctcatagaatgaagaggccgtggcagggccaagtggagccacagctacttaaaacagttcctcggcacgatccactgaatccgctttgccccggggccatccgcgctaacggcgaggttaatcctcagtacgattccacatttctcttcgataacgattttcccgcattacaacctgatgcccctagccccggacccagtgatcacccactcttccaggcaaaatctgcaagaggtgtgtgcaaggtgatgtgctttcacccctggagtgacgtcacactgccgctgatgtctgtgcccgaaatcagggcagtcgtggatgcatgggctagcgtgaccgaggaactgggcgctcaatacccctgggttcagatcttcgagaataagggcgcgatgatggggtgttctaaccctcatcctcactgccaagtttgggcttcaagtttcctgcctgatatcgctcaaagggaagaaaggagtcagcaggcctataagagccagcacggggaacccctcctcatggaatatagtagacaggaactgctaagaaaggaaaggctcgtcctaacaagtgaacactggctggtgttagtccccttctgggccacatggccttaccagaccttattgctccctaggcgtcatgtgagacggctgcccgaacttaccccagctgagcgagacgatctagcaagcatcatgaaaaagctattgaccaaatacgataacctgtttgagacgtctttcccatactccatgggttggcacggcgccccaacaggctccgaagctggagcaaattggaaccactggcagctccatgcccattattatccccccctcttgcgatccgccacagtgcgcaagtttatggtgggatatgagatgctagcccaggcacagcgcgatttaacacccgaacaggctgccgagaggctcagggctctcccagaggtgcattaccatctggggcagaaggacagggaaacagccacgatcgca

SEQ ID NO: 12160 - DNA, 1137 bp, synthetic construct
  misc_feature 1..1137: note = source = /note="Description of Artificial Sequence: Synthetic coding sequence"
  source 1..1137: mol_type = other DNA
atgtcacggtcaggaacagatcctcagcaacgccagcaggcctcagaagccgatgccgctgctgcgacattcagagcaaatgatcatcagcacatcaggtacaaccctcttcaggatgaatgggttttagtctcagcacaccgaatgaaaagaccttggcaggggcaggtggaaccacagcttctcaaaacagtcccccgacacgatcctcttaaccccctctgcccaggagctatcagagcaaatggggaagtaaacccacagtatgattcgacttttctctttgataatgattttccggcgttacagcccgatgctccttcccccggacccagtgatcatcccctcttccaggctaaatctgctcgaggggtgtgtaaggtgatgtgtttccatccctggtcggatgtgacattaccccttatgagtgtcccagaaatacgggccgtggtggatgcatgggcaagtgtgacagaagaattaggagcccagtatccttgggttcaaatatttgaaaacaaaggagctatgatggggtgctccaatccccatccccattgccaagtgtgggcctcttcttttcttcccgacatcgcccagcgggaagaacgctcacagcaggcctacaaaagtcagcacggagaaccactccttatggagtatagtcggcaggaactcttaaggaaagaacggcttgtcctgacatctgaacactggctagtgctcgttcctttctgggctacttggccttatcagactctccttctccccaggcgccatgtaaggcgcctacctgaactgactcccgcagaaagagatgatctagcctcaatcatgaaaaaactccttacaaaatatgataacctctttgaaacatcattcccatattctatgggatggcacggagcccctactgggtctgaagccggagcaaactggaaccactggcagttgcacgcacattactatcctccactcttgaggtctgcaactgtaaggaaatttatggtgggatacgaaatgttagcccaggcccagagagatctcacaccagagcaggccgcagaacggctaagagccctaccagaagtgcactaccatttggggcaaaaagatcgggagacagctacaattgcc

SEQ ID NO: 12161 - DNA, 1137 bp, synthetic construct
  misc_feature 1..1137: note = source = /note="Description of Artificial Sequence: Synthetic coding sequence"
  source 1..1137: mol_type = other DNA
atgagccgtagtggcactgatcctcagcagcgtcagcaggccagtgaggctgatgccgcggcggcaacctttcgggcaaacgatcaccagcacattaggtacaaccccctccaggatgaatgggtgctcgtgtccgcccatagaatgaagcgcccttggcagggacaggtggaaccacaactgttgaaaacagtgccacggcacgatcctctgaatcccctctgtcccggcgccattcgagctaatggcgaagtgaaccctcagtatgactccactttcctattcgacaatgattttcctgccctgcagcccgatgccccatctcccggaccgtctgaccaccccctgttccaggccaagtcggcccggggggtgtgcaaggtgatgtgcttccatccttggagtgatgttacactaccactcatgagcgtacctgagattagagcggttgtcgacgcttgggccagcgtgactgaagaattgggcgctcagtatccatgggtgcagatctttgagaacaaaggcgcaatgatgggctgtagcaacccccacccacattgtcaagtatgggcttcttcctttttgccagacatcgctcagagagaagagcggtcgcagcaggcctataaatctcagcacggggagcctttgctgatggagtattcccggcaagagctcctacgcaaggaaaggctggtgttaacatcagaacactggctggtcttggtgcctttttgggcaacttggccctaccaaactctcctgctccccaggcgacacgtgcggagactgcccgagctgacaccagctgaaagggatgatctggcctcaattatgaagaagctgctcaccaaatatgacaacctgtttgaaactagcttcccatatagcatgggttggcatggcgcaccaacaggaagtgaagcgggcgctaactggaatcattggcagctgcacgcacattactatccccctctactacgctcggcgaccgttagaaagttcatggtcggttacgagatgcttgcccaggcacagcgagacctgacgcctgagcaggcagctgaaagactcagagctctgccggaggtgcactaccacttgggccagaaggatagggaaacggccacaatcgct

SEQ ID NO: 12162 - DNA, 1137 bp, synthetic construct
  misc_feature 1..1137: note = source = /note="Description of Artificial Sequence: Synthetic coding sequence"
  source 1..1137: mol_type = other DNA
atgagcaggtccggcactgacccgcagcagcgccagcaggcctcagaagccgacgccgctgccgccaccttccgggctaatgaccatcagcacataaggtataacccattgcaggacgaatgggtgctggtgtccgcccatcggatgaaaaggccgtggcaagggcaggtcgaaccccagctgcttaagactgtgcctaggcatgaccctttaaacccactctgccccggagccatacgtgccaacggcgaagtgaacccccagtacgattctactttcttgttcgataacgattttcccgcgcttcagccagatgctcctagccctggtccctcagaccatcctctctttcaggccaaatcagcccgcggtgtgtgtaaggttatgtgttttcatccatggtctgacgtgaccctccctttgatgtctgtacccgaaatcagagccgtggttgacgcgtgggcctccgtgaccgaagagctgggagcacagtatccctgggtgcagatctttgaaaataaaggtgctatgatgggatgctccaacccacacccgcactgccaggtgtgggcttcatcctttctgcccgacatagcacaacgcgaggaacgctcgcagcaagcttataagtcccagcacggggagccgttgctgatggaatattctcgccaggaactgctcagaaaagagaggctcgtcctgactagcgagcactggctggtgttagtgccattctgggccacttggccataccagaccctcctgcttcctcgcagacacgtccgtcgactgcctgaactcacacccgcggagcgggacgacctggcatcaatcatgaagaagctgcttacaaagtatgacaacctgttcgaaacctcctttccatactcaatggggtggcacggcgcccccaccggctcagaggcgggggccaactggaaccactggcaactgcacgctcattactatccacctctcctcaggagtgccaccgttcgaaaattcatggtgggatacgaaatgttggctcaggcccaaagagatctgactcccgaacaggctgccgaacggctgagagccttgccagaagtgcactatcatttgggtcagaaggatagagaaactgcaactattgct

SEQ ID NO: 12163 - DNA, 1137 bp, synthetic construct
  misc_feature 1..1137: note = source = /note="Description of Artificial Sequence: Synthetic coding sequence"
  source 1..1137: mol_type = other DNA
atgtccaggtcaggcacagaccctcaacagcgacaacaagcatccgaggcggatgctgccgctgcaacgtttcgagccaacgaccaccaacatattagatacaacccactgcaggatgagtgggtcctagtgtctgcacaccggatgaaacgtccctggcaggggcaggttgagccccagcttctaaaaaccgtgcccaggcacgaccccttgaatcccctgtgcccaggggccattagggccaacggcgaagtgaatccgcaatatgatagcacttttctgttcgataatgacttccctgctctgcaaccagatgccccatcccctggacctagcgatcatcccttattccaggctaaatcagcccgcggggtctgtaaggtgatgtgctttcatccctggtcagacgtgacactaccgttgatgtcagtgcccgaaattagggctgtagttgacgcttgggcatccgtgacagaagagctgggggcgcagtacccgtgggtgcagatctttgagaacaagggagcaatgatgggctgctctaatccccaccctcactgtcaggtttgggcctcatccttcctcccagatatagcccagcgggaggaaagaagtcagcaagcctataaaagtcaacatggtgagcctctgttaatggagtacagcaggcaggagctgctgcggaaggagagattagtcctgactagtgaacactggctcgttctcgttccattctgggccacctggccctatcaaactctactgttacctcggcggcacgtgcggagactcccggagttgacaccagcagagcgagatgatttggcctctataatgaaaaaattgttgaccaagtatgacaatcttttcgaaacatccttcccatatagcatgggctggcatggcgcaccaactggctcggaggccggagccaattggaatcactggcagctgcacgcacactattatcccccactattgagatctgcaacagtcaggaagttcatggtggggtatgaaatgctggctcaagcccagcgtgacctgaccccagagcaggccgcagagcggcttcgcgccctgccagaagttcattatcatttaggccagaaggacagggaaaccgccactatcgcc

SEQ ID NO: 12164 - DNA, 1137 bp, synthetic construct
  misc_feature 1..1137: note = source = /note="Description of Artificial Sequence: Synthetic coding sequence"
  source 1..1137: mol_type = other DNA
atgtctcgaagcggcactgacccccagcagaggcaacaggccagcgaggcggatgcggcggctgcaacattccgcgcaaacgaccatcagcatatcaggtataaccccctgcaggatgaatgggtgcttgttagtgcgcatcggatgaagaggccttggcagggccaagtcgagccccagctgctgaaaaccgtgccacgacacgacccactgaaccccttgtgtccaggagcaatcagagctaatggagaggttaacccacagtacgactccaccttcctcttcgataacgatttcccagccctacagcccgacgcacccagtcccggcccatcagaccaccctctgttccaggcgaaatcggcgagaggggtgtgtaaagtaatgtgttttcatccctggagtgatgtaactcttccactgatgagtgtccctgagatccgcgccgttgtggacgcgtgggcatccgtaaccgaagagctgggggcccagtatccttgggttcagatttttgagaacaagggcgccatgatgggctgctccaatcctcatccacattgtcaagtttgggcgagttcattccttcctgacattgctcaaagggaggaacggtcccagcaggcgtataaatcacagcacggagagccacttttgatggagtacagtagacaggagctccttcggaaggagcggctagtgttaaccagtgaacactggttggtgcttgtgccgttctgggcaacttggccctaccagacccttctgctccctcgacggcacgttcgtagactgccggaactaactcctgctgaacgcgatgaccttgcgagtatcatgaaaaagctcttgacgaaatacgacaacctgttcgagactagttttccctattcgatgggctggcacggagccccaacaggctccgaagccggagcgaattggaaccactggcagctgcatgcgcactactatccacccctcctacggtccgccacagtacgaaagttcatggtcggctacgaaatgctggcacaggcacaacgggacctaacccccgaacaggccgctgaacgcctccgcgcgctacctgaggtccactatcacctcggccagaaggaccgagaaacagctacgatagct

SEQ ID NO: 12165 - DNA, 1137 bp, synthetic construct
  misc_feature 1..1137: note = source = /note="Description of Artificial Sequence: Synthetic coding sequence"
  source 1..1137: mol_type = other DNA
atgtcaagatccggaaccgatccacaacagcgccagcaggcatcagaagccgacgccgccgctgctactttcagagccaatgaccaccagcatatccgctacaaccccctccaggatgaatgggtgcttgtctcagcccatcggatgaaaagaccttggcaggggcaggtcgaaccccaacttctgaaaactgttcccagacatgaccctctgaacccattgtgcccaggtgccattcgggcaaacggggaggtgaacccacagtacgattccactttcctttttgacaatgactttcccgctttgcagccagatgctccctctccgggtccttccgaccacccactttttcaggccaagtccgcacggggggtgtgtaaagtgatgtgctttcacccatggagtgatgtgaccttgcctttgatgtccgtgcctgagatccgggcggtggtggacgcctgggccagtgttaccgaagaactcggggcccagtatccctgggtccagatatttgagaacaaaggggctatgatgggctgcagcaatcctcacccccattgccaggtttgggccagctccttccttcctgacatcgcccagagggaggaaaggtctcagcaggcatataaatcccagcatggggagcctctgttgatggagtattctaggcaggaactgcttcggaaggaaaggctcgtgctgacttcagaacactggctcgtcctcgtgcccttttgggccacttggccatatcagacgctgctgctccctcggaggcacgttcggagacttcccgagttgactcctgccgaaagagatgatctggcaagtataatgaagaagctcttgactaagtatgataacctgtttgagacgtcctttccatatagtatggggtggcacggggctcccacgggctctgaagcgggcgctaactggaatcattggcagttgcatgcccattattaccccccattgctgcggagtgctactgtgagaaaatttatggttggatatgagatgctggcccaggcacagcgggatcttacaccagagcaggctgcagaacgactcagagctcttcccgaagtacattatcacctgggacaaaaagaccgggagacagctaccattgct

SEQ ID NO: 12166 - DNA, 1137 bp, synthetic construct
  misc_feature 1..1137: note = source = /note="Description of Artificial Sequence: Synthetic coding sequence"
  source 1..1137: mol_type = other DNA
atgagtcggagcgggactgatccacagcagcgacagcaggcatcagaggctgacgcagcggcggcaactttcagagcaaatgaccaccagcatatcagatacaacccattgcaagacgagtgggtcctggtgagtgcacaccgaatgaagcgaccatggcaaggacaggtcgagcctcaactgctgaagacagttcccagacacgaccctctaaacccattatgtccgggcgcaatcagggccaatggtgaggtgaacccacagtacgacagcacgttcctgtttgacaatgacttccccgccctccaacctgatgccccttcccctggtccaagtgatcaccccctctttcaagcaaaatcggctcggggcgtgtgtaaagtgatgtgtttccatccgtggtctgacgtgacactcccactcatgtccgtcccagagattagagccgtggtggacgcttgggcgagtgtaaccgaagaactgggggcccagtatccctgggtgcagatcttcgagaataaaggggcgatgatgggatgctcaaacccccatccccactgccaggtgtgggcatccagttttttgcctgatattgcccagagagaggaacgctcccagcaggcatacaagagccagcacggcgagcccctgctcatggagtatagccgacaagagctactgagaaaggagaggctggtgctcacctctgagcattggctggttttagtgccattctgggccacttggccgtaccagacgctcttacttcccaggcggcacgtccggagactgccggagcttacccctgccgaacgcgacgatcttgcctctatcatgaaaaagcttttgacaaagtatgacaatttgttcgaaacatctttcccctatagcatgggctggcatggggcacccacaggctccgaagcgggcgcgaattggaaccattggcaattgcatgctcattattatcctcccctgcttaggagcgctaccgtaagaaagtttatggttggatacgaaatgctggcgcaggcgcaacgtgatctgacccctgagcaggccgcggaaagactacgcgcactgcctgaggtgcactaccatctgggtcagaaggatcgggagactgcaaccatcgcc

SEQ ID NO: 12167 - DNA, 1137 bp, synthetic construct
  misc_feature 1..1137: note = source = /note="Description of Artificial Sequence: Synthetic coding sequence"
  source 1..1137: mol_type = other DNA
atgtcccgctccggtaccgaccctcagcaacgtcagcaagcttctgaagcggacgcagctgctgctaccttcagagcaaacgaccaccagcatattagatacaaccctctgcaggacgagtgggtgttggtgtccgcccaccgcatgaagagaccttggcagggccaggtggagcctcagctactcaagacagttcccagacatgatcctctcaaccccctttgcccgggagcaatacgagcaaatggggaggtgaacccgcaatatgattccacttttctcttcgacaacgacttccctgcattgcagcctgatgctccatcgcctgggccatcagatcatcccctgttccaagcgaagagcgccaggggtgtctgtaaggtgatgtgcttccacccctggtctgacgtcacccttccacttatgagcgtccctgagatacgtgccgtcgtcgacgcatgggcatccgttactgaggaactgggcgcccaatatccatgggttcagatttttgagaacaagggggcgatgatgggatgctctaatcctcacccgcattgccaagtgtgggcttctagctttttacccgatatcgctcagcgcgaggaaagatcgcagcaggcctacaagtcacaacacggcgagccactcctgatggaatactccaggcaggaactcctccgaaaggagagactggtcctgactagcgaacattggctggtgctggtgccgttctgggccacttggccgtaccagacattactccttccgcggcgtcacgtgcgccgcctacctgagctgacacctgctgagcgggacgacctcgcaagtattatgaagaaactgctgactaaatacgacaatctctttgaaaccagttttccctattctatgggctggcacggggcccccaccggctccgaagccggggctaattggaaccactggcagcttcacgcccactactaccctccactgctgaggtctgcaaccgtaaggaaattcatggtgggctacgaaatgcttgctcaagcacagcgagacctcacccctgaacaggctgcagaaaggctgcgtgctctccccgaagttcactaccaccttggccagaaagatcgcgagacagccacgatagct

SEQ ID NO: 12168 - DNA, 1137 bp, synthetic construct
  misc_feature 1..1137: note = source = /note="Description of Artificial Sequence: Synthetic coding sequence"
  source 1..1137: mol_type = other DNA
atgagtcgatccggcacggacccccagcaaagacagcaggcctccgaagccgacgcagccgccgctacgttccgcgctaatgaccatcagcacatcaggtacaaccctctacaggatgaatgggtcttggtgagcgctcaccgcatgaaacgtccatggcaggggcaagtggagcctcagcttctgaaaaccgtgcccagacacgacccgctgaatcctctgtgcccaggtgccatacgcgcaaacggcgaagtcaatccccagtacgactccactttcttgtttgacaatgatttccccgccttgcagcccgacgcacccagtcccgggccttctgaccacccgctctttcaggctaagagcgcacggggcgtctgtaaggtaatgtgcttccacccctggtcagatgtaacactaccactcatgagtgtgcctgagattcgggcggtggtcgatgcttgggcaagcgtgacagaggagctcggcgctcaatacccttgggtgcagatcttcgaaaataaaggcgccatgatgggctgttctaatccacatcctcattgccaagtgtgggcaagttccttcctgcctgatattgcgcagcgcgaggagagaagtcaacaggcatataaatcacagcacggagaacccctgcttatggagtactcccgtcaggaactcttgcggaaggaacgcctcgtactgacctccgagcattggttggtccttgttccgttctgggcaacctggccttaccagacactgctgctacctcggcgtcatgtccggcgactccctgagctcacacccgcggaacgcgatgacctcgctagtattatgaagaaactgctcaccaaatacgacaatctctttgagacatcattcccctatagcatgggttggcacggcgcccctaccggtagcgaagcaggggccaactggaaccattggcaactgcatgctcactattatccgcctctgctgcggtccgccaccgtccgaaaatttatggtcgggtatgagatgctggctcaagctcaacgcgatttgactcccgaacaagcggcagaacgacttcgggcccttccagaagttcattaccatcttggacagaaagatcgcgaaacagccacgatcgca

SEQ ID NO: 12169 - DNA, 1137 bp, synthetic construct
  misc_feature 1..1137: note = source = /note="Description of Artificial Sequence: Synthetic coding sequence"
  source 1..1137: mol_type = other DNA
atgtccaggtcaggaaccgacccacagcagcgccagcaagcctcagaggctgatgccgccgccgctacattccgggctaatgaccaccagcatattagatataaccctctgcaagatgaatgggtgttggtgagtgctcacagaatgaagcgcccatggcaaggtcaggtggagccccagctgctgaagacagtcccgcgacatgaccccctgaaccctctgtgtcccggcgctataagggccaacggagaagtgaacccgcagtatgactcaacttttctgttcgacaatgacttccccgcacttcagcccgacgctccatcgcctgggccctccgatcacccactttttcaggcaaagagcgcccgaggagtctgcaaggttatgtgctttcacccttggtctgatgttaccctccctctgatgtctgtccctgagatacgggctgtcgtagatgcctgggcctcggtaaccgaagaattgggtgcccagtatccctgggtccagatattcgaaaacaagggagctatgatgggatgctcgaacccacaccctcactgccaggtgtgggcgtcaagcttcctcccggatatagcccagagagaggagaggagtcagcaggcatacaaaagtcagcacggcgagcctctgctgatggagtatagtagacaggaactgctccggaaggaacggctggtgctaacctcagagcactggctggtgcttgtgcccttctgggcaacctggccctatcagactctgctactcccaaggcggcatgtgagacgcctgcccgagctaacgcccgccgaacgggatgacctggcaagtatcatgaagaagctcttaactaaatacgataatttattcgaaacctctttcccgtactccatggggtggcacggagcccccaccggttccgaagccggagctaactggaaccactggcagttacacgcccattactatccccctctgctgagatccgcgaccgtgaggaaattcatggtcggttatgagatgctcgctcaggcacagagagaccttacacctgagcaggcagccgaaaggctgagggccctacccgaagtgcactaccacctgggtcagaaagaccgcgagactgcaaccatcgcg

SEQ ID NO: 12170 - DNA, 1137 bp, synthetic construct
  misc_feature 1..1137: note = source = /note="Description of Artificial Sequence: Synthetic coding sequence"
  source 1..1137: mol_type = other DNA
atgtccagatctgggacagatccgcagcaacgccagcaggcaagcgaggctgacgcggctgctgctacattcagagccaatgaccaccagcatatccggtataacccgctccaggatgagtgggtgttggtctctgctcatcggatgaaacgcccttggcagggccaggttgaaccccagttactcaagaccgtgcctaggcacgaccctcttaaccctctgtgtcccggagcgattcgcgcgaatggggaggttaacccacagtacgatagcacattcctgttcgacaatgatttcccagccctccagcccgacgccccatcacccgggccatcagaccatcctctgtttcaggccaaaagtgctagaggcgtttgcaaagtgatgtgcttccatccttggtccgatgttaccttaccactcatgtcagtgcctgaaatcagggctgtggtggatgcatgggcttccgttaccgaggaactgggcgctcagtatccttgggtccaaatatttgaaaataagggcgccatgatgggttgctcaaatccacacccgcattgtcaggtctgggcgtccagctttttgccagacatcgcccagcgcgaagagaggagtcagcaggcctataagagtcagcatggcgagccattactgatggagtactctcgccaggagttgttaaggaaagagcggctggtgctcacctcagagcattggctcgtgctggtgccgttttgggcgacttggccctaccagactctccttctcccgcgtagacatgtgaggcgtctacccgagctgacccctgcggaacgtgatgatttggcgagtattatgaaaaaactgctcacaaagtatgataatctcttcgaaacaagtttcccctactctatgggctggcacggcgctcccactggatcagaggctggagcaaattggaaccattggcagttgcacgcgcactactaccctcccttgctgcgttcggctacagttaggaagttcatggttggctatgagatgctcgcacaagcgcaacgggatctcacgcccgagcaggcggcagaacgactgagagccttgccagaggttcattaccatctcggtcaaaaagaccgggagactgccaccatagct

SEQ ID NO: 12171 - DNA, 1137 bp, synthetic construct
  misc_feature 1..1137: note = source = /note="Description of Artificial Sequence: Synthetic coding sequence"
  source 1..1137: mol_type = other DNA
atgagtaggagcggcaccgaccctcagcagagacaacaagcctctgaagccgatgccgcagctgccacctttagagctaacgatcaccaacatatccgctataacccgctgcaggatgagtgggtgctcgtgtcagcccataggatgaagcgaccctggcaaggccaagtggagccgcaactgcttaagaccgtcccgagacatgatcctttgaatcccctgtgccccggagctatcagagctaacggcgaggtgaacccacagtacgatagcaccttcctgttcgataatgatttcccagccctgcagcccgacgcccccagccccggcccgagcgatcatccccttttccaggcaaaaagcgctcggggagtgtgcaaagtaatgtgcttccacccttggagcgatgttaccctccctcttatgtcagtgccagaaatccgcgcagtggtggacgcatgggcatcagttacggaggagctcggagcacaatatccctgggtacaaatctttgagaacaagggagctatgatgggctgcagtaacccccatccccactgtcaagtctgggcgagtagtttcttaccagacatcgcacagcgcgaagaaaggagccagcaagcatataagtcacagcatggggagccgttgttaatggaatatagcaggcaggagctgcttcgtaaggaaaggttggttcttacctctgagcactggctggtccttgtgccattctgggctacgtggccataccagacacttttgctgccgcggcggcacgtaaggaggttgcccgaacttaccccagctgaacgcgatgatctcgcgtcgatcatgaaaaagctcttaactaagtacgataacctgtttgaaacgagtttcccttacagtatgggctggcacggtgccccaaccggctcagaggccggagcaaattggaatcactggcagctgcatgctcattactaccccccactgctgcgtagtgccacagtcagaaaattcatggtggggtacgagatgctagcacaggcccagcgtgacttgacgcctgaacaggctgcagaacgcctcagggcgcttcctgaagtgcactatcacctcggacagaaggaccgtgagaccgcaaccatcgca

SEQ ID NO: 12172 - DNA, 1137 bp, synthetic construct
  misc_feature 1..1137: note = source = /note="Description of Artificial Sequence: Synthetic coding sequence"
  source 1..1137: mol_type = other DNA
atgtcaaggtcagggacagacccgcagcagcggcagcaggccagtgaggcagacgccgccgctgcaacgtttcgagctaacgaccatcagcacataaggtacaaccctcttcaggacgagtgggttcttgtgtctgcccacagaatgaagcgaccttggcagggtcaggttgaaccacaactgctgaagacagtcccccgccacgaccctctgaatccactgtgcccaggtgctattcgtgccaacggggaggtaaatcctcagtatgactccacgtttctcttcgataacgactttcccgcgctgcagccagatgccccgagcccgggcccgtctgatcaccccctcttccaggcgaagtccgccagaggtgtctgcaaggtgatgtgcttccacccgtggtcggacgtgacactgccacttatgtccgtcccagaaatacgggccgtcgttgacgcctgggcgagcgtcacagaggaattgggtgcccaatatccgtgggtgcagatctttgaaaacaaaggtgccatgatgggatgctccaatcctcacccacattgccaggtgtgggccagtagtttcctacctgatatcgctcagcgagaagagaggagccagcaagcctacaaatctcagcacggggagcctctattaatggagtactcacggcaggaactgcttcgaaaggaacgcctcgtgctgacttcagagcattggctggttttagtgcccttttgggcgacctggccctaccagacactcctgttgcctcgccgccacgtgcgccgactacccgagctaactccggccgagcgggacgatcttgcgtcaattatgaaaaagctgctgactaagtacgataacctgtttgagacatcattcccttactcgatggggtggcatggggctccaactggaagcgaagcaggtgcaaattggaatcattggcagctccatgctcattattacccccctcttctgagatccgctaccgtgcgtaagtttatggtgggatacgaaatgttggctcaggcacagcgggatttgacccccgaacaggctgccgagcgattgcgagccctccccgaagtacattatcacctggggcagaaagatagggagacggccaccatcgcc

SEQ ID NO: 12173 - DNA, 1137 bp, synthetic construct
  misc_feature 1..1137: note = source = /note="Description of Artificial Sequence: Synthetic coding sequence"
  source 1..1137: mol_type = other DNA
atgagcagaagcgggaccgatccacaacagcggcagcaggcatctgaagcagatgctgccgctgcaacattccgcgcaaatgatcatcagcatatccgctacaatcctttgcaggacgagtgggtcctggtatccgctcaccggatgaagagaccttggcaaggccaggtggagccacagctcctgaagactgtgccacgacatgatcctctcaacccgctgtgtcccggggctatccgggcgaatggtgaggtgaatccacagtacgacagcacattcctgttcgacaatgacttccctgctttacagccggacgcaccatccccgggtcccagcgatcatccgttattccaggccaaatctgcccgtggagtgtgcaaggtcatgtgcttccacccctggagcgatgtgaccctgcccctgatgagcgtacccgagatccgcgcagttgtcgacgcttgggcatccgtcactgaggagttgggcgcgcagtatccttgggtgcagatttttgagaataagggtgccatgatgggctgtagcaacccccatcctcattgccaggtgtgggcttcttcattcctgccagacatagctcagagagaggaaagaagccagcaagcttacaaatcccagcatggggaacccctgctgatggaatacagtagacaggagctcctgcggaaggagagactggtgctgacatccgagcactggcttgtgctggtccccttctgggctacatggccataccagactctgctgctgcctagacgtcatgtaagaagattgccggagctgacacctgccgagcgagacgatttggcctctattatgaaaaagctgctgacaaagtatgataacttgtttgagacatctttcccttacagcatggggtggcacggagctccaactggcagcgaggctggggcaaattggaatcactggcagctccacgcgcactactatcctccattactgaggtctgctacggtgaggaagtttatggtgggatatgagatgctggcccaagctcagcgggatctgactcctgaacaggctgctgaaaggctgagggcgctgcccgaagttcactaccacctgggacagaaagatagggaaacagccacgattgct

SEQ ID NO: 12174 - DNA, 1137 bp, synthetic construct
  misc_feature 1..1137: note = source = /note="Description of Artificial Sequence: Synthetic coding sequence"
  source 1..1137: mol_type = other DNA
atgagcaggagcggcacagatccacagcagcgccagcaagccagcgaggccgacgctgccgcagctacatttcgggctaacgaccatcagcacatcagatacaatccgttgcaggacgaatgggtcctggtttcggcgcaccggatgaaaagaccctggcaaggccaggtggagccacagctccttaaaaccgttccgaggcacgaccccttgaacccgctgtgtcccggcgctattcgggccaacggtgaagtgaatccgcagtatgattcaactttcttgttcgataatgacttcccagcactacaaccagatgccccatctcccggtccaagcgatcaccctctgtttcaggccaaaagcgcgcggggagtctgcaaggtaatgtgcttccatccatggtcggacgtcacgttgccgctaatgagcgtgcccgagattagagccgtggtggacgcatgggcgagtgttactgaagagctgggcgcacagtacccgtgggtgcagatattcgagaataagggagccatgatgggctgttcgaatcctcacccacactgtcaagtgtgggcatctagctttctgcctgacattgctcagcgagaggaacgctcccagcaagcctataagagccagcatggagaacccctcctcatggaatactctagacaagaactgctccggaaggagcgcctcgttttaacttccgagcactggctcgtattggtccctttctgggccacgtggccctatcaaacgctgctgctaccgaggagacacgtacgcagactgcctgagctgacaccagctgagcgcgatgacctggccagcattatgaaaaagctgctcacgaaatatgacaaccttttcgaaacctccttcccttatagcatgggatggcatggtgcccccaccggaagcgaggcaggcgccaactggaatcactggcaattacacgcccattactaccccccacttctgcgatcggcaacagtgaggaagtttatggtgggctacgagatgctcgcacaggcacaaagggatctgacaccagaacaggccgcagagcgtctgagggcactgccagaggttcactaccatcttgggcaaaaagaccgcgagacagctacaatcgcg

SEQ ID NO: 12175 - DNA, 1137 bp, synthetic construct
  misc_feature 1..1137: note = source = /note="Description of Artificial Sequence: Synthetic coding sequence"
  source 1..1137: mol_type = other DNA
atgtcaagatctggaactgatccacagcagcgtcagcaggctagtgaagccgacgctgccgccgccactttccgcgctaatgaccatcaacacatacggtataatccattacaagacgaatgggtgctcgtgtccgctcaccgaatgaagagaccgtggcagggccaggtggaacctcagctcctcaaaacagtcccacgccatgatcctctgaatcccctgtgtcctggcgccatcagagcaaacggcgaggtgaaccctcaatatgattcgacttttttgttcgacaacgactttccagcccttcagcctgatgccccaagccctggcccttccgatcatcccctatttcaggcaaaatctgcccggggagtttgcaaagttatgtgtttccacccttggtcagacgtcactctccctcttatgtcagtgcccgagataagagccgtggtcgacgcgtgggccagcgttacagaagaactgggcgctcaatacccttgggtgcagattttcgaaaacaaaggagccatgatggggtgttcaaatccccatccgcactgtcaggtgtgggcctccagttttttacctgacatcgcccagagagaagagagatcgcagcaagcatacaagagccagcacggagagcccctcttgatggagtactcccgacaagaactgctaagaaaggaacgcctcgtattgaccagtgagcactggctggtgctcgtaccattctgggccacctggccatatcagaccctgctgctgccaaggcggcacgtccgcagactgcccgaactgacgccggcagagagggatgacctggcctcaatcatgaaaaagctgctgactaagtacgacaatctgttcgagacatcattcccttactcaatgggatggcatggcgcccccacaggtagtgaggctggagctaattggaatcattggcagctccacgcacactattatcccccactgctgaggtccgcaacggtgcgcaagtttatggtgggttacgagatgctggctcaagcacagcgagatctgactcctgagcaagcggccgaaaggttaagggctctccccgaggtccactatcatcttggacagaaggacagagagacggctacaattgcc

SEQ ID NO: 12176 - DNA, 1137 bp, synthetic construct
  misc_feature 1..1137: note = source = /note="Description of Artificial Sequence: Synthetic coding sequence"
  source 1..1137: mol_type = other DNA
atgtcacgctccggtacagatcctcagcaaagacaacaggctagtgaagctgacgctgccgccgccacctttagggccaatgaccaccaacatatcagatataaccccttgcaggatgagtgggtgcttgttagcgctcacaggatgaaacgcccttggcagggccaggtggagccgcaactgctgaagacagtaccgcgccacgacccgctgaacccactctgccccggagccatacgcgccaacggtgaggtcaatcctcagtacgacagtacatttctctttgacaacgattttcccgcgttgcagcctgacgccccatccccaggtccttctgaccacccattgttccaagccaagtcagcccgcggtgtgtgtaaggtgatgtgctttcatccttggtctgatgtcacgttgcctctcatgagtgtccccgagattagagctgtggtggatgcgtgggcctccgtgaccgaagaactgggtgctcaatatccatgggtgcaaatcttcgagaacaagggagccatgatgggttgctcaaacccacatccccattgccaggtttgggcttcctcatttcttccagacattgcccagagggaggaaagatcccaacaggcgtacaaatcacagcatggcgagcccctcctcatggaatactctaggcaagagttgcttagaaaggagcgcctcgtgctgacatctgagcactggctggtcttggtccccttttgggctacatggccgtaccaaactctgctgctgccacgcagacacgtaagacgcctccctgagctcaccccagccgaaagggatgaccttgcttctatcatgaagaagttgctgactaagtatgacaatctctttgagacttccttcccatacagcatgggctggcacggtgcgccaacgggatcagaggctggcgctaattggaatcattggcagttgcatgcccattattaccctcccctccttagaagcgctaccgtaaggaaattcatggttggatatgaaatgctggcacaggcccagagggacctgactcccgagcaagcggctgagaggctcagggcattgcctgaagtacactatcacctgggtcaaaaggacagagaaacagctactatagct

SEQ ID NO: 12177 - DNA, 1137 bp, synthetic construct
  misc_feature 1..1137: note = source = /note="Description of Artificial Sequence: Synthetic coding sequence"
  source 1..1137: mol_type = other DNA
atgtcacggtctggcaccgatccccaacagcgccagcaagcttccgaggcagacgccgctgcagctacattccgtgcaaacgaccaccagcatatcagatacaacccactgcaggatgagtgggtgctggtgagtgcacaccggatgaagagaccctggcagggacaggtcgagccacagttacttaagactgttccaagacacgaccctctcaacccactatgtcccggggcaatcagggccaatggcgaggtgaatccccagtatgattcaacctttctttttgacaacgacttccccgccctgcagcctgatgcaccctcccctggccccagcgatcatcctctcttccaggctaaatccgccaggggagtgtgtaaagtgatgtgcttccatccgtggtcagatgttactctgccactcatgtctgtccctgagatcagagcagtggttgatgcatgggcctcggtgactgaagaactgggcgcacagtatccctgggtccagatttttgagaataaaggggccatgatggggtgttctaatccccatccacactgtcaagtgtgggcgtctagttttctcccggatatcgctcagagagaagaacgctctcaacaagcttacaaatcgcagcacggggagccactcctgatggaatactcccgccaagagttgctgaggaaagagaggttggtgcttacctccgagcactggctcgtgctggttcctttctgggcgacgtggccatatcagacacttctcctcccccgcaggcatgtgcgacgtctgcccgaactcactcctgcggagagagacgacctagccagcatcatgaagaaattactaaccaaatatgacaacttgtttgagacttcctttccctattctatgggctggcacggagcacctactggctccgaggcgggagctaattggaatcactggcagttgcacgcccattattatccacccctgctgaggagtgctacggtgcgcaaatttatggtgggatacgagatgctggcgcaggctcaacgcgacctgacacccgagcaagccgccgagcgacttagggcgttgcctgaagttcactaccatctaggccagaaggatcgagaaactgccaccattgca

SEQ ID NO: 12178 - DNA, 1137 bp, synthetic construct
  misc_feature 1..1137: note = source = /note="Description of Artificial Sequence: Synthetic coding sequence"
  source 1..1137: mol_type = other DNA
atgtcccgctcagggacagacccacagcagcgccagcaggcctctgaggcggacgcagctgcggctacctttcgtgctaacgaccaccagcacattcggtataatcccctgcaggacgagtgggtcctggtgtctgcgcatagaatgaagaggccttggcagggccaagtggagccgcagctcctgaagacagtacctcgccatgatcccttgaatcccttgtgccctggtgcaatcagagccaacggcgaggtcaatcctcagtacgatagcaccttcttgtttgataatgacttccccgcactgcagcccgacgccccctcacccggacccagcgaccatcctctgttccaggccaagagcgcccgaggggtgtgcaaggtcatgtgctttcatccctggagcgacgtcactctcccgctcatgtccgtccctgaaatccgggctgtcgtagatgcctgggcgtcagtcacagaagaactcggagctcaatatccatgggtccagatattcgaaaataagggggccatgatggggtgtagcaaccctcacccacattgccaggtgtgggctagttcattcctgcccgacatagcacaacgggaggagaggagccaacaggcctataagtctcagcatggcgagccgctcttgatggaatatagccggcaggagctccttaggaaggaacgcctcgtattaacgtctgagcattggctcgtgctggtccctttttgggccacttggccttatcagacactgctgctccccagacgtcacgtgaggcgcctgcccgagcttacccctgcggaaagagatgatctggcgtctatcatgaagaagctactgacaaagtatgacaacctgttcgagacctcttttccgtatagtatgggctggcacggggcccctactggaagtgaagccggagcaaattggaaccactggcagctgcacgctcactactatccccctctgctgcggagcgcaaccgtgcgcaaatttatggtaggatatgaaatgctcgcacaggcccagcgggacctgacacctgagcaggcagcggaaagactcagggcactgccggaagttcactaccacctaggacagaaagatcgtgagactgccaccatcgcc

SEQ ID NO: 12179 - DNA, 1137 bp, synthetic construct
  misc_feature 1..1137: note = source = /note="Description of Artificial Sequence: Synthetic coding sequence"
  source 1..1137: mol_type = other DNA
atgtcccgttctgggaccgacccccagcaaaggcaacaggcatcagaagcagacgctgccgcggccacattccgagcaaatgatcaccagcatattcggtataacccacttcaggatgaatgggtactggtgtcggctcaccgcatgaagcgtccgtggcaaggtcaggtggaacctcagctgctcaagacggttccccggcacgacccacttaacccattgtgccccggagcaatccgagccaatggcgaggtgaatcctcagtacgactctacattcctgttcgataacgatttcccagcactgcaacccgacgccccttcccccggtccctccgatcaccccttatttcaggctaagtctgccaggggagtgtgtaaggtgatgtgctttcatccgtggtctgatgttaccctgcccctgatgtccgtgcccgagatccgtgctgtcgttgacgcatgggcttctgtgaccgaagaattgggcgcccagtatccttgggtccagatcttcgaaaacaagggcgcaatgatgggatgctccaacccccatccccattgtcaggtatgggctagttcctttctgcctgatatcgcacagcgagaggagcgcagtcagcaagcttataaaagccagcacggagagccactgcttatggaatatagtaggcaagagctccttcggaaggaacggttggtcctgacctcagaacactggctcgttctcgttccgttctgggccacttggccctatcagacgctgctgctaccaagaagacatgtgcgacgattgcccgagttgacacctgccgagcgagatgacctcgcctccattatgaaaaaactccttaccaaatatgataatctgtttgaaaccagcttcccgtattcaatgggatggcatggggccccgacagggtccgaagccggggctaactggaaccactggcagcttcatgcccactattatcctccactgctcagatctgcaaccgtgcgtaagttcatggtggggtatgagatgctggctcaagcacagcgagatttgactcccgagcaggcagcagaacgacttcgggctcttccagaggtgcattatcacctggggcagaaagaccgcgagaccgctactatcgct

SEQ ID NO: 12180 - DNA, 1137 bp, synthetic construct
  misc_feature 1..1137: note = source = /note="Description of Artificial Sequence: Synthetic coding sequence"
  source 1..1137: mol_type = other DNA
atgtctcgcagtggaacagatccccaacagagacaacaggcaagtgaagcagatgccgcagctgcgacgttcagagcgaatgatcaccagcacatccgttacaacccactccaggacgagtgggtcttggtatctgctcaccgtatgaagagaccgtggcaaggccaagtggagccacagttgttaaagactgtgccacgccatgatcctcttaacccattgtgcccaggcgccataagagctaacggcgaagtgaatccacagtacgactcaacattcttattcgacaacgacttcccagccctgcagccggacgcaccatccccgggccccagcgaccacccgctgttccaagccaaatctgcccgtggggtgtgcaaagttatgtgcttccatccctggtctgatgtaacactccctttaatgtctgtgccagagattcgggcagtagtcgacgcctgggccagcgtcacagaggagctcggcgcgcagtacccgtgggtccagatttttgaaaataaaggggcaatgatgggctgttccaatccgcaccctcactgtcaggtgtgggcttcctccttcttaccagatattgctcagagagaggaacgttcacagcaagcatataagtcccagcatggagaaccactgcttatggaatactcaaggcaggagttacttcggaaggaaaggctcgttctaaccagcgaacactggctggttttggttccattctgggccacgtggccttaccagactcttctgttaccacggaggcacgtccgccggttgcctgaattgactccggccgagagggatgatctcgcttctatcatgaagaagttgcttacgaagtacgacaacctattcgaaacaagctttccttatagcatggggtggcacggagctcccacggggtctgaggccggcgcaaattggaaccactggcaactgcacgcacattattaccctcctttgctccggtctgctaccgtgaggaagtttatggtagggtacgagatgttggcacaggcacagagggacctgacaccggaacaggcagccgagcgcctgagggccctgccggaagtccactatcaccttggacagaaggatcgggaaaccgccacaatcgcc

SEQ ID NO: 12181 - DNA, 1137 bp, synthetic construct
  misc_feature 1..1137: note = source = /note="Description of Artificial Sequence: Synthetic coding sequence"
  source 1..1137: mol_type = other DNA
atgtccagatccggaacggacccacagcagagacagcaagcctcggaggcggacgccgccgccgcgacttttcgcgccaacgatcatcagcatatacgttataaccccctacaggacgagtgggtgctcgtgtccgcccatcgcatgaagaggccctggcagggacaagtagaaccccagttactgaaaaccgtaccccgccatgacccactcaacccactgtgccccggtgccataagagccaatggcgaagtgaatccccagtatgattccactttcctcttcgacaatgatttccctgcgctacagcccgacgccccttctcccgggccttccgatcatcctctgttccaggctaagtctgccagaggagtgtgtaaagtcatgtgctttcatccgtggtctgacgtcaccttgcctcttatgagcgtgccagaaatacgcgctgtggtggacgcctgggcaagtgtcaccgaagaattgggggcccaatatccatgggtgcagatcttcgagaataaaggcgcaatgatggggtgcagcaacccacacccacattgccaggtatgggcttcctcctttttgcccgatatcgctcaaagggaagagcggtcgcaacaagcttacaagtctcagcacggcgaaccgttactgatggaatactcgcgtcaggagttactgcgcaaagagcgcttggtgctcacctccgaacactggctagtgttggtgcctttctgggcgacttggccctaccagaccctccttctgcctcgccgacatgtcaggagactccccgagctgactcccgcagagcgggacgatctggcctctattatgaaaaagttactgacaaagtacgataacctctttgagaccagcttcccttattctatgggctggcacggagcccccaccggaagcgaggcaggagctaactggaaccattggcagcttcatgcccactactacccacccttgctacggagtgctaccgtgagaaagtttatggtgggctatgagatgcttgcacaggcacagcgagacttaacacccgagcaggcggcagagcgcttgcgcgccctgcctgaggtgcactatcatctcggccagaaagatagggaaacagctacaatagct

SEQ ID NO: 12182 - DNA, 1287 bp, synthetic construct
  misc_feature 1..1287: note = source = /note="Description of Artificial Sequence: Synthetic coding sequence"
  source 1..1287: mol_type = other DNA
atgcagctgaggaacccagaactacatctgggctgtgcactcgcccttcgcttccttgcactggtgagctgggatatcccgggcgcacgggctctggacaacggccttgcacgcactccaactatgggatggctccactgggagaggttcatgtgtaacctggactgtcaggaggagccagattcatgcatcagtgaaaagctgttcatggagatggccgagctcatggtgtccgagggttggaaagacgctggatacgagtacctatgcattgacgactgctggatggctccacagcgcgactccgagggtcgactgcaagctgacccacagcggtttccacatggcattcgccagttggccaattacgtgcatagcaagggattgaagttaggaatctatgcggacgtgggcaataaaacctgtgccggattcccaggcagctttggatattacgacattgatgctcagacatttgccgattggggggtggacttgcttaagttcgatggttgctattgcgacagtctcgagaacctcgccgacggatacaagcacatgtcgctggcactgaatcggactggaaggtccatagtgtattcttgtgaatggccgctgtacatgtggccatttcagaagccaaactatacggaaattcgacagtactgtaatcactggcggaatttcgccgatatcgacgactcttggaagtcgattaagagcattctggattggacctcttttaaccaggagcgtattgtagacgtcgccggaccgggggggtggaacgaccccgatatgctcgttattgggaacttcggattaagctggaatcagcaggtcacccagatggcgctctgggcaattatggccgcgccactgtttatgtccaacgacctgagacacatctcaccacaggctaaagccttgctgcaggataaggacgtaatcgcaatcaaccaggatcctctcggaaaacagggatatcagctacgtcagggcgacaacttcgaagtctgggaacggcctctgtctggtctggcctgggccgttgcgatgatcaatcgccaggaaatcggcggtccacggagttataccatcgccgtggctagccttggaaagggcgtagcctgtaatcccgcctgcttcatcacccagctgctgccggtcaaaaggaagctcggtttctatgagtggaccagccgactccggagtcacatcaatcctacaggaactgtgctcttacagctggagaatacaatgcagatgtcgctgaaagatctactg

SEQ ID NO: 12183 - DNA, 1287 bp, synthetic construct
  misc_feature 1..1287: note = source = /note="Description of Artificial Sequence: Synthetic coding sequence"
  source 1..1287: mol_type = other DNA
atgcagctgcggaatccagagctccacctgggatgcgccctcgcactgcggttcctggcgttggtcagctgggacatcccaggagcaagagccctggataatggactggcgcgcaccccgactatgggttggcttcattgggagcgattcatgtgcaaccttgactgtcaggaagaaccggattcttgcatctctgagaagctgttcatggaaatggcggaacttatggtatccgaaggttggaaagatgcgggatacgagtacttgtgtatcgacgactgctggatggccccgcaaagagactcggaaggccgcctccaggccgacccgcaacggttcccgcacggcattcggcagttggcaaactacgtgcattcgaagggcttgaaactgggaatctacgccgacgtgggcaacaagacctgcgccggctttccgggttcatttggttactatgacatcgacgcccagaccttcgccgattggggagtggatctcctgaagttcgatggctgctattgtgatagcttggagaacctggccgacggatacaagcatatgagcctggcgttgaatcggactggacggtcaatcgtgtacagctgcgaatggccgctctacatgtggcctttccagaagcccaattacaccgaaatccgccagtactgtaatcactggcgcaacttcgcagatatcgatgattcgtggaagagcattaagtctatcctcgactggacgtcctttaaccaggaacggattgttgacgtggcgggtcctggaggttggaacgatccagatatgttggtcatcggaaatttcggattgtcgtggaaccagcaagtgacccagatggccttgtgggcgattatggccgcccccctgtttatgagcaatgacctcaggcacatcagcccacaagcaaaagcgctcctgcaagacaaggatgtgatcgctattaaccaagacccgctcggcaaacaaggctaccagctgagacagggagacaattttgaggtctgggaacggccgctgtcagggctcgcctgggcggtcgccatgatcaacagacaggaaatcggtgggccacggtcgtacaccatcgcagtggccagccttggtaaaggagtcgcttgcaaccccgcgtgcttcatcacccaactgctccctgtgaagcgaaagctcgggttctacgagtggacctcgagactgcggtcgcatatcaaccctactggaaccgtgctgctgcagctggagaatactatgcaaatgtcgctgaaggatctgctc

SEQ ID NO: 12184 - DNA, 1287 bp, synthetic construct
  misc_feature 1..1287: note = source = /note="Description of Artificial Sequence: Synthetic coding sequence"
  source 1..1287: mol_type = other DNA
atgcagctccgcaatcccgaactccacctgggatgtgctttggctctcaggttcttggctctcgtgtcgtgggatatcccgggcgcacgagctcttgacaacggtctggcgcgcaccccgaccatgggatggctgcactgggagcggttcatgtgcaacctcgattgccaagaggagcccgactcgtgcatctcggaaaagctgttcatggagatggcagaactcatggtttccgaaggatggaaagatgctgggtacgaatacctctgcatcgacgactgctggatggcgccgcagcgggattccgaaggacggctgcaagctgacccgcagcggttcccgcacggcatccgacaactggctaactacgtccacagcaagggactgaaacttgggatctacgccgacgtcggtaacaaaacttgcgcggggttcccggggagcttcggatactacgacatcgacgcccagactttcgcggattggggagtggacctcctcaaattcgacggctgttactgtgactcccttgaaaacctcgccgacggctacaagcacatgtcgctggccctcaacagaacgggtcgctcgatcgtgtactcatgcgaatggccactgtacatgtggccttttcagaaaccgaactacaccgaaatcaggcagtactgcaatcattggcgcaattttgcggacatcgacgattcctggaagagcatcaaatccattttggattggacctcctttaatcaggaaagaattgtggatgtggcgggaccgggcgggtggaatgacccagacatgctggtgatcggcaactttggattgagctggaaccaacaggtcacgcagatggctctgtgggcaatcatggctgcaccattgttcatgtccaacgatctgcggcatatcagcccacaggccaaggcgctcctgcaagataaggacgtgatcgccatcaaccaggacccactcggaaaacagggataccaactgagacagggcgataacttcgaagtgtgggagcggcctctgtctgggctcgcctgggccgtcgctatgatcaatcgccaggaaattgggggcccgagatcgtataccatcgccgtcgcgtcacttggcaagggagtggcatgcaacccagcatgtttcatcactcagctcctgccagtgaaaagaaaactgggcttctacgaatggacgtcgcgcctcagatcgcatatcaatcctactggaaccgtgctccttcaattggagaacactatgcagatgtcactcaaagatctgctg

SEQ ID NO: 12185 - DNA, 1287 bp, synthetic construct
  misc_feature 1..1287: note = source = /note="Description of Artificial Sequence: Synthetic coding sequence"
  source 1..1287: mol_type = other DNA
atgcaattgcggaaccccgaattgcacctgggctgcgctctcgccctgagatttctggccctggttagctgggatattcccggggctcgcgctctggataatggtctggcaaggaccccaactatgggttggctgcattgggagaggtttatgtgcaacctcgattgccaggaagaaccggattcctgcatctcggaaaaactgttcatggagatggcggagctgatggtgagcgaaggttggaaggacgcaggctacgagtatctctgcatagacgactgctggatggccccgcaacgagactcggaaggtcgcctccaagcagaccctcaacggtttccgcatggcatcaggcaattggctaactacgtgcactcgaaggggctgaaactgggaatctacgcagatgttggtaacaagacgtgtgcaggtttcccgggatcgttcggctactacgacatcgacgcccaaaccttcgcggattggggcgtggacctgctgaaatttgacggctgttactgtgattcactcgaaaacctcgctgatggatacaagcacatgtctttggccttgaatcggaccggccggagcattgtctactcctgcgagtggccactgtatatgtggcctttccagaagccaaactacaccgagatcagacagtactgcaatcactggcgtaacttcgctgatatcgacgattcatggaaaagcataaagtcaattttggactggactagcttcaaccaggaacgcatcgtggacgtggcgggtccaggcgggtggaacgatccggacatgctggtgatcgggaacttcggactgagctggaatcagcaggtaacgcaaatggccctgtgggcgatcatggctgcgcctctcttcatgtccaacgacttgaggcatattagtccccaagccaaggccctcctccaggataaagacgtgatcgctatcaatcaggatccacttggaaaacagggataccagctgcgccagggagataactttgaggtctgggagcggcctctctctggattggcctgggccgtggctatgatcaaccggcaggaaatcggaggcccaagatcctacactatcgccgtcgcctcgctcggaaagggtgtggcctgcaacccggcttgtttcatcacccaactgttgcctgtgaagcgcaaactcggattctacgaatggacttccagactcagatcccacatcaatccgactggaaccgtgttgctccagctcgaaaatactatgcagatgtcgctcaaggacctgttg

SEQ ID NO: 12186 - DNA, 1287 bp, synthetic construct
  misc_feature 1..1287: note = source = /note="Description of Artificial Sequence: Synthetic coding sequence"
  source 1..1287: mol_type = other DNA
atgcagctgcgtaatcccgagctccacttgggatgcgcccttgctttgcgattcctagcgctggtcagttgggacatacccggtgctcgagcgctagataacgggcttgcgagaacacctactatgggctggctccactgggagcgatttatgtgtaatttggactgtcaagaggagcctgacagctgcatctcagagaaacttttcatggagatggctgaactcatggtcagcgaggggtggaaggacgccgggtacgagtatctgtgcattgacgactgctggatggccccacagagggattcagaggggcgactccaggcagacccgcagcgtttcccacatggaattcgccagctggcgaactacgtacactccaagggactgaagcttggaatttacgcagatgtcggaaataagacctgtgcgggattcccggggtccttcggatattacgacatcgacgcccaaactttcgccgattggggggtcgatctattgaagtttgatggttgctactgcgattcccttgagaatcttgccgatggttacaagcacatgtcgctagcgttgaaccgtacgggccgatcaatagtctatagttgcgagtggcccctgtatatgtggcccttccagaagccaaattatacagaaatccgtcaatattgcaatcattggcggaacttcgctgatatcgacgatagttggaagtcgatcaaatcgatacttgactggacttcgtttaatcaagaacgaatcgtcgatgtcgccggcccagggggatggaacgatccagatatgctcgtcataggcaactttggcctcagttggaaccagcaggtgacccagatggcactgtgggctatcatggcagcgccgcttttcatgagcaacgatcttcggcacatttctccccaagcaaaagcgttgctgcaggataaggacgttattgcgattaatcaggaccctctgggaaagcaaggttaccagctccgacaaggagacaacttcgaagtatgggaaaggcccctgagtggtttagcctgggcagtggcgatgatcaatcggcaagagatcgggggtccgcgatcctatactatcgcggttgcttccctaggaaagggtgtggcgtgcaatcctgcctgcttcatcacccaacttctcccggtgaaaaggaagctagggttctatgagtggacgtcgcggcttcggtcccatataaaccctaccggcaccgtgctgctccagctcgaaaacacaatgcagatgtcgcttaaagacctcctc

SEQ ID NO: 12187 - DNA, 1287 bp, synthetic construct
  misc_feature 1..1287: note = source = /note="Description of Artificial Sequence: Synthetic coding sequence"
  source 1..1287: mol_type = other DNA
atgcaactgagaaatccggaactacacctcggttgcgccctcgcacttcgattcttggcattagtgagttgggacatccccggcgcaagggcgctcgacaacggcctcgcccggacccccaccatggggtggctccattgggagcggtttatgtgcaatttagactgccaggaggaaccagattcttgtatctctgaaaagctgtttatggaaatggcagaactcatggttagcgagggatggaaggatgcaggctacgaatatctctgcattgatgactgctggatggcacctcagagagactctgagggacggttgcaggccgatcctcaaagattcccccacgggatccgccagctcgccaactacgtgcactctaaaggtttaaagttaggcatctacgcagacgtgggtaataagacctgcgccggatttcctggtagttttggctactacgatatcgacgctcagacgtttgcggattggggcgtcgacctgctcaagttcgatggctgttattgtgactctctcgagaacctggcagacggttataaacatatgagccttgcccttaacaggacgggtagatctatcgtttactcttgtgagtggcctctgtatatgtggcctttccagaagcctaactacacggaaatccggcaatactgcaatcactggaggaacttcgccgacatagacgatagctggaagagcatcaaatcaatcttagattggacttcttttaatcaggagaggatcgttgatgtcgctgggcctggcggctggaacgaccccgatatgctggtgatcggaaacttcggtctctcctggaaccaacaagtgacccagatggctctgtgggctatcatggccgcccctctgttcatgtccaacgaccttcggcatataagtcctcaggccaaggccttgctccaggacaaagacgtgatcgccattaaccaggaccctttggggaaacaggggtatcagctgcgccagggggataatttcgaggtgtgggaacggccactctctggcttggcttgggctgtggctatgatcaacaggcaggagattggcggacctcggtcctacaccatcgctgtggcatcactgggaaagggcgtggcatgtaacccagcttgctttatcacccagctgttgccagtcaagcgcaaactggggttttatgaatggacatccagactgcggtcacatattaaccctacagggaccgtgttgctgcagctggagaataccatgcagatgagtctaaaggacctgcta

SEQ ID NO: 12188 - DNA, 1287 bp, synthetic construct
  misc_feature 1..1287: note = source = /note="Description of Artificial Sequence: Synthetic coding sequence"
  source 1..1287: mol_type = other DNA
atgcaattgcgtaaccccgagttgcacttgggctgcgcccttgctctgaggttccttgccctggtgtcctgggacatccctggtgcccgcgccctggataacgggctggctagaaccccgacgatgggctggctccattgggagcggtttatgtgcaaccttgattgccaggaagaaccagacagctgcatctccgagaagctctttatggagatggcggagctgatggtttcggaggggtggaaggatgcgggctacgagtacctctgcattgacgactgctggatggccccgcagcgggattccgagggcagacttcaggctgacccgcagcgtttcccgcatggaattcggcagctggctaactacgtccacagcaagggcttgaaacttggtatctatgcagatgtcggtaacaaaacctgcgccggtttccccggtagcttcggatattacgacatcgatgcccagacgttcgccgattggggggtggacctccttaagttcgatgggtgctattgcgactctctggaaaatcttgccgacggttacaagcatatgagccttgccctcaataggacgggtcgcagcatcgtctactcgtgcgagtggcccctgtacatgtggcctttccagaagcctaactacactgaaatccgtcagtactgcaaccactggcgcaactttgccgatatcgacgactcctggaaaagcatcaagtcgattctagactggacgtcattcaaccaagagcgtatcgtagacgtcgcgggtcccggaggctggaacgaccccgacatgctagtgatcggaaactttggcctgtcttggaatcagcaggtgacccagatggccctctgggccatcatggctgctccgcttttcatgagtaatgatctcagacatatttcccctcaagccaaggccctccttcaagacaaggacgtcatagcgatcaaccaagaccctctcggcaagcaaggttaccaactcaggcaaggtgataacttcgaggtgtgggagcgcccgctgagcggcttggcttgggccgtcgccatgatcaaccgtcaagagatcggtggcccccgctcctacaccatcgccgttgcttccctggggaagggcgttgcgtgcaaccctgcctgctttatcacacaactgctgcccgtgaagcgtaagcttggcttctacgaatggaccagccgtctgcggtcgcatatcaatcctaccggcaccgtcttactccaactggagaataccatgcagatgagcctgaaggatttgctc

SEQ ID NO: 12189 - DNA, 1287 bp, synthetic construct
  misc_feature 1..1287: note = source = /note="Description of Artificial Sequence: Synthetic coding sequence"
  source 1..1287: mol_type = other DNA
atgcagctacggaaccctgaattgcatttaggatgcgccctagcactacgctttctagcactcgtgagctgggatatacccggcgccagggcccttgacaacggactggcacgaacaccaacaatggggtggctgcactgggaacgtttcatgtgtaacctcgattgtcaggaggagcccgactcatgcatttctgaaaagttatttatggagatggctgagctgatggtcagcgagggctggaaggacgccggctatgaatacctgtgcatcgacgattgctggatggcgccacaaagggactcggagggtaggctgcaagccgatcctcaaaggttcccccacgggattcggcaactcgctaactatgtgcatagcaagggactaaagctgggaatatacgccgatgtgggtaacaaaacctgcgcagggttcccaggatcattcgggtactatgacatcgatgcgcagaccttcgctgattggggcgtagacctgctcaagttcgacggctgctattgcgattcattggagaatttggctgatggatacaagcacatgtcactggctcttaatcggaccggacgaagcattgtctactcttgtgaatggcctttatacatgtggccttttcagaagcccaactacaccgaaatccgccagtactgcaaccattggaggaacttcgctgacattgacgattcctggaagtctatcaagtctatactggactggaccagctttaaccaggaacggattgtagacgtcgccggccccggaggatggaatgatccagatatgttagtgatcgggaacttcgggctgtcctggaatcaacaggttactcaaatggcactttgggctatcatggcagcaccactgttcatgtcgaatgatcttcgacatatttctccacaggccaaagcactgctgcaagataaagacgttatcgcaatcaatcaggaccctctagggaaacaggggtaccagctccgacagggagacaacttcgaggtttgggagaggcctctgtcgggcctcgcctgggccgtggccatgataaacagacaggaaataggaggaccccgcagctacaccattgcagtcgcaagcctgggcaagggcgtagcatgtaaccccgcgtgttttataacacagttgctgcccgtaaagaggaaactaggcttctacgaatggactagccgattgagaagccacataaaccctaccggcactgtcttgctgcagctggaaaatacgatgcagatgtccctcaaagatctgctt

SEQ ID NO: 12190 - DNA, 1287 bp, synthetic construct
  misc_feature 1..1287: note = source = /note="Description of Artificial Sequence: Synthetic coding sequence"
  source 1..1287: mol_type = other DNA
atgcaactccggaaccccgaactgcacctcggttgtgcactcgcgctgagattcctcgccctggtgtcctgggatatcccgggcgcgcgggctctggacaacggccttgccagaacgcctactatgggatggcttcactgggaaagattcatgtgtaacctggactgccaggaggagccggactcctgcatctcggagaagctcttcatggaaatggcagagttgatggtgtcagaagggtggaaggacgcaggttacgaatacctctgcatcgacgactgctggatggcccctcagcgggactccgagggcagactgcaggcggacccacagcgctttccacatggaataaggcaactggctaattacgtgcacagcaaaggactcaagctgggaatttacgccgacgtcggtaacaagacctgtgcgggattcccaggctcattcggctactacgacatcgacgcccaaacgtttgcagactggggggtggatctgctgaagttcgacggctgctattgcgactcacttgagaacctggcggatggatacaaacatatgtcgctggcattgaaccgcaccggcagatcgatcgtgtactcatgcgagtggccgctttacatgtggccgttccagaaaccgaactacactgaaatcagacagtactgcaaccattggcggaactttgcggatatcgacgacagctggaagagcatcaagtccatcttggattggaccagcttcaaccaggagcggatcgtcgatgtggccggtccgggaggatggaacgatccggacatgctggtgatcggaaatttcggcctcagctggaatcaacaggtgacccagatggccctttgggccatcatggccgcaccattgtttatgtcgaacgatctccggcacatctccccgcaggctaaggccctcctgcaggacaaggacgtcattgccatcaaccaagatccactcggcaagcagggttaccaactgcgacaaggcgacaatttcgaggtgtgggagcgcccgctcagcggcctggcgtgggctgtggccatgatcaaccggcaggagatcggcggtcctcgctcctacactatcgcggtggcatccctggggaagggggtggcgtgtaacccggcttgcttcatcacccaacttcttcctgtcaaacgcaagctgggattctacgagtggacctctaggctccgctcacatatcaaccccaccggaactgtgcttctgcaactggaaaacaccatgcagatgagcctgaaggacctgctg

SEQ ID NO: 12191 - DNA, 1287 bp, synthetic construct
  misc_feature 1..1287: note = source = /note="Description of Artificial Sequence: Synthetic coding sequence"
  source 1..1287: mol_type = other DNA
atgcagcttagaaaccccgaactgcatctgggttgcgccctcgcacttagattcctggcgctggtgtcgtgggacattccaggcgcacgagccctcgacaacggacttgcaaggacccctaccatgggatggttgcactgggaacggtttatgtgtaaccttgattgccaagaggagccagatagctgtatatcagaaaagttgttcatggagatggcggaactgatggtatcagaaggatggaaggatgccgggtatgagtacctttgcattgatgattgttggatggcaccacagcgcgattcagagggaaggctgcaagcagatcctcagcggttcccacatggaattaggcagcttgcaaattacgtccattcgaaaggactcaaacttggtatctacgcagatgtgggcaataagacctgtgctggctttcctggttcatttggctactatgatattgatgctcaaaccttcgcggactggggtgtcgacttgctcaagtttgatggttgttactgtgactcccttgaaaacctcgcagacgggtacaagcatatgtcactcgcactcaatagaaccggtcgtagcattgtttactcgtgtgaatggcctctgtacatgtggccgtttcaaaagccaaactacaccgaaatcagacagtactgcaaccactggcgaaactttgcagacattgacgactcctggaaatccatcaaatccattcttgattggaccagctttaaccaagagaggatcgtggatgtggcgggtcctgggggatggaacgatccagatatgctggtgattgggaactttggcctgtcctggaatcaacaagtcactcagatggccctgtgggccatcatggccgccccccttttcatgtcgaatgacttgcgtcatattagccctcaagcgaaagcacttctccaagataaggatgtaattgccataaaccaagaccccctcggaaagcaaggctatcaacttcgccaaggagataacttcgaagtgtgggaacgtccattgtctggccttgcctgggcagtggcaatgatcaatagacaggaaatcggtggaccccgatcctacactattgcagtcgcgtcgttgggaaagggggtggcttgcaaccctgcatgcttcattactcagcttctgcctgtgaagcgcaagctgggattttacgaatggacttcccgccttagatcccacatcaacccaactgggacggttctgcttcaactcgagaataccatgcagatgtccctgaaggatcttctg

SEQ ID NO: 12192 - DNA, 1287 bp, synthetic construct
  misc_feature 1..1287: note = source = /note="Description of Artificial Sequence: Synthetic coding sequence"
  source 1..1287: mol_type = other DNA
atgcagctgagaaatccggaacttcatcttggatgtgcacttgctctgaggtttctggcactggtgtcgtgggacattcctggagcacgcgcactggataacgggctggcgaggaccccaactatgggctggctccactgggaaagatttatgtgcaaccttgattgtcaggaggaaccagattcatgcattagcgaaaagctgttcatggaaatggctgaactgatggtgtccgaagggtggaaagatgcagggtatgaatacctgtgcattgatgattgttggatggcgcctcagcgtgactcggaaggtagactgcaagccgatccgcagagattcccccatggaatccgtcagctggcgaattacgtgcattcgaagggtcttaaacttggcatatacgccgacgtggggaataagacctgcgctggattcccgggttcgtttggatattacgacatagatgcacagacctttgctgattggggagtcgatcttctgaagtttgatggttgctactgtgattcgctcgagaacctggccgacggatacaaacatatgagcctggccctcaacagaacgggccggtccatcgtgtacagctgtgaatggcctctgtacatgtggccctttcaaaagcccaattacaccgaaatccgccaatactgcaaccattggcgcaactttgcagacattgatgatagctggaagtcaataaagtccattcttgattggacctcgtttaaccaggaaagaatcgtggacgtggcgggccccggaggttggaacgatcctgatatgcttgtgattggaaacttcggactgtcgtggaaccaacaggtgacccaaatggccctgtgggccatcatggcagcccctctgtttatgtcgaacgaccttagacacatctctcctcaggcaaaggcacttctccaggacaaagatgtgatcgcaattaaccaggaccccctgggcaagcagggataccagctgagacaaggggataacttcgaggtctgggaacggcctctttcaggcctggcctgggccgtggccatgatcaatcgccaagagatcggtggtccacgctcttacaccattgcagtggcaagccttgggaaaggagtggcctgtaatcctgcgtgtttcataacgcaactgcttcctgtgaagagaaaattgggtttttacgaatggacgagccggcttcggtcacacatcaatccaactggaaccgtcctgttgcaactggaaaacactatgcagatgtctcttaaggatctgctg

SEQ ID NO: 12193 - DNA, 1287 bp, synthetic construct
  misc_feature 1..1287: note = source = /note="Description of Artificial Sequence: Synthetic coding sequence"
  source 1..1287: mol_type = other DNA
atgcagcttagaaatccagagctgcacctcggctgtgcacttgccctgagattcctcgcattggtgtcatgggacatcccgggtgctagagcccttgacaatggcctggcgcggacacctaccatgggatggctccactgggaaaggttcatgtgcaatttggattgtcaggaggagccggattcatgcatttccgagaagctcttcatggagatggccgagctgatggtctctgaaggttggaaggacgccggatatgagtatctttgcattgacgattgctggatggcgccacagagagactccgaagggaggctgcaagctgacccgcagagatttccgcatggcatacgccaactggccaactacgtgcactctaagggcctcaaactgggcatttacgcagatgttggcaataagacctgtgcgggcttcccggggagttttggctactatgatattgacgctcaaaccttcgcagactggggggtggacctcctgaaatttgacgggtgttactgtgatagtctggaaaatctggctgacgggtataaacacatgtctctggctctgaaccggacaggccgcagtattgtctacagctgtgagtggcctctctacatgtggcccttccagaagccaaactacaccgaaatccgacagtactgcaatcactggagaaacttcgcagacattgatgactcatggaagtccatcaagagtatccttgactggacctctttcaatcaggagcggattgttgacgtagccgggccagggggatggaatgaccctgacatgctcgtcatagggaactttggtttgagctggaatcagcaagttactcagatggcactgtgggctataatggccgcgcctctgtttatgtcaaatgatctgcggcacatctcccctcaggcaaaagctctgctgcaggataaagacgtcatcgcaattaatcaggaccctctgggcaagcaagggtatcagttgcggcaaggagataacttcgaggtctgggagcgacccctttccggactggcctgggctgtggcaatgatcaacaggcaggagattggaggcccccggtcttataccatagccgtcgccagtctggggaaaggtgtggcatgcaatccagcatgttttatcactcagctcctgccggttaagcggaagttgggcttttacgaatggacatctcgactccggagccatatcaatcccaccggcaccgtgctgctgcaactggaaaacaccatgcaaatgtccctgaaagacctgctc

SEQ ID NO: 12194 - DNA, 1287 bp, synthetic construct
  misc_feature 1..1287: note = source = /note="Description of Artificial Sequence: Synthetic coding sequence"
  source 1..1287: mol_type = other DNA
atgcagctgcggaaccccgagcttcatctgggatgtgcactggcattgcgatttctggccctggtgtcatgggacatccccggagcccgagccctggacaatggccttgccaggacccccactatggggtggttgcattgggagcgctttatgtgcaatctggattgtcaggaggaacctgattcttgtatttcagaaaaactttttatggagatggcagaactgatggtttctgagggatggaaggatgccgggtatgaatacctgtgtatagatgactgttggatggcacctcagagagattctgaggggcgcctgcaggccgatccccagaggttcccccacggaatacgccagctggccaattacgtgcattctaaaggactaaaattggggatttacgctgatgtcggcaacaaaacctgcgctggctttccagggtcctttggatattacgacatcgatgcacagacgttcgcagactggggcgtggacttgctgaaatttgacggttgctactgcgactctttagaaaaccttgccgacggatacaagcatatgagtctggccttaaacagaacaggcagatctatcgtgtatagctgtgagtggccactatatatgtggccatttcagaaaccaaattatacagagatccggcagtactgcaaccactggagaaactttgccgacatagatgactcctggaaatccatcaaatctattctagattggacatctttcaaccaagaacgtattgtggatgttgcaggccctggcggttggaatgatccagatatgcttgttattggcaacttcgggttatcatggaaccagcaggtgacccagatggcgctgtgggctataatggctgcccccctttttatgagcaacgacctgcggcatataagcccacaggccaaggcacttttgcaggataaagacgtcattgcgatcaaccaggatcccctaggaaaacaggggtaccaactgcgccagggcgacaactttgaggtgtgggaaaggcctctgtcaggcctggcatgggccgtcgcaatgatcaatcggcaggaaatcggtggcccccggtcttatacaattgctgtggctagcttgggcaagggcgtagcctgcaatcccgcatgtttcataacacaacttcttcctgtaaagcgaaagctgggcttctatgagtggacttctaggctgcgcagccacattaacccaaccggaacagtcctgttgcaactggaaaataccatgcaaatgtcactcaaggatctactc

SEQ ID NO: 12195 - DNA, 1287 bp, synthetic construct
  misc_feature 1..1287: note = source = /note="Description of Artificial Sequence: Synthetic coding sequence"
  source 1..1287: mol_type = other DNA
atgcagctgcgaaaccccgaactccacctgggctgtgccctcgctctgcggtttctcgcactggttagctgggacattcctggggcgcgagcactggacaacggactggctaggactcccacaatggggtggctccattgggagcgctttatgtgcaatctagattgtcaggaggagcctgacagttgcatctcagagaaactgtttatggagatggctgagctgatggtgtcagaggggtggaaagatgctgggtacgaatacctatgcatcgatgactgctggatggctccccagagagattctgaggggcgcctgcaagccgaccctcaaaggtttccccatggaattagacagctggcgaattatgttcattcaaagggcttaaaactgggtatctacgctgacgtaggaaacaagacctgcgcgggattccctggctcattcggttactacgacattgacgcccagacttttgctgattggggagtggacttgctgaagtttgatggctgttactgtgattctttggagaatttggcagacggatataaacatatgtcactagcattgaatcggacaggccgcagcatcgtttatagttgcgaatggcccctgtacatgtggccgttccagaaacccaattatacggaaattcgacagtattgcaaccactggagaaactttgctgatatcgacgatagttggaagagcatcaagtctatactggactggacaagttttaaccaagaacggattgtggacgtggctggtccaggtggttggaacgaccctgatatgctggtgattggcaacttcggcttgtcttggaatcagcaggtgacacagatggcactatgggcaattatggctgctcctctgttcatgtccaacgacctacgtcatataagtccccaggccaaagcattgctgcaggataaagatgtgatcgcaataaaccaggaccccctgggcaagcaaggctatcagttgcggcagggagataacttcgaggtctgggaacgaccactgagcggacttgcatgggccgttgcaatgattaaccggcaggagatcggcgggcctcggagttatactatcgccgtcgcctcacttggaaagggagtggcttgcaatccagcatgcttcattacgcagcttctgcccgtcaaaagaaagctgggcttctatgagtggacaagtcgactgagatcccatatcaatcccactggcaccgttctcctgcaacttgaaaatacaatgcaaatgtcactcaaagatcttttg

SEQ ID NO: 12196 - DNA, 1287 bp, synthetic construct
  misc_feature 1..1287: note = source = /note="Description of Artificial Sequence: Synthetic coding sequence"
  source 1..1287: mol_type = other DNA
atgcagttgagaaatccggaactccacctgggatgtgcactggctctcagattcctggccctggtgagctgggatattccgggggcccgggcactggataatgggctggctagaaccccgaccatggggtggctgcattgggaacgctttatgtgtaaccttgactgtcaggaagaacccgactcctgcatctcggaaaagctgtttatggaaatggcggaactgatggtgagcgagggatggaaggatgccgggtatgagtacttgtgcatcgacgactgctggatggccccacaacgcgacagcgagggacggctccaagccgacccacaacgcttcccgcatggtatcaggcagctcgccaactacgtgcattcgaaaggacttaagctcggaatctacgcggacgtgggcaacaaaacttgcgctggctttcctggatcgttcggatactatgatatcgacgcgcagacttttgccgactggggagtggatctcctgaagttcgacggatgctattgtgactcccttgaaaacctggccgacggctacaagcatatgtcgttggccctgaatcgaacgggacggagcatcgtctactcctgtgaatggcctctgtacatgtggccattccagaaaccgaattacactgaaatcagacaatactgcaatcattggcggaatttcgctgatattgacgacagctggaagtccattaagagcatcctcgactggacgtcattcaaccaagagaggattgtggacgtggccggccctgggggctggaatgacccagacatgctggtcatcggtaacttcggactgagctggaatcagcaggtcactcagatggccttgtgggctatcatggctgcacccctgtttatgtcgaacgatcttcggcacattagccctcaggccaaagctctgctgcaggataaagacgtgatcgcaatcaaccaggacccgctggggaagcagggctatcagctccgccaaggagacaacttcgaagtgtgggagcgccctctgtcgggcctcgcctgggcggtggcaatgatcaataggcaagagattgggggacccaggtcgtacaccatcgcagtggcttcactgggaaagggagtggcttgcaatccggcatgcttcatcactcagctccttcccgtgaagaggaagctgggtttttacgaatggacctccaggctgcggtcccatatcaaccctaccgggactgtcttgcttcaactggagaataccatgcagatgtcactcaaagacctgctg

SEQ ID NO: 12197 - DNA, 1287 bp, synthetic construct
  misc_feature 1..1287: note = source = /note="Description of Artificial Sequence: Synthetic coding sequence"
  source 1..1287: mol_type = other DNA
atgcagctgagaaatcccgaacttcatttgggatgcgcactggcacttagattcctcgcacttgtgtcgtgggatatccctggtgcaagagcacttgacaatggactcgctcgtactcccactatgggctggctgcattgggagcgattcatgtgtaatcttgactgtcaggaggaacctgattcctgcatttcggaaaaactgttcatggagatggcagagctgatggtgagcgagggatggaaagacgccggatacgagtacctttgtattgatgattgctggatggccccccaacgggattccgaaggacgtctgcaagcagatccacaaaggtttcctcatggcattcggcaactcgcaaattacgtgcattctaaaggacttaaacttggaatttacgcagacgtgggaaacaagacgtgtgccggttttcctggttcctttggttactacgacatcgatgcacaaaccttcgccgattggggtgtggacttgctcaagtttgacgggtgctactgcgattcgctcgaaaatctggcggatggatacaaacacatgtcattggcgctgaaccgaactggccgatcgattgtgtacagctgtgagtggccgctttacatgtggccctttcaaaagcctaactataccgaaatccgccagtactgtaaccattggcgcaattttgcagatatcgacgattcctggaagagcatcaaatccatcctcgattggacctcttttaaccaagagcgtattgtggatgtggcaggtccaggcggttggaacgatccagacatgcttgtcattggtaacttcggactttcgtggaaccaacaggtgacccaaatggcactgtgggccattatggcagcaccgctcttcatgtccaacgatcttcgtcatatttcgccacaagcaaaggcccttttgcaggacaaggacgtgattgccattaaccaagacccattgggtaagcagggataccagcttagacaaggtgacaattttgaagtttgggagcggcctcttagcggtcttgcttgggccgtggcaatgatcaatagacaggagattgggggccctaggagctataccatagcagtggcatcccttggtaaaggggttgcctgtaatcctgcatgttttatcacccaacttttgcctgtcaagagaaaacttgggttttacgagtggacgtcgcgcctcaggtcacacattaatcccaccggcaccgtgctgttgcagctggaaaacaccatgcagatgtccctgaaggatctgctc

SEQ ID NO: 12198 - DNA, 1287 bp, synthetic construct
  misc_feature 1..1287: note = source = /note="Description of Artificial Sequence: Synthetic coding sequence"
  source 1..1287: mol_type = other DNA
atgcagctcaggaatcctgagctgcaccttggttgcgccctcgctctgcggtttctggctctggtaagttgggatattcccggggctagagctctggataatggtctggcacgcaccccaaccatgggatggctgcactgggagcgctttatgtgcaatctggattgtcaagaagaacccgactcttgcatctccgagaagctctttatggagatggccgagctgatggtgagtgaggggtggaaggacgccgggtacgaatatctgtgtatagatgactgctggatggcccctcaaagagacagcgaaggccggctgcaagccgacccccaacgcttccctcacggcatacggcagctggcaaactatgtacattccaaagggctgaagctgggaatatatgctgatgtcggtaataaaacatgtgctggctttccaggatcctttggctactacgatatcgatgcccagactttcgccgactggggtgtagatctgttaaagtttgacggttgttattgcgactctctggagaaccttgccgatggatataagcacatgtctttagctctaaaccgaaccggccgcagtattgtgtacagctgcgagtggccactctacatgtggccttttcagaagccaaactatacagaaattcgccagtattgtaaccactggcgaaattttgccgatattgacgactcttggaagtctattaaatccatcctggattggacttcttttaatcaggagcgaattgtggacgtggcaggacccggaggttggaatgaccctgatatgctcgtgattggtaactttgggctttcttggaatcagcaggtgactcagatggctctgtgggctattatggctgctcctttgttcatgagcaacgatctgcggcatatctctccccaggccaaggccctactgcaggataaggacgtcatcgccataaaccaggacccactaggtaagcagggttaccaactgcgacagggggacaatttcgaagtgtgggagcggcctttaagtggcctggcctgggcagtggccatgatcaaccgccaggagatcggcgggcccagaagctacactattgctgtggcttctctaggtaagggagtggcttgcaatcccgcttgcttcatcacacagctgctgcctgtgaagcgcaagttagggttctatgaatggacttcacggttaagaagtcacatcaacccaaccggcacagttctgttacagttagagaacaccatgcagatgagtttgaaagatctactg

SEQ ID NO: 12199 - DNA, 1287 bp, synthetic construct
  misc_feature 1..1287: note = source = /note="Description of Artificial Sequence: Synthetic coding sequence"
  source 1..1287: mol_type = other DNA
atgcagttgaggaaccctgaattacatctcgggtgtgcactggccctgcgcttcctggctctggtgagttgggatataccaggtgcacgggctctggataacggcctcgctagaactcctaccatgggttggctacattgggaacgattcatgtgcaacttggattgccaagaggagcctgactcttgtatcagtgaaaagctgttcatggagatggcggagttaatggttagtgaagggtggaaagatgcagggtatgaatacctgtgcattgatgactgctggatggcgccccagcgggactctgagggccgtctgcaggccgatccgcagaggtttccccatggcatccggcagcttgctaattatgtccacagcaaggggttaaaattggggatctacgccgacgtgggtaataagacctgcgcaggatttcctgggagttttggctattacgatattgacgcacagactttcgcagattggggggttgatctgttaaagttcgacggctgctactgcgactctctcgaaaatctggccgatggctacaagcacatgagtctggctctgaataggacaggacgcagcattgtgtatagctgtgaatggccgctctacatgtggccatttcagaagcccaactatacagagattagacaatattgtaaccactggcgaaatttcgcagacatcgatgactcttggaaatccatcaaatctatattggattggacctctttcaaccaggagcgtattgtggatgtggccgggcccggtggatggaacgatccggacatgttagtgattgggaattttggccttagttggaatcagcaggtaacgcaaatggctctctgggctatcatggccgcaccactgtttatgagtaacgatttaaggcacatctcaccacaggccaaggctctgttgcaggataaagatgtgatcgctatcaaccaggaccctctgggaaaacaggggtaccagctacggcagggagacaacttcgaggtctgggagcgcccactgtccggactagcctgggcggttgccatgatcaaccggcaagaaataggcggccccaggtcctatacgatagccgtggccagcctgggcaagggtgtggcctgcaacccagcgtgttttataacgcagttacttcctgtgaagcggaaacttggcttctacgagtggacatcaagactacgaagccacattaatcctacagggaccgtgttgctacagctggagaacaccatgcagatgtcgttgaaagatctactg

SEQ ID NO: 12200 - DNA, 1287 bp, synthetic construct
  misc_feature 1..1287: note = source = /note="Description of Artificial Sequence: Synthetic coding sequence"
  source 1..1287: mol_type = other DNA
atgcaactcagaaacccagagctgcacctggggtgcgcactggcgctgcgattcctggccttggttagctgggacatccctggagcacgggccctggataatgggcttgcccgcaccccaactatgggatggttacattgggagcggtttatgtgtaacctcgactgtcaagaggaacctgattcgtgcatctccgagaaattgtttatggaaatggcggagcttatggtgtcagaaggctggaaggatgctggctatgaatatttatgtatcgacgactgctggatggccccccagagagactccgaaggcaggctgcaggccgacccccaacggtttcctcacggcattcgacagctggccaattacgttcactccaaagggttgaagctaggaatatatgcagatgtggggaataaaacttgcgcaggtttcccgggatctttcgggtattatgatatagatgcccagacctttgccgactggggcgttgacttgctcaaattcgatggctgttactgtgactccttagagaatttggccgatggctataagcatatgtccctggccttgaaccggaccgggcgcagtattgtctatagctgcgagtggcccttatatatgtggcccttccagaaacccaattatactgagattcgccaatactgtaatcactggaggaatttcgcagacatcgacgatagctggaagtcaatcaagtctattctggactggacctcctttaaccaggagcgcatagttgacgtggcaggcccaggaggatggaacgatccagatatgttagtgatcggaaatttcggcctctcgtggaatcagcaggttacgcagatggccctctgggcaataatggcagcacccctctttatgagcaacgatctgcggcacatttcaccccaggccaaagccttgctgcaagataaagacgtgatcgccatcaaccaggatccacttgggaagcaaggctatcaactgcgtcagggggataacttcgaggtatgggaacggcccctgtccggcctggcgtgggcggtagctatgataaaccgtcaggagattggaggcccccggtcttataccatcgctgttgcctcactggggaagggggtggcttgcaaccccgcctgtttcatcacacaactgttacccgttaaacggaagctgggattttacgagtggacatcccggcttcgctcacacataaacccgaccggaacagtcctgctccagctcgagaacactatgcagatgagcctcaaggacctgctg

SEQ ID NO: 12201 - DNA, 1287 bp, synthetic construct
  misc_feature 1..1287: note = source = /note="Description of Artificial Sequence: Synthetic coding sequence"
  source 1..1287: mol_type = other DNA
atgcagttgagaaaccctgaactgcatctcggatgcgccctggcactcagatttctcgccctggtgtcttgggatattcctggtgccagagccttagacaatggtctcgccaggaccccaacaatgggatggctgcattgggaaagattcatgtgtaatttggactgccaggaggagcctgatagctgcatctctgagaagctgtttatggaaatggccgagctcatggttagcgagggttggaaagacgctggatatgagtacctgtgcatcgacgactgctggatggcaccccagcgtgatagtgaagggaggttgcaggccgatcctcagcggtttccccacggcatccggcagctcgctaattacgttcactctaagggcctgaagctagggatttatgccgatgtcggaaacaaaacctgcgcggggttccccggcagctttgggtattacgatatcgacgcccaaacatttgctgattggggggtggacctccttaagttcgatgggtgctactgtgacagcctagagaatctggcagacggctataagcatatgtcacttgctcttaataggacgggccgcagcatcgtctacagttgtgagtggcctctgtacatgtggcctttccagaagcccaactacacagagatcagacagtactgtaatcactggcgcaactttgccgacattgacgatagctggaaatctataaagtccatattagactggacgtcattcaatcaggaaaggattgttgacgtggcggggcccggcggttggaatgaccctgacatgctggtgattgggaatttcggactgtcttggaaccagcaggtgactcagatggcactgtgggccatcatggctgctccactgtttatgtccaacgacttgcggcacatctccccccaggctaaggcactgttgcaagataaggatgtgatcgcgattaaccaggacccactgggtaaacagggctatcagctccggcaaggggataacttcgaggtctgggagcggccactatccgggctggcttgggctgtggcaatgatcaaccgtcaggagattggcgggccacggtcttacacgatcgcggtggccagcctgggaaagggagttgcctgtaaccctgcatgtttcattacacagctgcttccagtaaaaaggaaattaggtttctacgaatggacatctcggttgagatcccacattaaccccacagggacagtgctgttgcagctggagaatacgatgcagatgagccttaaagaccttttg

SEQ ID NO: 12202 - DNA, 1287 bp, synthetic construct
  misc_feature 1..1287: note = source = /note="Description of Artificial Sequence: Synthetic coding sequence"
  source 1..1287: mol_type = other DNA
atgcagctgagaaatccggaactgcatctcggctgtgctctcgctctccggttcctggctcttgtgtcatgggacatcccgggcgcccgcgctctcgacaacgggctggctagaacacccacaatggggtggttacattgggagcgatttatgtgcaatctggactgtcaagaagaacctgatagttgcatctcagaaaaactgttcatggagatggcagaactgatggtgtctgagggctggaaggacgcaggatatgagtatctatgtatagatgattgttggatggcccctcagcgcgacagtgaggggaggctgcaggctgatccgcagcgatttcctcatggaatcagacagcttgcgaactatgttcactccaaagggctcaaactagggatttacgccgacgtaggaaataagacatgtgctggcttcccagggagcttcgggtattacgacattgatgcccagaccttcgcagactggggggtagacttgctcaaattcgatgggtgttactgcgatagcctggagaatcttgccgatgggtataaacacatgtctctggctctgaatcgcacaggccggagtattgtgtattcttgtgaatggccgctttatatgtggccttttcagaagccaaactacacggaaatccgacagtactgcaatcattggaggaacttcgctgacattgacgatagctggaagtctatcaagtctatcttggactggacgagctttaaccaggagcgcatagtggacgtggcaggacctggaggatggaatgacccagacatgctggtaatcggcaatttcgggctgagttggaatcagcaggtgactcagatggccctctgggccattatggctgcccctcttttcatgtctaacgaccttcgtcacataagtccacaggcaaaagcactgttgcaagataaggatgttatcgcgattaaccaggatcccctggggaaacagggttaccagctgcgtcagggggataactttgaagtgtgggagcgccccctgtccggcttagcatgggcagtggcaatgattaatagacaggagatcggagggccacggagctatactatagctgtcgcttcactgggaaagggtgtggcttgcaatcctgcttgtttcatcacacagctcctgccagttaagcggaagctgggcttttacgaatggactagcagactacgcagtcatatcaatcccacagggactgtattgctacaattggagaacaccatgcagatgagtttgaaggacctgctt

SEQ ID NO: 12203 - DNA, 1287 bp, synthetic construct
  misc_feature 1..1287: note = source = /note="Description of Artificial Sequence: Synthetic coding sequence"
  source 1..1287: mol_type = other DNA
atgcaactgcgcaatcctgagcttcacctcgggtgcgccctcgcccttcgattcttggcccttgtgtcgtgggacattccaggagcgcgtgctcttgataacgggctcgcccgtaccccaaccatgggatggctccattgggaacgcttcatgtgcaatcttgattgccaggaagagccggactcgtgtatttccgaaaagctgtttatggagatggccgaactgatggttagtgaaggctggaaggacgccggttacgagtacctctgtatcgatgattgttggatggcacctcaacgggactcggagggacgcctccaagcagacccacaacgcttcccgcatggaatccggcagctcgctaactatgtgcactccaagggactgaagctgggaatttacgcagacgtgggaaacaagacttgcgccggatttcctggcagcttcggttactacgatatcgacgctcagaccttcgcggattggggggttgacttgttgaagttcgatggctgttactgcgactccctggagaacttggcagacgggtacaagcacatgtcactcgcactgaacagaacgggaagatccatagtgtactcgtgcgaatggccactttacatgtggccattccagaaacctaattacactgaaattaggcagtactgcaatcactggaggaatttcgctgacatcgatgatagctggaagagcatcaagtccatccttgactggacttccttcaaccaggaaagaatcgtcgatgtggccggaccggggggctggaacgacccggacatgctcgtcatcggcaactttggattgtcgtggaaccagcaggtgacccaaatggcactctgggctataatggccgccccactgtttatgagtaacgacctgaggcacatctcaccgcaggctaaagcactcctccaggacaaggatgtgattgccattaatcaggatccgctcggcaaacagggttaccaactgcggcaaggcgataacttcgaggtgtgggagcggccgctgagcggcctcgcttgggcggtggccatgatcaatcgccaagaaatcggaggacccagaagctataccatcgcggtcgcttcgctgggtaagggggtagcctgcaaccctgcctgtttcatcactcaactgcttccggtgaagcggaaactgggtttctatgaatggactagccgactgcgctcacatatcaatccgaccggaactgtcctcctgcagctggagaataccatgcaaatgtcactgaaagacctgttg

SEQ ID NO: 12204 - DNA, 1287 bp, synthetic construct
  misc_feature 1..1287: note = source = /note="Description of Artificial Sequence: Synthetic coding sequence"
  source 1..1287: mol_type = other DNA
atgcaattaaggaaccctgaactacatttgggatgtgcactcgcgctgaggttcctcgccctggtgagctgggatattcctggcgctagggcattggataatggcttagcccgcacacccacgatgggctggttgcactgggagcgttttatgtgtaacctggactgtcaggaggagccagattcctgcatctccgagaagctttttatggaaatggccgagctgatggtttctgagggctggaaggatgctggctacgaatatctgtgcatagacgattgctggatggctccccagcgcgactctgagggtaggctgcaggctgacccacagcgctttccccacggcatcaggcagctggctaactacgtacactctaaagggcttaagttgggcatttatgccgacgtaggtaacaagacctgcgctgggttccccggcagcttcggttattacgacatcgacgcccagaccttcgcggattggggggtggacctactgaaattcgacggatgttactgtgactcactggagaacctggctgatggttacaagcacatgagtctcgcgctgaatagaaccgggaggagcatcgtctatagttgcgaatggccgttgtacatgtggccttttcagaagcccaattatacggaaatccggcagtactgtaaccactggcgcaatttcgcggacattgatgattcctggaaatcaattaaaagcatccttgactggacaagttttaatcaggaaaggattgtggacgtggctggccccgggggatggaatgaccccgacatgctggtaatcggaaattttggactctcatggaaccagcaggtcacacagatggcactgtgggctattatggcggccccactgttcatgtccaacgacctccgtcacatcagcccacaggctaaggctctgcttcaagacaaggacgtgatcgcgatcaaccaggatcctctggggaaacagggataccagcttcgccagggggacaacttcgaggtctgggagagacccttgagcggtctcgcatgggcggtcgccatgataaatcgccaggaaataggcgggcccagatcctacaccatagctgtggcaagtcttggcaaaggagtcgcttgtaatcctgcctgcttcatcacacaattacttcccgtcaaacgcaagctgggattctatgaatggactagcaggctgaggagccatataaaccccaccggcacagtcttgctgcagctggaaaatacgatgcagatgagccttaaagatttgctt

SEQ ID NO: 12205 - DNA, 1287 bp, synthetic construct
  misc_feature 1..1287: note = source = /note="Description of Artificial Sequence: Synthetic coding sequence"
  source 1..1287: mol_type = other DNA
atgcagctgcggaatccggaactgcacctgggatgcgccttggcgctgcgcttccttgccctcgtctcctgggacatccctggtgcgcgggccctcgacaatggactcgctagaaccccaaccatgggctggctgcattgggagcggttcatgtgtaatctcgactgccaggaagaaccggacagctgtatctcagagaagctgttcatggaaatggccgaattgatggtttcagagggctggaaagacgcgggatacgaatatctgtgcatcgatgattgctggatggccccgcaacgggactcagaagggcggctgcaagccgatccacaacggtttccgcacgggattcggcagctggccaattacgtgcactctaagggactgaaactcggcatctacgccgacgtgggcaacaagacctgcgcgggattcccgggttcatttggatactacgacattgatgcacaaaccttcgctgactggggcgtcgacctgcttaagttcgacggatgctactgcgattcgctggaaaacctggcagatgggtacaaacacatgtcactcgccctgaaccggactggtcggagcatcgtttactcgtgtgaatggccgctctacatgtggccatttcaaaagcccaactacaccgaaatcaggcagtactgcaatcattggagaaatttcgccgatattgacgactcatggaagtccattaagtcgatcctggattggacttccttcaatcaggagaggatcgtggacgtggcaggacccgggggatggaatgatcccgacatgctggtcatcggtaatttcggcctctcctggaatcagcaagtcactcagatggcactgtgggccatcatggcggcacccctcttcatgtccaacgaccttcgccacatctcgccccaagccaaagcgctgctccaggataaagatgtgatcgccatcaatcaagacccgctgggcaagcagggataccagctccgccagggagataactttgaggtgtgggaacgccctctgagcggtttggcctgggctgtcgccatgatcaaccgccaggaaatcggcggaccgagatcgtacactatcgcagttgcatccctcggaaagggagtggcatgcaaccccgcctgcttcatcacccaactcctgcccgtgaagcgaaagttgggcttctacgaatggacgtcacgcctgaggtcgcacatcaaccctactggaactgtgcttctgcagctcgaaaataccatgcaaatgtccctcaaggacctgctg

SEQ ID NO: 12206 - DNA, 1287 bp, synthetic construct
  misc_feature 1..1287: note = source = /note="Description of Artificial Sequence: Synthetic coding sequence"
  source 1..1287: mol_type = other DNA
atgcagcttcgaaacccagagttgcacttgggatgcgctctggcactgcggttcctggctctggtgagctgggatattccaggcgcaagggctctggataatggccttgcccgcacaccaaccatggggtggttgcattgggagagatttatgtgcaacttggactgtcaggaagagcccgactcatgtatctctgagaaactgttcatggaaatggctgaactgatggtgagcgagggctggaaggacgcaggatatgaatacctttgcatcgacgactgctggatggcaccacagagggactctgagggccgccttcaggcggacccgcagagattcccacatggaatcagacagctcgccaactacgttcactctaagggtcttaagctgggcatctacgctgatgtgggtaacaaaacctgtgccggatttcctggtagctttggatactacgatatcgatgcgcaaacctttgcagactggggcgtggacttgctcaagtttgacggatgctactgcgacagtttggaaaacttggccgatggatacaagcacatgtcccttgcccttaatagaaccggtagatccatcgtatacagttgcgagtggcctctgtacatgtggcctttccaaaagcctaactacacagaaatacgtcagtactgtaaccactggcgcaatttcgccgatatcgacgacagctggaagagtatcaagagtattctggattggaccagctttaatcaagagcgcatcgtggatgttgctggtcctggcgggtggaatgaccctgatatgttagtcatcggaaacttcggcctcagctggaaccagcaagttacacagatggctctgtgggctatcatggccgctcctctttttatgtctaacgatctccgccacattagccctcaggctaaggcactcctgcaggataaagacgtcattgccatcaaccaggacccactggggaaacagggatatcagctgcgtcaaggcgacaacttcgaggtctgggagcgcccactttctggcctggcctgggcagtggccatgataaacaggcaggaaatcggaggccccaggagctacaccatagccgtcgcttctctcggaaagggcgtcgcctgcaaccctgcttgcttcatcactcagctcctgcctgtaaaacgcaaattagggttctacgaatggacctctagactcagatcccatattaaccccaccggcaccgtcctgttgcagctggaaaacacaatgcagatgtctctcaaagacctgctc

SEQ ID NO: 12207 - DNA, 1287 bp, synthetic construct
  misc_feature 1..1287: note = source = /note="Description of Artificial Sequence: Synthetic coding sequence"
  source 1..1287: mol_type = other DNA
atgcagttgcggaacccagaattgcacctgggatgcgccctggcactgaggttcttggcattggtgtcctgggacatcccgggagcccgcgccctggataacggactcgccagaaccccaactatgggatggttgcattgggaacgctttatgtgtaaccttgactgccaggaagagccggattcctgcattagcgagaaactgtttatggaaatggccgagcttatggtgtcagagggatggaaggacgccgggtacgagtacctttgcatcgatgactgctggatggcgccgcagcgcgactctgaaggacggctgcaagcagaccctcagagattccctcacggaatccggcaactcgccaactacgtccatagcaaaggactcaaacttggaatttacgcggatgtcggcaacaagacttgcgccggcttccctggatccttcgggtattacgacattgatgcacaaaccttcgctgactggggagtggacctcctgaaatttgatggctgctactgcgacagcctcgaaaatctcgcggacggctacaagcacatgtcactcgcgctcaaccgcacggggcgatctatcgtctactcgtgtgagtggcccctttacatgtggccatttcaaaagccaaattacacggaaatacgacaatactgtaaccattggcgtaatttcgccgatatcgacgatagctggaagagcatcaaatcgatcctggactggacctcattcaaccaagaacgtattgtcgatgtggcagggcccgggggatggaacgacccggatatgctggtgatcggaaacttcggtctgtcatggaatcagcaggtgactcagatggcgctgtgggctatcatggccgcgccgctgttcatgtcgaatgatctgagacacatttccccgcaagcaaaggctctgctgcaagacaaagacgtgatagccattaatcaagaccctctgggaaagcagggttaccagctgcggcagggtgataacttcgaagtgtgggagaggccgctctctggactggcttgggcggtggcaatgatcaaccggcaggaaatcggcggaccacgctcgtatactatcgcggttgctagccttggtaagggtgtggcttgcaaccccgcatgtttcatcacccagctccttccagtcaagagaaagctcggcttctacgagtggacttcgagactccgctcgcacatcaatccgactggtaccgtgcttctccaactggaaaataccatgcagatgtcgcttaaggatctgctg

SEQ ID NO: 12208 - DNA, 1287 bp, synthetic construct
  misc_feature 1..1287: note = source = /note="Description of Artificial Sequence: Synthetic coding sequence"
  source 1..1287: mol_type = other DNA
atgcaactccggaatcctgagctccacctcggttgtgcactggctctgcgctttctggcgctggtgagttgggatatccctggagcaagggcactcgacaatgggttggcacgaactccaaccatgggctggctccactgggaacggtttatgtgtaacctggactgccaggaagaaccagattcgtgcatcagcgaaaagctgtttatggaaatggcagaactgatggtgtctgaaggatggaaggatgcaggatacgagtacctgtgcatcgatgattgttggatggcccctcaacgcgactccgagggtcggctccaggcggatccacaaagatttccacacggtattcggcaactggcgaattacgtgcattccaaaggactgaagctgggaatctacgcagatgtcggtaacaagacctgtgcaggattcccgggctctttcggatactatgatattgatgcacaaactttcgccgactggggagtggacctgcttaagttcgatggttgctactgcgattcacttgaaaacttggcagatggttacaagcacatgtccctggcactcaatcgtacgggtcgatcgattgtctacagctgcgaatggccactctacatgtggccattccagaagcctaactatacggagatacgtcagtactgtaatcactggaggaactttgcggacatagatgactcttggaagtccataaagagcattctcgactggaccagctttaatcaagaacgaattgtcgacgtggcagggcctggtggatggaatgatcctgatatgttggtgatcgggaactttggactgtcatggaaccaacaggtgactcagatggcattgtgggctatcatggccgcaccactgtttatgtccaacgacttgaggcatatttcgccacaggcaaaggccttgctgcaggataaggatgtgattgccattaatcaagaccccctggggaaacaaggataccaactgcgccaaggtgataactttgaggtctgggaacgccccctctccggactggcctgggcagtcgctatgattaaccgacaagagatcggtggaccccggtcctacactattgctgtggcatcgttgggaaagggcgtggcatgcaaccctgcctgcttcattactcaactcctgccagtgaaaagaaaactgggcttctacgagtggacctcgagacttagaagccacattaaccctactgggaccgtcctgctccagctcgaaaacaccatgcagatgtcacttaaggatttgctt

SEQ ID NO: 12209 - DNA, 1287 bp, synthetic construct
  misc_feature 1..1287: note = source = /note="Description of Artificial Sequence: Synthetic coding sequence"
  source 1..1287: mol_type = other DNA
atgcaactgagaaatcctgaacttcatctgggatgtgcactggcacttaggtttctcgccctggtgtcctgggacattccaggtgcccgcgcacttgacaacgggctcgcaagaactccaactatggggtggcttcattgggagcgctttatgtgtaacctggattgtcaggaagagcctgactcgtgtatttccgaaaagctgttcatggaaatggctgaacttatggtatcagaaggatggaaggacgccggttacgaatacttgtgtattgacgattgttggatggcaccgcaaagagactccgaagggagactgcaggcagaccctcaacggtttcctcacggcatacgacagctggcgaattacgtgcactccaagggattgaaattgggcatatacgcagatgtcggtaataagacttgtgccggttttccagggagctttgggtactacgacattgacgcccaaacgttcgcggattggggcgtggatcttctgaaatttgatggctgttactgcgatagccttgagaatttggcggatggctataaacacatgtcgcttgccctcaacagaactggaagatcgattgtttactcgtgcgaatggccactttacatgtggccgtttcaaaagccaaactacactgaaattcggcaatactgtaatcattggcggaactttgcagacattgatgattcgtggaagtctattaagtcgattctggattggaccagcttcaaccaggaacggattgtggatgtcgccggccccggaggatggaacgatccagacatgcttgtgatagggaattttggtctgagctggaatcaacaagtgacccaaatggcactgtgggcaattatggcagcaccactcttcatgagcaacgacctgagacatatttcaccccaggcgaaagcacttctccaggataaggatgttatcgctattaaccaagatcctctggggaagcaaggctaccagctcagacagggtgataacttcgaggtgtgggaacggcccctgagcggtcttgcttgggctgtggccatgatcaacaggcaagaaataggagggccaagatcgtacaccatcgcagtggcatccttgggaaagggtgtcgcctgcaatcctgcttgtttcataactcaactcctcccagtcaagaggaagctgggattctacgaatggactagccgcctgagaagccatatcaacccgactgggacggtgcttctgcagctggaaaacactatgcaaatgtcactgaaggaccttctg

SEQ ID NO: 12210 - DNA, 1287 bp, synthetic construct
  misc_feature 1..1287: note = source = /note="Description of Artificial Sequence: Synthetic coding sequence"
  source 1..1287: mol_type = other DNA
atgcaattaagaaacccagaattgcacctgggatgcgcattggctctcagatttctcgctttggttagctgggacattcccggggcacgtgctcttgataacggacttgcaaggacccccactatgggatggcttcattgggaaaggttcatgtgcaaccttgattgccaagaggaacccgactcatgcatttccgaaaaacttttcatggagatggctgagttgatggtttctgaaggatggaaagatgcaggctatgaatatctctgcattgatgactgctggatggccccacaaagagatagcgagggtcgtttacaagccgatcctcagagattcccacatggaataaggcagcttgccaactatgttcatagcaagggattgaagctcggaatttatgccgacgttggaaataagacgtgcgctggatttccaggtagtttcggatattacgatattgacgctcaaaccttcgccgactggggcgtcgacctcctcaagtttgatggttgctactgtgacagcctggaaaaccttgcagacggctataagcatatgtcccttgcattaaaccgtaccggacgatctatcgtttatagttgcgagtggcctctgtatatgtggccattccagaagcctaactacactgaaatcagacagtattgtaaccattggaggaattttgcagatatagacgactcctggaagagtataaagagtatcctcgattggacctcctttaaccaggaacgtatagtggatgtcgctggccctggtggatggaacgaccccgacatgcttgtgattggaaacttcggtttgtcatggaaccaacaagtgacccaaatggcactttgggctataatggccgctccattgttcatgtcaaacgacctaaggcacatcagcccacaagctaaagcgcttcttcaggacaaagatgtaattgccattaatcaggatccgcttggaaagcaggggtatcaacttaggcagggagataattttgaggtgtgggaaaggcccctttcagggttggcctgggcagtagcaatgattaatagacaagagataggcggtcccaggtcgtacacaatcgcggtcgcttcattgggaaagggagtcgcttgcaatccagcttgttttattacccaattattacccgttaagcgtaagttgggtttttacgagtggacgtccagactccgcagccatatcaaccctactggtaccgttctgctccaactagagaatacaatgcaaatgagccttaaggatttgttg

SEQ ID NO: 12211 - DNA, 1287 bp, synthetic construct
  misc_feature 1..1287: note = source = /note="Description of Artificial Sequence: Synthetic coding sequence"
  source 1..1287: mol_type = other DNA
atgcagctgagaaacccggaactccacctgggctgtgccctggcgctccggttcctggccctggtgagttgggacattccgggagcccgcgcgctggacaacggactcgccagaacgccaactatgggatggctgcactgggagcggtttatgtgtaatctggattgccaagaggaaccggattcgtgtatctccgagaagctcttcatggaaatggccgagctgatggtgtccgaaggatggaaggacgccggatacgagtacctctgcatcgatgactgctggatggcgccgcagagggattccgaaggacgcctgcaagcggatccgcagcgcttccctcatggcattcggcaactggcgaattacgtccattcaaaggggctcaaattgggaatctacgctgacgtcggcaataagacttgcgcaggattcccggggtctttcggatactacgatatcgacgcgcaaaccttcgccgattggggcgtggatcttctgaaattcgacgggtgctactgcgattccctggagaaccttgccgacggctataaacacatgtcactggccctcaatcgcactggaagatccatcgtgtactcgtgcgagtggccgctctatatgtggcctttccagaagcccaattacaccgagatcagacagtactgcaaccactggcggaacttcgccgacatcgacgattcctggaagtcgatcaagtcgatcctggattggacttcatttaaccaagaacgcatagtggacgtcgcgggcccgggaggatggaatgacccagatatgcttgtgattggaaatttcggtctttcttggaaccaacaagttactcagatggcgctgtgggccattatggccgcgccactgttcatgtctaacgacttgcgccacatttccccacaagccaaggcgcttctgcaggacaaggacgtcatcgccatcaatcaggatcctctgggaaaacagggataccaactcagacaaggcgacaacttcgaggtctgggagcgacccctgtccggcctggcatgggcggtggctatgatcaaccggcaggagattggcggcccgaggagctacactatcgccgtcgcgtcgctgggaaagggggtggcatgcaacccagcctgtttcatcacccagctgctccctgtcaagcggaagctgggtttttacgaatggacctcgcgactgagatcacacattaaccctactggtacggtgctcctgcaactcgagaacacgatgcaaatgtcgctgaaagacttgctt

SEQ ID NO: 12212 - DNA, 1287 bp, synthetic construct
  misc_feature 1..1287: note = source = /note="Description of Artificial Sequence: Synthetic coding sequence"
  source 1..1287: mol_type = other DNA
atgcagctccggaatccagaactgcacctgggatgcgccctggccctgcgcttcctggccctcgtctcgtgggatatcccgggtgcaagagcgctggacaacgggcttgcccggactccgaccatggggtggttgcattgggaacgcttcatgtgtaacctggattgtcaggaggaaccagacagctgcatctcagaaaaacttttcatggagatggccgagctgatggtgtcggagggatggaaggatgctggttacgagtacctctgtatcgacgactgctggatggctccacagcgcgactcggagggtagacttcaggctgacccccagcgcttcccgcatggaattagacagctggccaattacgtgcactcgaagggcctgaagctggggatttacgcagacgtgggaaacaagacctgcgcgggattcccaggctcgtttggctactacgacattgatgcccagaccttcgccgattggggagtcgatctcctgaaattcgacggatgctactgcgattcgcttgaaaacctcgcagacggatacaagcacatgtcgcttgccctgaaccgcaccggccggtccatcgtctattcctgcgagtggcccctgtacatgtggcccttccagaagccaaattacaccgaaatccggcagtactgtaaccattggcgcaacttcgcagacatcgacgactcgtggaaaagcatcaagtccatcctggattggacctccttcaatcaggagcggatcgtcgacgtggccggaccgggagggtggaatgaccctgacatgctggtcattggaaactttggactcagctggaaccaacaggtgacccagatggcactgtgggctatcatggccgcacctctctttatgtcgaacgacctgcgccatatttcccctcaagccaaggctcttctccaagacaaggacgtcattgctatcaaccaggacccgcttggcaaacaaggctaccagctgcgccaaggcgataacttcgaagtctgggagcggccgttgtcaggcctggcatgggcagtcgccatgatcaatcgccaagaaataggaggtccccggagctatactatcgccgtggcttccctgggaaagggagtggcttgtaaccctgcttgtttcatcactcaactcctgcccgttaagcggaaactcggcttctacgagtggacttccaggttgcgaagccacatcaatcctaccggaacggtcctgctgcagctcgaaaacaccatgcagatgtccctgaaggacctgctt

SEQ ID NO: 12213 - DNA, 1287 bp, synthetic construct
  misc_feature 1..1287: note = source = /note="Description of Artificial Sequence: Synthetic coding sequence"
  source 1..1287: mol_type = other DNA
atgcagctgcgtaaccccgaacttcatctggggtgtgcattggcattgagatttttggctctggtgagctgggacatacccggcgcacgcgcactggacaatggcctcgcacgaaccccaaccatgggttggctccactgggaacgttttatgtgcaacctggactgtcaggaagaacctgattcgtgtatttccgaaaagctctttatggagatggctgaactcatggtgtcagaaggctggaaggatgccgggtacgagtacctttgtatcgacgactgttggatggcaccgcaaagagattccgaaggtcgtttgcaggctgaccctcagagattcccacatggaatcagacagcttgctaactacgtgcactctaagggactgaagctcgggatttacgcggatgtcgggaataagacttgcgcaggttttcccggatcatttggatactacgatattgacgcccaaacttttgccgattggggagtggatcttttgaaatttgatggatgttattgtgatagcctggaaaacctcgcagatgggtacaaacatatgtccctcgcacttaatcggacgggtcgttctatcgtctacagttgcgagtggccactgtacatgtggccttttcaaaagcctaactacaccgagattagacaatactgcaatcattggcggaatttcgcagatatcgacgattcgtggaaaagcatcaaatccattcttgactggacgtcctttaaccaggagcggatcgtggatgtcgcagggcctggcggatggaacgatccagatatgcttgtgatcgggaatttcggactgtcatggaaccaacaggtgactcagatggcgctttgggcgatcatggccgcaccccttttcatgtcgaacgatcttcggcatatttcgcctcaggccaaagcgcttctgcaagacaaggatgtcattgccattaaccaagatccactgggaaagcaaggctaccagcttagacaaggagacaatttcgaggtgtgggaacgcccacttagtgggctcgcatgggccgtggccatgataaaccgccaggagatcggcgggccccgttcctacactatcgctgttgcatcgttgggcaaaggtgtggcatgcaatccagcctgtttcataactcagctcctgccagtcaagcgtaagctcggattctatgaatggacctcccgtctgcgatcgcacattaaccccactggaaccgtgctgcttcaactcgagaacaccatgcaaatgagcctgaaggatctgctt

SEQ ID NO: 12214 - DNA, 1287 bp, synthetic construct
  misc_feature 1..1287: note = source = /note="Description of Artificial Sequence: Synthetic coding sequence"
  source 1..1287: mol_type = other DNA
atgcagttgagaaatcccgagcttcacctggggtgcgccctggcgctgaggtttctcgccttggtcagctgggacatcccaggagcccgcgcgctggataatggacttgcgagaaccccgactatgggctggctccactgggagcgttttatgtgtaacctggactgccaggaggagccggattcgtgcatctcggaaaagctcttcatggagatggccgagctgatggtgtctgaaggctggaaagatgcaggctacgaatacctctgtatcgatgattgttggatggcaccacaacgcgacagcgagggccggctgcaggcggatcctcaacgttttcctcacggaatcaggcagctggcaaactacgtgcattcaaagggcctgaaattggggatctacgccgacgtcggtaacaagacctgcgccggattcccgggatctttcggatactacgatatcgacgcacaaacctttgccgactggggcgtagacctgctgaaattcgacggatgttattgtgactcacttgaaaacctggcagatgggtacaaacacatgtccctggccctcaacagaactggtcggagcatcgtttactcgtgtgaatggccactctacatgtggccgttccaaaagcctaattacaccgagatccggcagtactgcaatcattggcgcaacttcgctgacatcgacgattcctggaaaagcatcaaatcgatcctggactggacttccttcaatcaggaacggatcgtggatgtggccggacctggaggatggaatgacccagatatgctcgtgattgggaattttggattgtcctggaaccagcaggtgactcagatggccctctgggcgattatggctgccccgctgttcatgtcaaatgaccttcgccatatctcgcctcaagcgaaggcgctgttgcaggacaaggacgtcatcgccattaaccaggatccgctgggcaagcaaggataccagctccgccaaggagataacttcgaggtgtgggaacggccactgagcggactggcatgggctgtcgcaatgataaaccggcaagaaattggaggcccacgatcctacactatcgccgtggcctccctcggaaagggcgtagcctgcaacccagcgtgcttcatcacccagcttctccccgtcaagcgcaagctcggtttctatgaatggaccagccgcctgaggtcgcacataaatccgactggtacggtgctgttgcagcttgaaaacaccatgcaaatgtcactgaaggatctgctc

SEQ ID NO: 12215 - DNA, 1287 bp, synthetic construct
  misc_feature 1..1287: note = source = /note="Description of Artificial Sequence: Synthetic coding sequence"
  source 1..1287: mol_type = other DNA
atgcagctgcgcaaccccgaactccatctgggctgcgcccttgcgttaaggttcctcgccctggtgtcatgggatattccgggggctagagcactcgacaacgggctggctcgcacccctacaatggggtggctgcattgggaacgctttatgtgcaacctggattgccaagaagaaccagatagctgcatctctgagaagctctttatggaaatggctgagctcatggtaagcgagggatggaaggatgccgggtacgagtacctctgcattgatgactgctggatggctccgcaaagggattcagagggcagactacaagctgatccccagcgattcccccatgggatccggcagctggccaattacgtgcacagcaagggcctgaagttaggaatctacgccgatgtgggtaacaagacgtgtgctggatttcccggctccttcggttattatgacatcgacgcacaaactttcgcagactggggcgtggatcttctaaagtttgatggatgttattgcgacagtctggaaaatctggccgatggatacaagcatatgtctttagcactgaaccgcaccggccgaagtattgtatactcttgtgagtggcctctgtacatgtggccatttcagaagcctaattacaccgaaattcgacaatattgcaatcattggcggaacttcgccgacatagacgactcctggaaatcaatcaaatctatcctggactggactagcttcaatcaggagagaatcgtagatgttgccggccccggtggatggaatgaccctgacatgctagtgattggaaatttcgggctgagttggaaccaacaagtcacccagatggccctgtgggctattatggctgcacctttgttcatgtctaatgatctgcgccacatctccccccaggccaaggcactattgcaagataaagatgtcatcgcgatcaatcaggatcctttaggcaagcaaggataccagctgcgccagggagataacttcgaagtctgggagcggcctctgagcgggctggcttgggctgtcgcaatgatcaataggcaagaaatcggtggtcctcgttcatacacgatcgcagtcgcctccttaggcaagggggtggcttgtaatcctgcctgctttattacccagctgctacctgtaaaacgcaaactaggcttctatgagtggacgtcgaggctccgatctcatattaatccaactgggaccgtccttcttcaactagaaaacactatgcagatgagtcttaaggacttactg

SEQ ID NO: 12216 - DNA, 1287 bp, synthetic construct
  misc_feature 1..1287: note = source = /note="Description of Artificial Sequence: Synthetic coding sequence"
  source 1..1287: mol_type = other DNA
atgcagctcaggaaccctgaactgcacctgggatgcgcacttgccttgagattcctggctctcgtctcatgggacatacctggggcgagagcgctggataacggacttgcccgaacccccacgatgggttggctccactgggaaaggttcatgtgtaacctcgattgtcaagaagagcctgacagttgcattagtgaaaagctgtttatggaaatggcagaactcatggtgtctgagggctggaaagacgccggttacgagtacctgtgtattgacgactgttggatggcgccccagcgcgacagcgagggtcgtctacaggctgatccccagagatttccacacggcattaggcagctcgctaattatgtgcatagcaaggggctaaaactagggatctacgcagacgtggggaacaagacctgcgccggatttcccgggagctttgggtactacgatatcgacgcccagacgttcgctgattggggcgtggatttgcttaagtttgacgggtgctattgtgacagtctagaaaacttagccgacgggtataagcatatgtctttggcactgaataggacaggcagaagcatcgtatactcttgcgaatggcccctgtacatgtggccatttcagaaacctaattacacagaaattagacaatattgtaatcactggaggaactttgcagacatagacgactcttggaagtctatcaagagcatcctggattggacaagctttaaccaggagcgaattgtggatgtcgctggtccgggcgggtggaatgatcctgacatgctggtaattggaaatttcggactgagttggaatcaacaggtgacccaaatggctctgtgggcaattatggccgcgccattgtttatgtccaatgacttacgacacatctccccgcaagccaaggccctgctgcaggacaaggacgtgattgccatcaaccaagacccgctcggtaaacagggatatcagctgcgccagggggataattttgaggtgtgggaaaggccactaagcggactggcatgggccgtggcaatgattaaccgacaggaaatcggaggccctagatcctataccatagctgtggccagcctcggcaagggggttgcttgcaatccagcgtgtttcataacccagctcttaccagtgaaaaggaaactggggttctatgaatggacaagccgcttacgtagtcatatcaatcctacaggcaccgtgttgctgcaattggaaaataccatgcagatgtcactcaaggacctcctg

SEQ ID NO: 12217 - DNA, 1287 bp, synthetic construct
  misc_feature 1..1287: note = source = /note="Description of Artificial Sequence: Synthetic coding sequence"
  source 1..1287: mol_type = other DNA
atgcagcttcgcaatccagaacttcacttgggctgcgccctggcccttagatttctcgccttagtgagctgggatatcccaggagcaagagctctcgataatggcctggccaggacacctaccatgggttggttgcattgggagagattcatgtgtaacctggattgccaggaggagcctgattcatgtatctctgagaaactgttcatggaaatggctgaactgatggtgtccgaggggtggaaggatgctggttatgaatacctctgcattgatgactgttggatggctccccaaagagattccgagggtaggctacaggccgacccacagagattcccccatggcattaggcagcttgcaaattatgttcactccaagggcctgaagcttggaatttacgcggacgtgggaaacaaaacctgtgcagggtttcccggctcttttggttattacgatattgatgctcagaccttcgcggattggggggtcgaccttttaaagtttgatggctgttactgtgatagcctggagaacctcgcagacggatataaacacatgagcttagctctgaataggactgggcgctctatcgtgtacagttgcgagtggcctttgtatatgtggccattccaaaaacccaattacacagagatccggcagtactgtaatcactggagaaattttgcagatattgatgatagctggaagagcatcaagtccatcttggattggaccagcttcaaccaggaacgcatcgtcgatgtcgccggccctggaggctggaacgacccagacatgctcgtgattgggaactttgggctgagctggaaccaacaagtgacccagatggccctatgggcaattatggcagcacctctgtttatgagcaacgacctgagacatatcagcccccaggccaaagcactgttacaggacaaggacgtgatcgccataaaccaagacccccttggaaaacaaggctatcagctgagacaaggtgataacttcgaggtttgggagagaccattgtcaggactcgcttgggctgtcgccatgatcaatagacaggagatcggcggacctagatcctacaccatcgcagtggcgagccttggaaagggcgtcgcttgcaaccccgcttgcttcatcacacaacttctgccagtgaagcggaagctcgggttttacgaatggacaagcaggctgaggagccacattaaccctactggaaccgtgctgctgcagttggaaaacacaatgcagatgagcctgaaggatctcctc

SEQ ID NO: 12218 - DNA, 1287 bp, synthetic construct
  misc_feature 1..1287: note = source = /note="Description of Artificial Sequence: Synthetic coding sequence"
  source 1..1287: mol_type = other DNA
atgcaactgcgcaatcctgagttgcacctgggctgtgcactggcattgcggtttctcgcacttgtcagttgggatatcccgggggctcgcgcgctcgataatggcctcgcacgcacccctaccatgggctggcttcactgggaaagatttatgtgtaacctggattgtcaagaggagcccgacagctgcatctccgaaaagctgtttatggaaatggcggaactgatggtcagcgagggctggaaagatgcaggatacgaatatctttgcattgacgactgttggatggcgccccaaagagattcagagggccgcctccaggcagatccacagagattcccgcatggtattcgtcagctcgctaattacgtgcattccaaaggtctgaagctcggtatatacgcagatgtgggtaacaagacttgcgcaggctttcctggatccttcggttactacgacattgatgcccaaacgtttgcagattggggcgtggaccttcttaagtttgatggttgttattgcgacagcctcgaaaatcttgcggatgggtacaagcacatgtcgctggcacttaaccgcactggtcgttcaattgtgtattcatgtgaatggcccctgtacatgtggccttttcagaaaccgaactacaccgagattcgccaatactgcaaccactggcgcaacttcgcagatatagatgattcgtggaaatcgattaagtcgatcctggattggacttcattcaatcaggagcgaattgtggacgtggctggaccaggaggatggaacgacccagatatgctggtcatcgggaactttggtctttcctggaaccagcaggtcacccaaatggcactttgggcaatcatggccgcacccctgtttatgtcgaatgatcttagacatattagcccacaggccaaggctctccttcaggataaagatgtgattgccattaatcaggacccactgggaaagcagggataccaactcagacagggcgataactttgaggtgtgggaaaggcccctttctggtctggcatgggcagtcgccatgattaatcgccaagaaataggaggtccgagaagctacacgatcgctgtcgcatcgctggggaagggagtcgcctgtaacccagcctgctttatcactcagctgctgcctgttaagagaaagctgggcttttacgagtggacctcgcgactgaggagtcacataaatccaactggaactgtgctgctgcaattggaaaacacgatgcagatgtcgctgaaggaccttctg

SEQ ID NO: 12219 - DNA, 1287 bp, synthetic construct
  misc_feature 1..1287: note = source = /note="Description of Artificial Sequence: Synthetic coding sequence"
  source 1..1287: mol_type = other DNA
atgcagcttcgtaatccagaactgcacctggggtgcgcccttgcactgagatttctcgcgcttgtctcctgggatatccctggggctagagcgcttgacaacggattggcgaggacccctaccatgggttggctccactgggagcgtttcatgtgcaatctggactgccaggaggaaccagattcctgtatcagtgaaaagctgtttatggagatggccgaattaatggtaagcgaaggttggaaagacgctgggtacgagtatctttgcatcgacgactgctggatggcaccccaacgagattccgagggaagactgcaggcggacccgcagcggtttcctcacggcattcgccaactggccaattacgtacattccaaaggcctaaagttaggtatctacgccgacgtgggcaacaaaacttgcgcagggtttcccggatcgttcgggtactatgacatagatgcccagacttttgcagactggggagtggatctgctcaagttcgatggttgctattgtgattcactcgagaacctcgccgacgggtataaacatatgtctctcgccctaaatcgaacaggccggagtatcgtatactcctgcgaatggcctctgtacatgtggccctttcagaaacctaattacaccgaaatcagacagtattgcaatcactggcgaaacttcgctgacattgatgatagttggaaaagtatcaaatctatattggattggacctcttttaatcaggaaagaatcgtagacgtggccggtcccggaggctggaatgacccagatatgctggtaataggaaactttggcctgagctggaatcaacaagtaacacagatggcgttatgggccatcatggcagctcccctttttatgtctaacgaccttcggcacatctcacctcaggccaaggcactcttacaggacaaggatgtgatcgctatcaaccaggaccccctcggaaaacaggggtatcagctgcgacagggtgacaattttgaggtgtgggagcgtccgctgtcagggctggcctgggcagtggccatgataaatcggcaggagatcggcggccctaggagttacactatcgccgtcgcctccctcggcaaaggtgtggcatgcaacccagcatgcttcattacccagttactccctgtgaagcggaaactcgggttctacgagtggaccagccgccttagatcgcacataaatccaacaggcaccgttctgctgcagttagaaaacacaatgcaaatgagtctgaaggacctctta

SEQ ID NO: 12220 - DNA, 1287 bp, synthetic construct
  misc_feature 1..1287: note = source = /note="Description of Artificial Sequence: Synthetic coding sequence"
  source 1..1287: mol_type = other DNA
atgcagcttcggaacccggaattacatttgggttgcgcactggctttgcgcttccttgctcttgtctcctgggacatccctggtgcccgcgcccttgacaacggtctggcacgtaccccgacgatggggtggctgcactgggagcggttcatgtgcaatttagattgtcaggaagaacctgattcttgtatttccgaaaaactgtttatggaaatggcagagttaatggtctccgaaggttggaaggatgctggatacgaatatctctgcattgatgattgttggatggcgccgcagagggatagcgagggccgccttcaagctgacccgcaacgcttcccgcatggcattcgccagttggcaaattacgttcatagtaaggggttaaaactggggatctacgctgacgttggcaacaaaacttgtgcaggattcccgggcagctttgggtattatgatattgatgcacagacgtttgcggattggggtgttgatcttttgaaattcgatgggtgttattgcgatagcttagaaaatcttgcagacggctacaaacatatgagcctggctttaaataggacgggacgcagcatcgtctactcttgtgagtggccattatatatgtggccatttcaaaaaccgaattacacagagatccgacagtattgtaaccattggaggaactttgcggatattgatgattcgtggaaatcgattaaatctatactagattggacatcatttaatcaagaacgcatagtcgatgtcgcgggtccgggtggttggaatgacccggatatgttagtgattggcaatttcggcctatcatggaatcagcaggtaacccaaatggctctgtgggctataatggcagccccgctttttatgagcaatgatttgcgacatataagcccgcaggccaaagcactgctacaagacaaagatgtcatcgcgatcaaccaagacccgctgggcaaacaaggctatcagctcaggcagggagataattttgaagtctgggaacggccgttaagtggcctggcgtgggcagttgcaatgatcaataggcaagagatcggaggcccacgctcctatactatcgcagtcgcgtccctggggaaaggggtcgcgtgcaatccagcttgctttatcactcaactgctcccggtgaagagaaagctcggattttacgaatggacatcaaggcttagaagtcatatcaatccgacgggtacggtgttgctacagctggaaaatacaatgcagatgtcgttgaaagacttactg

SEQ ID NO: 12221 - DNA, 1287 bp, synthetic construct
  misc_feature 1..1287: note = source = /note="Description of Artificial Sequence: Synthetic coding sequence"
  source 1..1287: mol_type = other DNA
atgcagctacggaatccagaacttcacttgggatgtgctctcgctctgcggttccttgccctcgtctcatgggacattccaggagctcgggctctggataatggacttgccaggacacccacaatgggatggttacattgggaaaggtttatgtgtaacctcgactgccaggaagaacctgattcatgcatatccgaaaaactcttcatggaaatggctgaactcatggtatctgaagggtggaaggatgcaggatatgagtatctgtgtattgatgattgttggatggcaccccagcgcgacagtgaagggcggctccaggctgatcctcagcgattccctcatggaatcagacagctagccaattatgtgcactcaaaggggctgaagctggggatatacgcagatgtgggaaataagacttgtgccggatttcccgggtccttcgggtactatgatatagatgcccagacatttgcagattggggagtggatctcctgaaattcgatgggtgctattgtgattcgctcgaaaacctcgcagatgggtataaacatatgtccctcgctttgaatagaacaggacgaagtatagtgtactcttgtgaatggccactgtatatgtggccctttcagaaacctaattatacagaaatacggcagtattgcaatcactggcggaattttgctgatatcgatgattcttggaagagtatcaaatccatcttggattggacttcctttaaccaggagcggatagtggatgttgctggaccgggagggtggaacgatcctgatatgctggtcatcgggaatttcggactctcctggaatcagcaagtgacacaaatggcactttgggccattatggcagctccccttttcatgtcaaatgatctacgacatatctctccacaggctaaggccctcttgcaggataaggacgttatagccatcaatcaggatcccttaggaaaacagggatatcagttgcggcagggggataacttcgaagtgtgggaacggcctctcagtggactcgcctgggccgtggctatgataaatcggcaggaaataggaggacctagatcttatacaatcgctgtagccagtcttggaaaaggagtggcttgcaatccagcctgctttatcacacagctgctcccagttaaacggaaactcggattctatgaatggacaagtagactcagatcgcatatcaaccctacagggactgtactccttcagttagaaaacacaatgcagatgagtttaaaagatcttctt

SEQ ID NO: 12222 - DNA, 1287 bp, synthetic construct
  misc_feature 1..1287: note = source = /note="Description of Artificial Sequence: Synthetic coding sequence"
  source 1..1287: mol_type = other DNA
atgcaactccggaatccggaactgcacctgggctgtgcactggctttgcgcttcctggcactggtgtcgtgggacattccaggagcgcgcgctttggataacggactggcccggaccccaactatgggttggcttcactgggaaagattcatgtgcaatctggactgccaggaggagccggactcgtgtatctccgaaaaactcttcatggagatggccgaattgatggtgtcagagggatggaaagatgcggggtacgaatatctttgcattgatgactgctggatggcacctcagagagactcggaaggacgcctccaagcggaccctcaacggttcccacatgggattagacagttggcaaactacgttcacagcaagggcctcaagctgggcatctacgctgatgtgggcaacaaaacctgcgcgggattccctggatcattcggatattacgatatcgatgctcagacttttgcagattggggagtggatctcctgaaattcgacggatgctactgtgacagcttggagaacctggcggacggttacaaacatatgtccctcgcgctcaatcgcacgggaagatccatcgtgtactcatgcgaatggcccctgtacatgtggcccttccaaaagccaaattacaccgagatcaggcagtactgcaatcactggaggaatttcgccgatatcgacgacagctggaaatccattaagtcaatcctggattggacttccttcaaccaggagcgcattgtggatgtggccggaccgggaggatggaacgacccggacatgctcgttatcggaaatttcggtttgtcgtggaaccaacaagtcactcagatggcactgtgggcgatcatggccgcccctctgttcatgtcaaatgacctgcgccacatctcgcctcaggctaaagccctcctccaagacaaggacgtgatcgcaatcaatcaggatccactcggaaagcaagggtatcagctcagacaaggtgataacttcgaagtctgggaacggccgttgagcggactggcctgggcagtggcgatgatcaaccggcaagagattggcggcccacgctcctacactatcgccgtcgcttccctgggcaaaggagtcgcatgcaatccggcttgttttatcactcagctgctgccagtcaaacgcaagctcgggttttacgagtggacttcgaggcttcggtcacatatcaacccgactggcacggtgctgctgcaactggagaatactatgcagatgagcctcaaggacctcctg

SEQ ID NO: 12223 - DNA, 1287 bp, synthetic construct
  misc_feature 1..1287: note = source = /note="Description of Artificial Sequence: Synthetic coding sequence"
  source 1..1287: mol_type = other DNA
atgcagttacgtaatcctgaactgcacttggggtgtgccttggcactgagattcttggcactggtgagttgggatattcccggcgcccgagctctggacaatggactggcccgtactcctaccatgggctggctgcattgggagcggtttatgtgcaatctggattgccaggaggagcccgactcctgtatatccgaaaagctgttcatggagatggccgagcttatggtctcagaaggctggaaggacgcaggatatgagtatttgtgcatcgacgactgctggatggcccctcagagggactccgaggggcgtcttcaggcggacccacaaaggtttccacatgggatcagacagttggcgaactacgttcacagtaaagggttgaagctgggtatctatgccgacgtgggcaataagacatgtgccggtttccccgggtctttcgggtattatgatatcgatgcccagacctttgcagattggggcgtcgatctgttgaagttcgacggatgttactgtgacagtctggagaatctggcagacggctacaagcatatgagtctagctcttaatcggactggacggtctatcgtttattcatgtgagtggcccttatacatgtggccgtttcagaagccaaactacactgagatccgacagtactgtaatcactggcggaacttcgctgacattgacgactcctggaagtcaattaagtccattctagattggacctcgttcaaccaggagcggatcgtggatgtggccggtcctggaggatggaacgatcctgacatgctagtaattggtaacttcggtctgtcttggaatcaacaggtgacccagatggctctgtgggcaatcatggctgccccacttttcatgtcaaatgatctcaggcacatttctccccaggctaaagcattgctgcaagataaagacgtcatcgccataaatcaggatccacttggaaaacagggataccagctgaggcagggagataattttgaggtttgggagagaccactgtctggtcttgcttgggcagtcgctatgatcaaccggcaggaaattggtgggcctcgttcttatactatcgctgtcgcatcgctggggaaaggcgtcgcctgcaaccccgcatgttttataactcaactgctgccagtgaagcgaaagctaggcttttacgaatggacgagcagattaagaagtcacattaatccgacgggaacagtcctgctgcagctggaaaacaccatgcaaatgtctctcaaggatttgcta

SEQ ID NO: 12224 - DNA, 1287 bp, synthetic construct
  misc_feature 1..1287: note = source = /note="Description of Artificial Sequence: Synthetic coding sequence"
  source 1..1287: mol_type = other DNA
atgcagctgcgcaatccagagttgcacctgggttgcgctctggcccttcgcttcttggcactcgtgagctgggacattcctggagcaagggccctggataacggtctggctcgaacgcctactatgggctggctacactgggagcggtttatgtgcaatctggactgccaggaggagccagactcatgcatttctgaaaaactgttcatggaaatggctgagctgatggtttctgagggctggaaggacgcgggttacgaatatctgtgtattgacgactgctggatggccccacagcgtgacagcgaaggtcgcctgcaggctgaccctcagcggttcccacatgggattcgccagctggcgaactacgtccatagcaaaggtctcaaactgggtatttatgcagacgtcggcaataagacctgcgctggttttccaggcagctttggctattatgatattgatgctcagacctttgctgattggggagtcgatttgctaaagtttgatggttgctactgcgacagcctggaaaatttggcggacggctataaacacatgagcctggcgctcaatcgcaccgggcgcagcatcgtctacagctgcgagtggccactgtacatgtggcccttccaaaagcctaactatacggagatcagacagtactgtaaccattggagaaacttcgcagacatagacgactcttggaagtccatcaaatcgattctggactggaccagctttaaccaagaacgtattgttgacgtggccggcccgggtggttggaatgaccccgacatgctggtgatcggcaactttggcctgagttggaatcagcaagttacccagatggcgctatgggctatcatggcggcaccactgtttatgtccaatgacctgcgccacatctcccctcaggcaaaggcactgttgcaggacaaggacgtcatcgccattaaccaggaccctctgggaaaacagggctatcaactgcggcaaggcgataatttcgaggtctgggaacgtccgctgtcaggcctggcatgggccgtggcgatgattaacagacaagagatcggcggccctcgctcctacaccattgccgtcgctagcctgggcaagggtgtggcttgcaatcctgcctgcttcatcacgcaattactgcccgtgaaacgcaaattgggattctatgagtggaccagcagactgcgctcccacatcaaccctactggtaccgttctgctacagctggaaaatactatgcaaatgagtctgaaggatctgctg

SEQ ID NO: 12225 - DNA, 1287 bp, synthetic construct
  misc_feature 1..1287: note = source = /note="Description of Artificial Sequence: Synthetic coding sequence"
  source 1..1287: mol_type = other DNA
atgcagttgcgtaacccagaactgcacctcggctgtgcgctggccttgcgatttctggctctggtgtcctgggacatccctggagcccgagcgctggataatgggctcgcccgcactcccaccatgggttggctccactgggagcggttcatgtgtaacctggattgccaggaagaaccggatagctgtatcagcgaaaaactgttcatggaaatggccgagctcatggtgtcggaaggttggaaggatgccgggtacgagtacctctgtatcgacgactgctggatggcgccgcaacgggactccgaaggaaggttgcaagctgacccgcaacggttcccgcacggtatccgccagctcgctaactacgtgcactcgaagggactcaagttgggaatctacgcagatgtgggcaacaaaacgtgcgccggcttcccggggtcatttggctactacgatattgatgcccaaacttttgcggactggggagtcgacctgctgaagttcgacggctgttactgtgatagcctggaaaacctggcggatggttacaagcatatgagtctggcccttaaccgcactggacgctccatcgtgtactcctgcgagtggcctctctacatgtggccattccaaaaaccgaactataccgagatccgccagtactgcaaccattggaggaattttgctgacattgatgactcgtggaaatccataaagtcgatcctggattggacttcgttcaatcaggaaaggattgtggatgtcgccggtccggggggatggaatgatccagacatgctcgtcatcggcaattttggcctttcgtggaatcagcaagtgacccagatggctttgtgggccatcatggctgctccgctgttcatgtccaacgatctgagacacataagcccccaagcgaaggcactgctgcaggacaaggacgtaatcgccatcaatcaagatccgctgggaaagcagggatatcagctgagacagggggacaacttcgaagtgtgggaacgcccgttgagcggactggcttgggccgtggccatgatcaaccggcaagagatcgggggcccacgcagctacaccatcgcagtggcatcactggggaaaggggtggcctgcaacccagcctgcttcatcactcaactgctgccagtcaagcgcaagctcggattctacgaatggacttcgagactccggtcgcatatcaatccgaccggcaccgtgttgctgcagctcgagaacactatgcagatgagcctgaaagacctcttg

SEQ ID NO: 12226 - DNA, 1287 bp, synthetic construct
  misc_feature 1..1287: note = source = /note="Description of Artificial Sequence: Synthetic coding sequence"
  source 1..1287: mol_type = other DNA
atgcagctgcgcaacccggagctgcacctcgggtgcgctctcgcactgcggtttcttgccctggtgtcttgggatatcccgggtgcccgcgcactcgataatggcctcgcccggaccccgactatgggctggctccattgggaacgctttatgtgcaacctcgactgtcaggaggaaccggatagctgcatctcagagaagttgttcatggaaatggcggaactgatggtgtcagaaggttggaaggacgcaggatacgagtacctttgcattgatgactgttggatggccccacaacgcgacagcgaaggacgcctccaggcagaccctcagcgattcccgcacggaatccggcaactcgccaactacgtacattcgaagggactgaaattgggaatatacgccgacgtgggcaacaagacctgcgcgggattccccggctccttcggatactacgatatcgatgcccaaacttttgcagactggggagtggacctgttgaagttcgacggatgctattgcgatagcctggaaaacctggcggatggatacaagcatatgagcctcgcactcaatagaaccggacggtcgatcgtctactcgtgtgagtggccgctgtacatgtggccatttcaaaagccaaactacaccgagatccgacagtattgcaatcactggcgaaacttcgcagacatcgacgactcgtggaaaagcatcaagtccatcctggactggactagcttcaaccaggaaagaatcgtcgacgtcgcaggccccggcgggtggaatgacccagatatgttggtgatcggaaacttcggcctctcctggaaccaacaggtgacccaaatggcgttgtgggccatcatggcagccccccttttcatgagtaacgacctgcgccacatctcaccccaggccaaagctctcctgcaggacaaagacgtgatagctattaaccaggatcctctcggtaaacagggctaccaactccggcaaggggacaacttcgaagtctgggaacgtccgttgagcgggctggcttgggcggtggctatgattaacagacaagagatcggaggccctaggtcatacacgatcgcggtggcatcgctcggaaagggtgttgcttgcaatcctgcctgtttcattactcagctgctgccggttaagcggaagttgggattttacgagtggacttcaaggctgcggagccatatcaatccaactggaactgtgctccttcaactcgagaatacgatgcagatgtccctcaaggatctgctc

SEQ ID NO: 12227 - DNA, 1287 bp, synthetic construct
  misc_feature 1..1287: note = source = /note="Description of Artificial Sequence: Synthetic coding sequence"
  source 1..1287: mol_type = other DNA
atgcaacttaggaacccggaacttcaccttggttgtgcgctggcactccgatttctcgcactggtgtcctgggacattccgggtgcgcgtgctcttgataatggccttgcacgcacccctaccatgggttggctgcactgggaacggtttatgtgtaacctggactgtcaggaagaaccagacagctgtatttcggaaaagctgttcatggagatggcggagctcatggtgtcggaagggtggaaggatgccggatacgaatacctttgtattgatgattgttggatggcaccccagcgcgactccgaaggccggttgcaagcagaccctcaacgcttcccccatgggataaggcaactcgcaaattacgtgcattcgaagggactgaagctgggaatctacgcagacgtgggaaacaagacttgcgcaggattcccaggatcatttggctactatgatatcgatgcccaaacctttgccgactggggagtggacctgctcaaatttgatggttgttactgcgattcccttgagaacctggctgacggttataagcacatgtccctggcccttaatcggaccggtagaagcatagtctactcatgcgaatggccgctttacatgtggcctttccaaaagccaaattacactgaaataagacaatactgtaaccactggcgcaacttcgcggacatcgatgattcgtggaagtcgatcaagtcaattctggactggactagtttcaaccaagagaggattgtggacgtggcgggtcctggggggtggaatgaccctgatatgctggtgatagggaactttgggctttcgtggaaccaacaggtgactcaaatggccctgtgggcaataatggcagcccctctgtttatgtcgaacgatttgaggcatatttcacctcaggcaaaggcgcttctgcaagataaggatgttatcgcgattaatcaagaccctctcggaaagcaaggctaccagctgagacagggagataacttcgaagtctgggaaagaccattgtcaggattggcatgggcggtggccatgattaatcgacaagagatcggtggacctcggtcgtacaccattgccgtcgcaagcctgggaaagggcgtggcctgtaacccagcctgctttatcacccaactgttgcccgtgaagcgcaaacttggcttttacgaatggacctcaaggctgcgctcccatatcaatcccaccggaaccgtgctgcttcagctggaaaacaccatgcaaatgtcgcttaaggatcttctt

SEQ ID NO: 12228 - DNA, 1287 bp, synthetic construct
  misc_feature 1..1287: note = source = /note="Description of Artificial Sequence: Synthetic coding sequence"
  source 1..1287: mol_type = other DNA
atgcagctccggaaccctgagctccacctggggtgtgccctcgccctgaggttcctggccctggtcagttgggacattcctggcgcccgcgctctggacaacgggcttgcgaggacacctaccatgggttggctccattgggagaggttcatgtgtaatctggactgtcaagaagagcccgactcttgcatcagcgagaagctttttatggagatggcagaactcatggtttcagaggggtggaaagatgccgggtacgaatatctttgcattgatgactgctggatggccccgcagagagactccgagggccgactgcaggcagacccccagagatttccccatggcatcagacagctggcgaattacgtccattccaaaggactgaaacttggaatctacgctgatgtgggcaacaagacctgtgccgggttccctggatcttttggctattatgacattgacgcccagacatttgctgattggggggtggatctgttgaaatttgatggatgttattgcgactcactggagaaccttgccgacggctataaacacatgagtcttgccctgaatcgaaccggacggtcaattgtatatagctgtgagtggcccctctacatgtggccctttcagaagccgaactataccgaaatccggcaatactgcaaccattggcggaacttcgctgatattgacgactcctggaaatctattaaaagtatcttggattggacttcgttcaatcaggaaaggatagtcgatgtagccggtccagggggatggaacgatcccgacatgctggtcatcgggaatttcggactgagttggaaccaacaagtcacgcagatggccctgtgggctatcatggctgctcctctctttatgagcaatgatttgcgacatatatcccctcaggctaaggctctgctgcaggacaaagacgtgatcgccatcaatcaggaccctctcggcaaacagggataccagttgcgccagggggacaatttcgaagtgtgggaacgccccctgagtggcctggcgtgggcagttgcaatgatcaacagacaagagattggtgggccgcgctcttatacgatcgccgtggcatctttaggaaaaggcgtagcctgcaatcctgcgtgctttatcacccagctgcttcctgttaagcgtaaattaggattctacgaatggacatccagactccggtcccacattaatcccactgggaccgttttgttacagctcgaaaataccatgcaaatgtccctgaaggacctgctg

SEQ ID NO: 12229 - DNA, 1287 bp, synthetic construct
  misc_feature 1..1287: note = source = /note="Description of Artificial Sequence: Synthetic coding sequence"
  source 1..1287: mol_type = other DNA
atgcaactgcgcaatccggaactgcacctgggctgtgctttggccctcaggtttctggccttggtgagctgggacataccgggagccagagctctggacaatggcctggcccggactccaacgatgggatggcttcactgggaacgatttatgtgtaacctcgactgccaagaagaaccggattcctgcatctcagagaaactattcatggagatggccgaactgatggttagtgaagggtggaaggacgcgggatacgaatacctttgcatcgacgattgctggatggctccccagcgggactcagaaggtcggctgcaggcagacccacagaggttccctcatggtatccgtcagctcgccaattatgtacacagtaaggggctcaagctgggtatttatgcagacgtaggtaataagacctgcgccggattcccgggaagcttcggatactatgatatagacgcccaaacctttgccgactggggcgtcgatttgttgaagttcgacggctgctactgtgactccctcgagaacctggcggatggctacaagcatatgtctctagcactcaacaggaccggcaggagcattgtctattcctgtgaatggccgctctacatgtggcctttccagaagccgaactatactgaaatccggcagtactgcaatcactggagaaatttcgcagatatcgatgacagctggaagtcaattaaatctatcttggattggacaagctttaaccaggaaagaatcgtcgacgttgctggccccggcggatggaacgaccccgatatgttggtcatcggtaatttcggactctcgtggaaccaacaggttacccagatggcactctgggcaatcatggcagcgcctctgttcatgtcaaacgacttgcggcacatttctcctcaagcgaaggccctgcttcaggacaaagacgtgatcgccatcaaccaggatccgctcggaaagcagggttatcagttaaggcagggggataatttcgaggtttgggaacggccactgtcaggactggcatgggcagtcgcaatgatcaatcgccaggagattgggggccctaggagttacaccattgctgtggcgagtctgggcaagggggtggcatgtaacccagcctgtttcatcacacagcttctgcctgtgaaacggaaattaggattctacgaatggacttctaggctgcggtctcacatcaacccaacagggactgtgctgcttcaactagaaaatacgatgcaaatgagtctaaaggacctgctg

SEQ ID NO: 12230 - DNA, 1287 bp, synthetic construct
  misc_feature 1..1287: note = source = /note="Description of Artificial Sequence: Synthetic coding sequence"
  source 1..1287: mol_type = other DNA
atgcagctaagaaatccggagcttcatctgggctgcgcgctcgcacttcggtttttggccttggtgagctgggacatccctggcgcacgagcgctagataatggcctggcaagaacaccaaccatggggtggttgcactgggagcgttttatgtgtaatcttgattgccaggaggagcccgactcctgtataagtgagaaactattcatggaaatggctgaactgatggtgagcgagggctggaaagacgctggctatgagtatctgtgtatagacgattgctggatggctccccagagagattccgagggccgactacaggctgatcctcagcgctttccccatggaattaggcaactagccaattatgttcattctaagggtcttaagctagggatatatgctgacgtaggcaataagacctgcgcgggcttcccaggctctttcggttactacgatatcgatgctcagacctttgccgactggggagtagatctcctgaagtttgatgggtgctattgcgactcacttgagaacctggcggacggatacaagcatatgagcctggccctgaaccgtaccggaaggagcatagtgtattcttgcgagtggccactgtacatgtggccattccagaaaccgaattatacagagattcgacagtactgcaatcactggagaaatttcgcagatatagatgactcttggaaatcaattaaatctatcctcgactggactagtttcaatcaggagagaatcgtggacgtggccggccctggcggctggaacgaccccgacatgctggtgatcggtaatttcggtctcagctggaaccagcaggttactcagatggcactttgggcgatcatggcggcccctttgtttatgtccaatgacctccgtcacatctcccctcaggctaaagccctgctccaagacaaggacgtgattgccatcaatcaggaccctctgggaaagcaggggtatcagctacgccaaggagataatttcgaagtgtgggagaggccgctctcagggcttgcatgggcagtcgcaatgatcaataggcaagaaattggcggcccacgctcatataccatcgccgtggcgtccttggggaagggtgttgcatgtaacccggcctgtttcattactcagctccttccagttaaacggaaattaggcttttatgaatggacatctagattgcgcagtcacatcaatcccactggtaccgtccttttgcagttggagaacaccatgcaaatgtcattaaaagatctgctc

SEQ ID NO: 12231 - DNA, 1287 bp, synthetic construct
  misc_feature 1..1287: note = source = /note="Description of Artificial Sequence: Synthetic coding sequence"
  source 1..1287: mol_type = other DNA
atgcagctccggaaccctgagctgcaccttggatgtgctttggcccttcgcttcctcgcgcttgtgtcatgggatatccccggtgcaagagcacttgataacggtcttgcacggacccccacgatgggatggctgcattgggaacggttcatgtgtaatctggattgccaggaggaaccagattcctgtatttccgaaaaacttttcatggaaatggcagagcttatggtgtcggagggctggaaggatgcaggatatgaatatctttgtattgatgactgttggatggcaccgcaacgcgactcggagggtcgccttcaggccgaccctcaacgttttccacacggaatcagacaacttgcgaactacgtgcactcgaaggggctcaaactcggtatttacgcagatgtgggtaataagacttgcgcaggtttccctggttcctttggttattacgatatcgatgctcaaacctttgccgattggggtgtggatctgctgaaatttgacgggtgctactgcgactcattggagaatctggctgacggctacaaacatatgagccttgcacttaacagaacgggacgctccatagtgtactcgtgtgaatggcccctctacatgtggccattccaaaagccaaactacaccgaaattcgccagtactgtaaccattggcgtaacttcgcggacattgatgattcgtggaaatcgatcaaaagcatacttgactggacctcgtttaatcaagaacgaattgtggatgtggccggtcctggcggttggaatgacccagatatgctggtcatcggaaactttgggctgtcatggaatcaacaggtcactcaaatggctctgtgggcaattatggcggcgcctttgtttatgtccaatgatctgcgacatattagcccacaagctaaggcactcttgcaggataaggacgtgattgccatcaaccaagatccgctgggtaaacaaggctaccagcttcggcaaggtgacaatttcgaagtctgggaacgccctctgtccggtcttgcctgggcagtggcgatgatcaacagacaagaaatcgggggtccccgttcgtatactatcgcagtggcctctctgggtaagggagtcgcatgtaacccagcatgcttcatcactcaactgcttccagtcaagcggaagctgggtttttacgagtggacctctcgactgcggtcacatatcaacccgactgggactgtgctcctgcaacttgagaataccatgcagatgtcccttaaggacttgctc

SEQ ID NO: 12232 - DNA, 1287 bp, synthetic construct
  misc_feature 1..1287: note = source = /note="Description of Artificial Sequence: Synthetic coding sequence"
  source 1..1287: mol_type = other DNA
atgcaactgaggaacccggaactccacctggggtgcgctctggctttgcgatttctggcgctcgtgagctgggatatcccgggggccagagcactcgataatggcctcgctagaactcctactatggggtggcttcattgggaacggtttatgtgcaatctggactgtcaggaggagccagattcttgcatttcagaaaaacttttcatggagatggctgagcttatggtctctgaaggatggaaagatgcgggatatgagtatctgtgcatcgatgactgttggatggcacctcaacgagacagcgaggggcgcctccaggctgaccctcagcggtttcctcacggtattcgccagttggcgaattacgtgcatagcaagggcctcaagctgggtatctacgccgacgtaggtaacaagacatgtgcaggattcccagggtcttttggttactatgacatcgacgcccagaccttcgccgattggggtgtggatctgctgaaatttgatggttgttactgtgacagcttggaaaacctcgcagatgggtacaagcacatgagtctggccctcaaccggacaggaagaagcattgtgtacagttgcgagtggccgctgtatatgtggccgtttcagaagcccaattatactgagattagacagtactgcaaccattggagaaatttcgcggatatcgatgattcatggaagtccatcaagagcattctggattggacaagctttaatcaggaacggattgtggatgtggctggcccgggaggctggaacgacccagatatgcttgtaatcggcaactttggcctgagctggaaccagcaggtgacccagatggccctgtgggctataatggctgctccactgttcatgtcaaacgatctgcgccacatcagccctcaggctaaggctctgcttcaggacaaggacgttatcgccatcaatcaggatccactgggaaaacaggggtaccagctgagacaaggggataacttcgaagtgtgggagcgcccgctctccggactcgcgtgggctgttgcgatgatcaatcgacaggaaatcggcgggcctagatcttacacgatcgctgtagcttcattggggaagggggttgcatgtaatccagcctgcttcatcactcaactgttgcccgtgaagcgcaagctggggttctacgaatggaccagcagactgcggagtcatatcaaccccactggcactgttctgttgcagctggaaaatacaatgcaaatgagtctgaaagacttgctg

SEQ ID NO: 12233 - DNA, 1287 bp, synthetic construct
  misc_feature 1..1287: note = source = /note="Description of Artificial Sequence: Synthetic coding sequence"
  source 1..1287: mol_type = other DNA
atgcagcttcgaaatcctgagcttcaccttggatgcgctctcgcccttcgattcctcgcgctggtgtcttgggatatcccaggggcacgggcactggacaatggactcgcgcgtactccgactatgggatggctccattgggaacgatttatgtgtaatctcgattgtcaagaagaaccagattcctgcatcagcgaaaaactttttatggagatggctgagttgatggtgagtgaaggctggaaagatgctggctacgaatacctgtgtattgatgattgctggatggctccgcaacgggattcagaaggacgtcttcaagccgatcctcaaagatttccgcatggaataaggcagcttgccaattatgtacactcaaagggactgaaacttggtatttacgctgatgtaggtaataagacatgcgcaggattccctggatccttcggttattatgacatcgatgctcaaacctttgctgattggggagtcgatctcctcaagtttgatggctgctactgtgactccctcgagaatctcgctgatggctacaaacatatgagtctcgccctcaatcggacaggccgtagtatagtctatagttgcgaatggcctctgtatatgtggcctttccaaaaaccaaactatactgaaataagacagtactgcaatcattggaggaacttcgctgatatagacgattcgtggaagagcatcaagagtattctagattggacatcattcaaccaagaaagaattgttgacgtagctggtccaggaggatggaatgatccggatatgttagttattggtaattttggattgtcatggaatcaacaggtgacccaaatggcgctttgggctatcatggcagcccctctctttatgtctaatgatcttcggcatatttcgccacaagcaaaggcactcctacaagataaagatgtgattgctatcaatcaagatccactgggaaagcaaggatatcagctccgtcaaggagataacttcgaggtttgggaaagaccactgagtggactggcttgggccgttgccatgattaaccgccaagagattggaggtccgcggtcgtacacaatcgcagtggcttcactcggaaaaggtgtcgcttgtaatccggcgtgtttcatcacacaactacttccagtgaagcgaaagcttggtttttacgaatggacgtcacgtttgagatctcatatcaatccaactggtacagtcctcttacaattggaaaacaccatgcaaatgtcattaaaggatttactt

SEQ ID NO: 12234 - DNA, 1287 bp, synthetic construct
  misc_feature 1..1287: note = source = /note="Description of Artificial Sequence: Synthetic coding sequence"
  source 1..1287: mol_type = other DNA
atgcaacttagaaacccagagctgcacctgggctgcgccctggcgctgcgcttcctggcgcttgtgtcatgggacatcccaggcgcccgggccctggataatgggctggcccgcactccgactatgggatggttgcactgggaaagatttatgtgcaatctggactgccaggaagaacctgattcgtgtatctcggagaagctgtttatggagatggctgaacttatggtgtcagagggatggaaagacgctggatacgaatacctgtgcatcgacgattgctggatggccccgcagcgcgactccgaagggcgcctccaggccgatcctcaaaggttcccgcatggaatccggcagctggccaactacgtccattcaaagggcttgaagctcggaatttacgcggacgtgggaaacaagacttgtgcgggatttccaggatccttcggctactacgatattgatgcgcaaaccttcgcagactggggggttgaccttctcaagttcgacggctgctactgtgattcgcttgagaatctggccgatgggtacaaacacatgagcctcgcactcaacaggactggacggtcgatcgtctacagctgtgagtggccgctgtacatgtggccgttccagaaacccaactacaccgagatccggcaatactgcaatcactggagaaactttgccgatatcgacgacagctggaagtccatcaaatccatcctcgactggaccagcttcaatcaggagaggattgtggatgtggcaggcccaggcgggtggaatgacccagacatgctcgtcatcggaaacttcggtctgtcctggaaccagcaagtcacccagatggcgctctgggctatcatggccgccccgctgttcatgtctaatgacctccggcacatcagccctcaggctaaggcgctgctgcaggacaaggacgtgatcgctataaaccaagatcccctcggcaagcagggatatcaactgcggcagggagataatttcgaagtctgggaacgcccgctgtcaggtctggcgtgggccgtggctatgatcaacagacaagaaatcggaggaccccgctcgtacactatcgcagtggcatcgttgggtaagggtgtggcctgcaaccctgcatgcttcatcacccagttgctcccggtgaagcgaaagctgggattttatgagtggacctcacgcttgcgttcgcatattaacccgacgggaacggtgctcctgcagctcgaaaacaccatgcagatgtccctgaaagacctgctc

SEQ ID NO: 12235 - DNA, 1287 bp, synthetic construct
  misc_feature 1..1287: note = source = /note="Description of Artificial Sequence: Synthetic coding sequence"
  source 1..1287: mol_type = other DNA
atgcaactcaggaaccctgaactgcatctgggctgtgcactggcactgcgttttcttgccttggtgtcctgggatatccccggcgcacgggctctggataatggacttgcccgtaccccaaccatgggatggctccattgggagagattcatgtgtaacctggattgccaggaggaacccgactcgtgtatatcagaaaagctgtttatggaaatggcggagctcatggtatccgaaggctggaaggacgcaggttacgagtacctgtgcattgacgactgttggatggccccacaacgggactccgaaggccgcctgcaggcagacccccaacgatttccacatggaattagacagcttgccaattacgtgcactcaaaaggtcttaaactggggatctacgcagatgtcggaaataagacctgtgcaggttttccagggtcgttcggatactacgacattgacgcacagacctttgcagattggggagtggatctcctcaagttcgacggttgctactgtgatagcctcgaaaacctcgcggatgggtacaagcacatgtctcttgccctcaaccgtactggacgctcaattgtctactcgtgtgaatggccactgtacatgtggccatttcaaaagccaaactacacggagatcagacaatactgcaatcattggaggaactttgccgatattgacgatagctggaaatcgatcaagtcgatccttgactggacctcgttcaaccaggagcgaatcgtggatgtggcgggtcctgggggttggaatgatcctgatatgttggtgatcggtaactttgggctgtcatggaatcaacaggttacccagatggccttgtgggccatcatggccgcaccactgtttatgtccaacgatctgcgccatataagccctcaggcgaaggcactgctgcaagataaggacgtgattgccatcaaccaagaccctcttggtaagcaaggttatcagctccgtcaaggagataacttcgaagtgtgggaacgtcctctttcgggactcgcatgggcagtggccatgatcaatagacaggaaattggaggacctcggtcgtacaccatcgcagtggcttcccttggtaaaggcgtggcctgcaatccggcatgtttcattactcaactccttcccgtgaagcgcaaactgggattctacgagtggacttcacgtcttagaagccacattaatcctaccggaacggtgttgcttcaactggaaaataccatgcagatgagcctgaaggacctgctg

SEQ ID NO: 12236 - DNA, 1287 bp, synthetic construct; identical to SEQ ID NO: 12215
  misc_feature 1..1287: note = source = /note="Description of Artificial Sequence: Synthetic coding sequence"
  source 1..1287: mol_type = other DNA

SEQ ID NO: 12237 - DNA, 1287 bp, synthetic construct
  misc_feature 1..1287: note = source = /note="Description of Artificial Sequence: Synthetic coding sequence"
  source 1..1287: mol_type = other DNA
atgcagcttcgtaaccctgagcttcacctcggatgcgccctggcgctccgtttcctagctctcgtctcttgggatattccgggtgcacgggccctggacaatgggttggcccggacccccactatgggatggctccattgggaacgcttcatgtgcaatctcgattgccaggaggaacctgacagctgcatctctgagaagctgtttatggaaatggctgagctgatggtgtccgaggggtggaaggatgccggctacgagtacctgtgcatcgatgattgctggatggcacctcagagggattcagaaggacggcttcaggctgacccgcagcgatttcctcacgggatccggcagttggctaactatgtccactctaaaggtcttaaactggggatctatgctgatgtcggtaacaagacatgcgcaggctttcctggaagtttcgggtattatgacatcgatgcgcagactttcgcagattggggcgtggacttgctgaagttcgatgggtgttattgcgactcactcgagaacctggccgacgggtataagcatatgtccctcgccctaaatcgtacaggtaggagcattgtctactcctgcgaatggcctctgtacatgtggcctttccagaagcctaattacacagagatcaggcagtactgtaatcactggcggaacttcgcagacatagatgatagctggaagagcatcaagtcaatccttgattggacttcttttaatcaggaacgcatagtagacgtggccggcccagggggatggaacgaccctgacatgctagtgattgggaatttcggtcttagctggaatcagcaggtgacgcagatggccctgtgggccatcatggcagctccgctgttcatgagtaatgatttgaggcacatctctccgcaagccaaggccctgctacaggataaggatgtgatagctataaaccaggatccgttggggaagcagggttaccagctccgtcagggggataacttcgaagtgtgggaaaggcctttgagcgggttagcatgggccgtggcaatgatcaaccgccaggagatcggcggacccagatcttatactatcgctgtggcctccttagggaaaggagtcgcctgtaatccagcctgcttcatcacacagctgctgcctgtaaagcgtaagctcggtttttatgagtggacctccaggctcagatcacatatcaatcctactggcacagtgctgctgcagctcgaaaacactatgcagatgtcacttaaggatttactt

SEQ ID NO: 12238 - DNA, 1287 bp, synthetic construct
  misc_feature 1..1287: note = source = /note="Description of Artificial Sequence: Synthetic coding sequence"
  source 1..1287: mol_type = other DNA
atgcagctgcgtaacccggaacttcatctgggatgcgcacttgcacttaggttccttgcacttgtctcttgggacattcctggcgcccgagctcttgataacggtcttgcgagaactcctaccatgggttggctccattgggaaagatttatgtgtaatctcgattgtcaagaagagcctgactcgtgcatttccgagaagctctttatggaaatggcagaactcatggtgtcagaaggctggaaagatgcaggttacgaatacctgtgtatagatgactgttggatggcaccgcagcgggacagcgaaggaagattgcaggcggatcctcaaagattccctcatgggatacgacaacttgcaaattacgtgcattccaagggtcttaagctgggcatttacgcagatgtgggtaataagacttgtgcgggctttcctgggagctttggttactatgatattgacgcacagaccttcgccgactggggagtcgatctcctgaaatttgatggatgttactgtgactcgctggaaaaccttgcagatggctacaagcatatgagcctggcgctgaacaggactggcagatcgatcgtgtacagctgtgaatggccactttacatgtggccgttccagaagccgaactacaccgaaatcaggcaatactgtaaccactggaggaacttcgcagacatagatgactcatggaagtcgataaagtcgattttggattggacctccttcaaccaagaacggatcgtggatgtggctggacctggtgggtggaacgatccagacatgcttgtgattgggaacttcggactgtcctggaaccaacaagtcacccaaatggccctttgggcaatcatggcggccccactctttatgtcaaacgatctgagacatatctcaccacaggccaaggcccttcttcaagataaggacgtcattgcaataaaccaggaccctcttgggaagcaaggctaccaactccgccaaggagataacttcgaggtctgggagcggcccttgagcggtcttgcttgggcagtggcaatgattaacagacaggagattggcggtcctcggagctacactattgcggtagcatcccttggaaaaggcgtcgcatgtaatcccgcctgtttcattactcagcttttgccagtgaagcgaaagctgggattttacgaatggacctcccgcctccgctcccacatcaaccccaccggtaccgtgcttctgcagttggagaacaccatgcaaatgtcgctgaaggatctgctg

SEQ ID NO: 12239 - DNA, 1287 bp, synthetic construct
  misc_feature 1..1287: note = source = /note="Description of Artificial Sequence: Synthetic coding sequence"
  source 1..1287: mol_type = other DNA
atgcaattacgtaatccagaattgcatcttggatgtgctcttgcacttagatttttagcacttgtatcatgggatattccaggtgcacgtgctttagataatggtcttgctagaacaccaactatgggttggctacattgggaaagatttatgtgtaatttagactgtcaagaggaaccagattcgtgtataagtgaaaagctttttatggaaatggctgaattaatggtttctgaaggttggaaagatgctggttatgaatatttgtgtattgacgattgttggatggcaccacaacgagactcagaaggtcgtttacaagcagatccacaacgttttcctcatggtatcagacaattagctaattatgttcattctaaaggtttaaaattgggaatttacgcagatgttggaaataaaacatgcgcaggattccctggatcatttggatattacgacattgatgcacaaacttttgctgattggggtgtagatttacttaaatttgatggttgttattgtgattcattagaaaatcttgctgatggatataaacatatgtcattagcattaaatagaactggacgatccatagtctattcatgtgaatggccattatacatgtggccatttcaaaaacctaactatacagaaatcagacaatattgcaatcattggaggaatttcgcagatattgatgattcatggaaatcaattaaatctattcttgactggacttctttcaatcaagagagaattgtagatgtggcaggacctggaggttggaatgatccagatatgttagttattggaaattttggattatcatggaaccaacaagttacacaaatggctttatgggcaattatggcagctccattatttatgagtaatgatcttagacatatttctccacaagctaaagcacttttgcaagataaagatgttattgcaattaatcaagatccattaggaaaacagggatatcaacttcgtcaaggtgataattttgaagtttgggaaagacctctttcaggattagcttgggcagttgctatgattaatagacaagaaataggaggaccaagatcttatacaatagctgtagctagtttaggtaagggagttgcatgcaaccctgcatgtttcattactcaacttttaccagtaaagagaaaattaggattttatgaatggacttcaagacttagaagtcatattaatccaactggaactgttttattacaacttgaaaatactatgcaaatgtcacttaaggatcttttg

SEQ ID NO: 12240 - DNA, 1287 bp, synthetic construct
  misc_feature 1..1287: note = source = /note="Description of Artificial Sequence: Synthetic coding sequence"
  source 1..1287: mol_type = other DNA
atgcagctacgcaatccagagctgcatttggggtgcgcactggcattgcgcttcctagcattggtgtcttgggacatccccggcgctcgcgcgctggataatggattggccaggacccccaccatggggtggttacattgggaaaggttcatgtgcaacttggattgtcaggaggaacccgatagctgcatttccgaaaagctgttcatggaaatggcagagttaatggtaagcgagggctggaaggacgccggctacgaatacctgtgcatagacgattgctggatggccccccagcgggattcagaaggcaggctccaggctgatccgcaacgttttccgcacggcatcaggcagcttgcaaactacgtgcacagcaaaggtcttaagctgggtatttatgctgacgtggggaataagacctgcgctggctttccgggctcctttgggtactatgatatcgacgcccagactttcgccgactggggggtagacctcctgaaattcgacggctgttactgcgactccctggaaaacctcgctgacggttacaagcacatgagcctggctctgaacaggacgggacgctcaatcgtatatagctgcgagtggccactttatatgtggccctttcagaaaccaaactataccgagatccgccagtattgtaaccactggagaaactttgcggatatcgacgactcttggaaatctattaagtccatactggactggacgtccttcaaccaggaacgcatcgtggatgtggctggcccgggaggatggaacgaccctgatatgctggttattgggaacttcggcctgtcatggaaccagcaggtcactcagatggccctctgggccataatggccgcccctctgttcatgtccaacgacctgcgccacatctccccccaggctaaagccttgcttcaggataaagatgtcattgcaatcaaccaagaccctttaggaaagcagggctatcagctgagacagggagataatttcgaagtttgggaaaggcccctaagcggcttggcctgggccgtagctatgataaatcggcaagaaatcggcggccctcgatcatacacgatcgctgtggcttctctcggcaagggcgttgcgtgcaaccctgcgtgcttcattactcagcttctgcccgtcaagcggaaactgggattttatgagtggaccagtagactgcggtcccacatcaaccctaccggcacggtccttctccaattggaaaatacaatgcagatgtccctgaaggacctcctg

SEQ ID NO: 12241 - DNA, 1287 bp, synthetic construct
  misc_feature 1..1287: note = source = /note="Description of Artificial Sequence: Synthetic coding sequence"
  source 1..1287: mol_type = other DNA
atgcagttgcgcaaccctgagttgcacctgggttgcgccctggccctaagattcctcgctcttgtgagttgggatattccaggagcccgggctttggacaacggacttgctcggacacccacaatggggtggctgcactgggagaggtttatgtgcaatttagattgtcaggaggaaccagattcgtgcatcagcgagaaactgtttatggagatggcagaattaatggtgtcagaaggctggaaagacgccgggtatgagtatctctgcattgacgactgctggatggccccacagagggattcagagggcagactacaggcagacccccaaaggttcccgcatgggattcgacaactggcgaattacgtgcattcaaaggggctgaagttggggatttatgctgacgtgggcaacaagacctgcgcaggattccctgggagtttcggctactatgatatcgacgcacaaactttcgcggattggggggtagacctcctcaagttcgatggatgctattgcgactcccttgagaacctcgccgatgggtacaaacatatgagcctcgctttgaaccgcactggcagatccatcgtttacagctgtgaatggccactttacatgtggcccttccagaagcccaattatacagaaattcgtcaatattgcaaccactggaggaattttgctgacatcgatgatagttggaaatccatcaaatccatcctggactggacatcctttaaccaagagagaatcgtcgacgtggcagggccgggaggatggaacgatcctgacatgctggtgatcggcaattttggtctgtcttggaatcaacaggtcactcagatggccttgtgggcaataatggccgcaccactctttatgagtaacgacctgcgccacatctccccccaggccaaggccctgctccaggataaggatgtcatcgctataaaccaggaccccctgggtaagcaaggatatcagcttcgccagggagataattttgaagtctgggaacgacctctctcgggactggcctgggcggtggccatgattaacaggcaggagatcggagggccccggtcctacaccatcgccgtggcgtcactgggcaaaggggtcgcctgcaaccctgcctgctttatcacccagttacttcccgtgaaacgtaaattgggattctatgaatggacgtcccgattgcgatcacatatcaatcctactggtaccgtgttgcttcagctggaaaacactatgcaaatgtccctgaaggacttactt

SEQ ID NO: 12242 - DNA, 1287 bp, synthetic construct
  misc_feature 1..1287: note = source = /note="Description of Artificial Sequence: Synthetic coding sequence"
  source 1..1287: mol_type = other DNA
atgcagctgaggaacccggaactccatctggggtgcgccctcgcactgcggttcctggcgctcgtgagctgggacatcccaggagcgcgtgccctggacaacggactggcgcgcactccgactatgggatggctccattgggaacgcttcatgtgcaaccttgattgtcaggaggaacctgactcctgtatttcagaaaagctgttcatggagatggcggaactcatggtgagcgaaggttggaaggatgcggggtatgaatacctctgcatcgatgattgctggatggccccacaacgcgactccgagggtagactgcaggccgatccacagcgcttcccgcacgggattcgccagctcgccaattacgtccattccaaagggctcaaacttggcatttacgcagacgtcggtaacaagacttgcgctgggttccctggatcgttcggatactacgatatcgacgcgcaaaccttcgccgactggggagtggacctcctgaagttcgacggatgctactgcgacagcctggagaatctggcagatggatataaacacatgtccctggcgctgaaccgtaccggtcgcagcatcgtctactcatgcgaatggcctctgtacatgtggccgttccagaagcctaactacacggagattcggcagtactgtaaccattggagaaacttcgccgatatcgatgactcctggaagtcgatcaagtccatcttggactggacctcattcaatcaagagcggattgtggacgtcgcagggccaggtggatggaatgacccggatatgctggtcattggcaatttcggcctgtcgtggaatcagcaggtcacccagatggccctgtgggccatcatggcagcgccgctcttcatgtccaatgacctcagacacatctcaccccaagcgaaggctctgctccaggataaagacgtgattgcgatcaaccaagatccgctgggaaagcaaggataccagctgcggcagggcgacaacttcgaggtctgggagcggccactttcgggactggcgtgggctgtcgcgatgatcaacagacaggagatcggagggccacgcagctacactatcgccgtggctagcctgggaaagggagtggcgtgtaatccagcctgctttatcactcaactgctcccggtgaagcggaaactcggattctacgaatggacctcaaggctccggtcccatatcaatccgactggtactgtgcttctgcaacttgagaatactatgcagatgtccctgaaggaccttctg

SEQ ID NO: 12243 - DNA, 1287 bp, synthetic construct
  misc_feature 1..1287: note = source = /note="Description of Artificial Sequence: Synthetic coding sequence"
  source 1..1287: mol_type = other DNA
atgcaactccggaaccccgaacttcacttgggatgtgccctggcgttgagatttctcgccctggtgtcgtgggatatacctggcgcacgcgcacttgataacgggttggcgcggactcctactatgggatggctgcattgggaacgcttcatgtgcaacctcgattgtcaggaggaacctgactcgtgtatctccgaaaaacttttcatggagatggctgaacttatggtgtccgaagggtggaaggatgcaggctacgagtatctgtgtatcgatgattgctggatggccccccagagagacagcgaaggacgacttcaggcagacccccaaagattcccccacggaattagacaactggctaactacgtccattccaagggtttgaagctgggcatttacgcggatgtgggaaataagacgtgcgctggctttcctggtagctttggatactacgatattgatgcacaaacctttgctgactggggcgtggatctccttaagtttgacggatgctactgtgattcgctcgaaaatcttgcagatgggtacaagcatatgtccctcgcattgaaccggaccggtcggagcattgtgtactcgtgtgagtggcctctgtacatgtggccgtttcagaaacccaactatactgaaatccgtcaatactgtaaccattggcggaattttgcagacatcgatgactcatggaagtcaattaagtcaattcttgattggactagctttaaccaggaaagaattgtggatgttgcaggcccaggaggctggaacgaccctgatatgcttgtgataggaaactttgggctctcatggaatcagcaagtgacccaaatggcactctgggcaattatggccgctccactgttcatgtccaatgacctccgccacatttcgcctcaggcaaaagcactgcttcaggacaaggatgtgatcgccattaaccaagatcccctcgggaaacaaggctatcaactgcgtcagggtgataactttgaggtgtgggaaaggcctctgtccgggctggcatgggccgtggcaatgattaacagacaagaaataggtgggcctaggtcgtacacgatagctgtcgcatcactcggaaagggcgtcgcatgtaatccagcatgcttcatcacccaacttctccctgttaaaagaaaacttggcttctacgaatggacctcccgcctcagatcacatatcaacccaaccggaacggtgcttctccaactggaaaatactatgcaaatgagccttaaggaccttctt

SEQ ID NO: 12244 - DNA, 1287 bp, synthetic construct
  misc_feature 1..1287: note = source = /note="Description of Artificial Sequence: Synthetic coding sequence"
  source 1..1287: mol_type = other DNA
atgcaacttcgcaacccggaactgcatctcggatgcgccttggccttgcgctttcttgccctcgtgtcgtgggatattccgggggcgcgcgctcttgacaatggcctggcccgtactccgactatgggatggctgcactgggaacgattcatgtgcaacctcgactgtcaagaagagccagatagctgcattagcgagaaactctttatggagatggccgaacttatggtgtccgaaggatggaaggatgcgggatatgaatacctgtgcatcgacgattgctggatggcgccgcagcgggactcagaaggccggctccaggccgacccgcagcggttcccccatggcattcggcagctggccaactacgttcacagtaagggactgaagctgggtatctacgcagacgtcggaaataagacctgcgccggatttcctggatcattcggttactacgatatcgatgcgcagactttcgcggactggggcgtggatctgctgaaatttgacggctgttactgtgattcactcgagaatctcgcggacggctataagcacatgtccctcgcgctgaacaggaccggtcggtccatcgtgtactcgtgtgaatggccgctgtacatgtggccattccaaaagccgaattacaccgaaatcagacaatactgcaatcactggagaaatttcgcagacatagacgattcttggaagtctatcaaatcgatcctcgactggacctctttcaaccaagagcgaatcgtggacgtggcggggcctggtggatggaacgacccggacatgcttgtgatcggcaatttcggcctgtcatggaatcagcaggtcacgcagatggcactctgggccatcatggccgctcctcttttcatgtcgaatgacctgagacacatcagcccgcaggcgaaggcattgctccaagacaaggacgtcatcgcaattaaccaggatcctctgggaaagcagggatatcagcttcgccaaggggataactttgaagtgtgggagcggccactctccggacttgcatgggctgtggccatgatcaacaggcaggaaatcggaggccctaggtcgtatactatagccgtcgcgtcactgggtaagggggtggcttgtaacccagcatgtttcatcacccaactgttgccagttaaacgtaaactggggttctatgagtggacctcacgcctgcgctcccatatcaaccccactggaaccgtcctgctgcaactcgagaacactatgcaaatgtcgctcaaggacctcctc

SEQ ID NO: 12245 - DNA, 1287 bp, synthetic construct
  misc_feature 1..1287: note = source = /note="Description of Artificial Sequence: Synthetic coding sequence"
  source 1..1287: mol_type = other DNA
atgcagctgcgcaatcccgagctgcatctgggctgcgcactggccctccggttcctcgccttggtttcctgggatataccaggagctcgggcactggacaatggactagcccgaactccgactatggggtggcttcattgggaacgctttatgtgcaatctggattgccaggaggagccagattcgtgtatctcagagaagctgttcatggagatggcagagctgatggttagcgagggatggaaggatgctgggtatgaatacttatgcatcgatgattgctggatggcccctcagagagattccgagggacgtctgcaagccgacccacagcgcttcccccatggaatcagacagctggctaactacgttcactccaaagggctgaagctgggaatttacgctgatgtaggcaacaagacttgcgcaggatttcccggctcatttgggtattacgacatcgatgcccagacgtttgctgactggggagttgatcttctcaaattcgacggatgttactgcgattccctggagaatctggctgatggttacaaacacatgagtttggctctcaatagaacaggacgttctattgtgtattcctgtgagtggccactgtatatgtggccttttcagaaacctaactatactgagatcagacagtattgcaatcactggaggaatttcgctgatattgacgacagttggaagtctatcaaaagtattcttgattggacctcatttaaccaagaacgcattgtcgacgtggccggacccggcggctggaacgaccctgatatgctggttattggaaacttcgggctgtcatggaaccagcaagtcactcagatggcattatgggcaattatggccgctcctctcttcatgagcaacgacctgaggcatatctccccgcaggctaaagccctcctacaggataaggatgtgatcgccattaatcaggaccccctgggcaaacagggataccagctccgccaaggagataattttgaagtgtgggagcggccactcagcggcctggcctgggcagtagcaatgattaaccgccaagagataggaggacccagatcttacaccatagctgttgcttcactgggtaaaggtgtggcctgcaatcccgcctgctttataactcaactcctaccagttaagcggaaactcggtttctacgaatggacgtcaagactgagatctcatatcaatcccaccggcactgtcctgctccagctggagaacaccatgcagatgtccttgaaggatctgtta

SEQ ID NO: 12246 - DNA, 1287 bp, synthetic construct
  misc_feature 1..1287: note = source = /note="Description of Artificial Sequence: Synthetic coding sequence"
  source 1..1287: mol_type = other DNA
atgcaactacgaaatccggaattacatttaggttgtgcgttagcgttacgatttttagcgttagtttcgtgggatataccgggtgcgcgtgcgctagataatggtctagcgcgaacgccgacgatgggttggttacattgggaacgatttatgtgtaatttagattgtcaagaagaaccggattcgtgtatatcggaaaaactatttatggaaatggcggaattaatggtttcggaaggttggaaagatgcgggttatgaatatctatgtatagatgattgttggatggcgccgcaacgagattcggaaggtcgtctacaagcggatccgcaacgttttccgcatggtatacgacaattagcgaattatgtacattcgaaaggtttaaaactaggtatatatgcggatgtaggtaataaaacgtgtgcgggttttccgggttcgtttggttattatgatatagatgcgcaaacgtttgcggattggggtgtagatttactaaaatttgatggttgttattgtgattcgttagaaaatctagcggatggttataaacatatgtcgttagcgctaaatcgaacgggtcgttcgatagtatattcgtgtgaatggccgctatatatgtggccgtttcaaaaaccgaattatacggaaatacgacaatattgtaatcattggcgtaattttgcggatatagatgattcgtggaaatcgataaaatcgatattagattggacgtcgtttaatcaagaacgaatagtagatgtagcgggtccgggtggttggaatgatccggatatgctagtaataggtaattttggtctatcgtggaatcaacaagtaacgcaaatggcgctatgggcgataatggcggcgccgctatttatgtcgaatgatttacgtcatatatcgccgcaagcgaaagcgctattacaagataaagatgttatagcgataaatcaagatccgttaggtaaacaaggttatcaactacgacaaggtgataattttgaagtatgggaacgtccgctatcgggtctagcgtgggcggtagcgatgataaatcgacaagaaataggtggtccgcgttcgtatacgatagcggtagcgtcgttaggtaaaggtgtagcgtgtaatccggcgtgttttataacgcaactattaccggtaaaacgaaaactaggtttttatgaatggacgtcgcgactacgatcgcatataaatccgacgggtacggttttattacaattagaaaatacgatgcaaatgtcgctaaaagatctatta

SEQ ID NO: 12247 - DNA, 1287 bp, synthetic construct
  misc_feature 1..1287: note = source = /note="Description of Artificial Sequence: Synthetic coding sequence"
  source 1..1287: mol_type = other DNA
atgcagcttcggaaccccgagctgcacctgggctgcgccctggctctgcggttcctggctcttgtatcttgggatatacctggtgctagggcattggataatggcttggctaggacacccaccatgggttggctgcactgggagcgctttatgtgcaatctggactgtcaggaagagcccgactcctgcatttctgagaagctgtttatggagatggctgaattgatggtaagcgagggttggaaggacgctgggtacgagtatctttgcatagatgattgctggatggctcctcaacgagatagcgaaggcagactccaagcagatcctcagcgctttcctcatggcattagacaattggctaattatgtgcacagtaagggcctcaagttgggaatctatgcagatgtgggtaataagacttgcgcgggtttcccaggaagcttcggctactatgatatcgacgcccagacttttgctgactggggcgtggacctccttaagtttgatgggtgctattgtgatagcctcgaaaatctggccgatggatataaacatatgtcactggccctgaaccgcaccggaaggtccatcgtgtactcatgtgagtggcctctctacatgtggccctttcaaaagcccaattataccgaaatccggcagtactgcaaccattggagaaacttcgctgatatcgacgacagttggaagtccatcaaatcaatcctggattggacaagctttaatcaggaacgcatagtcgacgtcgctggcccagggggatggaacgacccagacatgctcgtcatcgggaattttggactgagctggaatcagcaagtgacccagatggctctgtgggcaatcatggcggcgcccctctttatgagtaatgacctgaggcacataagccctcaagctaaggcactgcttcaagataaggacgtcatagcaataaatcaggatcccctggggaagcagggttatcagcttcgccagggggataactttgaggtctgggaacgccccttgtccggacttgcgtgggccgttgccatgatcaataggcaggagatcggcggccctcgatcatatacaatcgccgtggcttccctgggcaagggggttgcctgcaatcccgcttgctttattactcagctgctcccggtgaaacgaaagctgggattctacgagtggacatcacgcttgaggagccacatcaatcctacaggaactgtcctgctgcagctcgaaaataccatgcaaatgtccttgaaggatctcctc

SEQ ID NO: 12248 - DNA, 1287 bp, synthetic construct
  misc_feature 1..1287: note = source = /note="Description of Artificial Sequence: Synthetic coding sequence"
  source 1..1287: mol_type = other DNA
atgcagttgcgaaaccctgaacttcaccttggttgcgcactcgcactcagattccttgcactcgtctcctgggacatccctggtgcacgagcactggataacggcctggcaaggacgcccactatgggatggctgcactgggagcgattcatgtgcaatcttgattgccaagaggagccagatagctgtatcagcgaaaagctgtttatggaaatggcagaacttatggtgtcggagggatggaaggacgcagggtacgagtacctttgcattgatgattgttggatggcaccccaacgagatagcgaagggagacttcaagcagaccctcagaggtttccccacggaatccggcaactcgccaactacgtccactcgaaaggactgaagctcggtatatacgcggatgtgggaaataagacctgtgcaggttttcctggctcatttggctactacgacatcgacgctcaaacttttgccgattggggcgtggatcttctcaagtttgacggttgttactgtgattcgctggaaaatctggcagatggctacaaacatatgtcgcttgcgcttaaccgcactggtagatctatcgtgtactcgtgtgaatggcctctgtatatgtggcccttccaaaaaccaaactacactgagattcgtcagtactgtaatcactggcgtaactttgcggatattgacgattcatggaaatccatcaagtcgatccttgactggacctcatttaaccaggaacggatagtggacgtcgcgggaccaggggggtggaatgatcctgatatgctggtgataggtaacttcggtttgtcgtggaatcaacaggtgactcaaatggcactttgggcaatcatggcagcacctctgtttatgtcgaacgacctccgccatatatcgccacaggcaaaggcacttcttcaagataaggatgtcatagcaattaaccaggacccactgggcaagcagggctaccagttgaggcaaggagacaacttcgaggtgtgggaacgtccgctgtccggtctggcatgggccgtggctatgattaacagacaagagattggtggaccacgcagctacactattgcagtcgcgtcccttggaaaaggcgtggcgtgtaatccagcttgcttcataacccagctcctcccagtgaagcggaagttgggtttctatgaatggacttcgcggcttcgctcccatatcaacccaacggggaccgttctcctgcaactggagaacaccatgcaaatgtctctgaaggatctgctg

SEQ ID NO: 12249 - DNA, 1287 bp, synthetic construct
  misc_feature 1..1287: note = source = /note="Description of Artificial Sequence: Synthetic coding sequence"
  source 1..1287: mol_type = other DNA
atgcaactcaggaacccagaactgcatcttggttgcgcacttgccctgagatttcttgcacttgtctcatgggatatccctggagcaagggctcttgataatggactggcgcggacgcctactatgggatggcttcattgggaaaggtttatgtgtaatctggattgccaggaagaaccagactcgtgcatttcagaaaaactcttcatggagatggcagaacttatggtgtcggagggatggaaagacgcgggatacgagtacctttgtattgatgattgttggatggcacctcaacgggattccgaaggccggcttcaagcagatcctcaaaggttcccacatggcatcagacagttggcaaactacgtgcactcgaagggactgaagctcggcatctacgcagatgtgggaaacaaaacctgtgcggggtttcctggttcctttggctattacgatattgacgcacagacgtttgcagattggggtgtcgatctcttgaagtttgacggctgttactgcgatagcctcgagaatctggcggacggatacaagcacatgtcacttgcccttaataggaccggaagatctattgtgtactcgtgtgagtggcccctttacatgtggccgttccaaaagccaaactataccgagattcgacaatactgtaaccattggcggaatttcgcagatattgatgactcatggaagtccattaagagcatactggattggacgtcattcaatcaagaaaggattgtggatgtcgcagggcctggaggatggaacgatccagacatgcttgtgattgggaactttggactgtcatggaatcaacaggtgacccagatggcgctttgggcgataatggcagctcctctgtttatgtcgaatgaccttcggcacatatccccacaggccaaggcactgcttcaggataaggatgtcattgccatcaaccaagatcctcttggcaagcaaggctatcagcttaggcaaggggataacttcgaagtgtgggaacgtccgctgagcgggcttgcatgggcagtggccatgattaacagacaggaaataggaggacctagatcctacaccattgcggtggcatcccttggaaaaggagtggcatgtaatccagcatgtttcattacccagctgctgcctgtgaagcgcaaactgggattttacgaatggacttcccgcttgagatcgcacatcaacccaaccggaactgtgctccttcaactcgaaaacactatgcagatgagcctcaaggacctgctg

SEQ ID NO: 12250 - DNA, 1287 bp, synthetic construct
  misc_feature 1..1287: note = source = /note="Description of Artificial Sequence: Synthetic coding sequence"
  source 1..1287: mol_type = other DNA
atgcaactgagaaacccagaactgcatcttggttgtgcgctggctctccgttttctggcgcttgtgagctgggacattcctggggctcgcgcactggataacggactcgcaagaacgccaactatgggatggctgcactgggagcggtttatgtgtaatctggactgtcaagaggagccggactcgtgtatcagcgaaaagctgttcatggagatggcagaactgatggtgtccgaaggttggaaagacgcgggatacgaatacctttgtattgatgattgctggatggcgcctcaacgcgatagcgaaggacgtctccaagctgatccacaacggtttcctcacggaattaggcaactcgcaaactacgtgcattcgaagggcctgaagctgggaatatacgccgacgtcggaaacaaaacttgtgcagggttcccagggagcttcggatattacgacattgatgcacagaccttcgcagactggggcgtggaccttctcaagtttgatggttgctactgtgactccctcgaaaacttggcggatggatacaaacatatgagcctggcgctgaatcgcaccgggaggtcgatcgtgtactcatgtgaatggccactttacatgtggccttttcagaaacccaactacacggaaattagacaatactgcaatcattggagaaactttgccgatattgatgattcctggaagtctataaagtccattctcgattggactagctttaatcaagaacggatagtggatgtggcaggacctggaggttggaacgaccctgatatgctggtgattgggaacttcgggctctcctggaatcaacaagtcacccaaatggcgctctgggcaatcatggcagctccactgtttatgtcaaatgatcttagacacatctcccctcaggccaaggccctccttcaagataaagacgtcattgcaatcaaccaggaccctctgggtaaacaggggtaccaacttagacagggtgacaattttgaggtgtgggagcggccactttcgggcctggcatgggcagtggcaatgatcaacaggcaagaaatcggtggtcctcgctcgtataccattgcagtagcatcacttggtaagggggtcgcctgcaatccagcctgcttcattacgcagttgcttcctgtcaagcgaaagttgggcttttacgaatggacctcgaggctgcgctcccacatcaaccctactggtactgtgctgctgcaacttgaaaacaccatgcaaatgtccctcaaggaccttctg

SEQ ID NO: 12251 - DNA, 1287 bp, synthetic construct
  misc_feature 1..1287: note = source = /note="Description of Artificial Sequence: Synthetic coding sequence"
  source 1..1287: mol_type = other DNA
atgcaactccggaaccccgagctgcaccttggatgcgcccttgctctgcggttcctggcgctggtgagttgggacatcccgggcgcccgagcactagacaacggactcgcccgtaccccaacaatgggatggctccactgggaaagatttatgtgtaacttagactgtcaagaggagccagattcttgcatcagcgaaaagctatttatggaaatggccgagctcatggtgtctgagggatggaaagatgccggatacgagtacttgtgtatcgacgactgctggatggcgccacagagagactcagaaggcagactgcaagctgatcctcagagattcccccatggcatacggcagctcgcaaattacgtacatagcaagggcctgaaattgggaatctacgcagacgtggggaacaaaacatgtgctggctttccaggcagttttggctactatgacattgacgcccagacgtttgcggactggggggttgatctgttgaagttcgacggctgttactgtgattcgctggagaatctggccgatggctataaacacatgagtcttgctcttaacaggacaggaagatctattgtctactcttgcgagtggcccctgtacatgtggccctttcagaaacctaactacacagagattagacagtattgtaaccattggcgaaatttcgccgatattgacgactcatggaagtccatcaaatccatcttagactggacatcgttcaatcaggagcgaatcgtagacgttgctggccctggggggtggaatgaccccgacatgctcgtaatcgggaatttcggattgtcatggaaccagcaggtgacccagatggccctttgggctattatggctgccccactgtttatgtctaatgacctgaggcacatttctccccaggcaaaggccctactgcaggacaaagatgtcatagccatcaaccaggaccctttgggcaaacagggataccagcttaggcagggcgataacttcgaggtgtgggagcggccattatccggccttgcctgggccgttgccatgatcaacagacaggaaatcggtggcccccgctcctatacaatcgccgtggcgagcctaggaaaaggcgttgcgtgcaaccctgcatgtttcattacccagctactgccagttaaaagaaaattgggattctacgagtggacgtctcgcctgagaagccatatcaatcctactggcacagttctattacaattggagaatacgatgcagatgtctttaaaggatctcctg

SEQ ID NO: 12252 - DNA, 1287 bp, synthetic construct
  misc_feature 1..1287: note = source = /note="Description of Artificial Sequence: Synthetic coding sequence"
  source 1..1287: mol_type = other DNA
atgcagctccgcaatcccgagctgcacctgggctgtgctcttgccttgcgctttctcgcacttgtatcatgggacatcccaggagctcgcgcgcttgataatggcctcgccagaacccctactatgggttggcttcactgggagagatttatgtgcaatctggactgtcaggaagagccagactcttgtatttcagagaagctgtttatggagatggcagaactgatggtgtccgagggatggaaggatgccggatacgaatatctgtgcatcgacgactgttggatggccccacagagggacagcgagggacgcttgcaggccgacccccagaggttcccgcatggcattaggcagcttgcaaactatgtgcactctaagggattgaaacttggtatatatgctgatgtcggtaacaagacttgcgccggcttcccaggatctttcggttactacgacattgacgcccagacattcgctgattggggagtggatctcctgaaattcgacggctgctattgtgattcattggaaaacctcgctgatggatacaagcacatgtctctcgcattgaaccgcaccggtcgcagcattgtgtactcatgcgaatggcccctctatatgtggcctttccagaaaccaaactatacagagatcaggcaatactgtaatcactggcgcaatttcgcagatatcgatgattcatggaaatcaattaaatctatcctggactggacttctttcaatcaggagaggatcgtcgacgttgccggccccggcggatggaatgatccggatatgttggttattggcaacttcggcctgagctggaaccaacaggtgacacagatggcactctgggctatcatggcggccccactgttcatgtctaacgatcttaggcacatctccccgcaggctaaggcacttttgcaggacaaggacgtaatagccatcaaccaagacccacttggaaagcagggataccaactgcgccaaggcgacaattttgaagtttgggagagaccactgagtggcctggcatgggcagttgctatgattaatagacaggaaatcggcggccctaggagttacacgatcgcagtggcttctctcggaaaaggtgttgcttgcaaccctgcctgctttatcactcaactgttgccggtgaaaaggaaattgggattctacgaatggacctcccgcctccgctcacatatcaaccccacaggtactgttctgctccaactggagaatactatgcagatgagcttgaaggatcttctg

SEQ ID NO: 12253 - DNA, 1287 bp, synthetic construct
  misc_feature 1..1287: note = source = /note="Description of Artificial Sequence: Synthetic coding sequence"
  source 1..1287: mol_type = other DNA
atgcagctccggaaccctgagcttcacctgggatgtgctcttgcgttgagatttcttgcacttgtgtcctgggatatacctggagcccgggcgctcgataacgggctcgcaaggacgcctactatgggttggcttcactgggagaggttcatgtgcaacctcgattgtcaagaggagcccgattcctgtatttccgagaagctctttatggaaatggcggaattgatggtgagcgagggatggaaagacgcgggctacgaatatctgtgtatagacgattgttggatggctccccagcgtgacagcgagggtcgcctgcaggccgatccgcaacgcttcccgcacgggattagacagttggccaattatgtccattccaagggtctgaaacttggcatttacgccgatgtggggaacaaaacttgtgccggtttcccagggtcgtttggatactacgatattgatgcacaaacttttgcagattggggggtggacctgctgaagtttgacggatgctattgcgattccctggagaatctggcagatggttacaagcatatgagcctggcactgaaccggactggacgctcgattgtgtactcctgcgagtggccgctctacatgtggccatttcaaaagccaaattacaccgagatccgacagtactgtaatcactggagaaacttcgccgacatagatgattcatggaagagcattaagtccatcctggactggactagcttcaaccaagagcgtattgtggacgtggccggaccgggtgggtggaacgaccctgacatgcttgtcattgggaattttggactttcctggaaccaacaagtgacgcaaatggcattgtgggcaattatggccgccccactgttcatgtcgaacgatcttcgacacatcagcccacaagcaaaggcacttctgcaggataaggacgtcattgcgattaatcaggatccactcggtaagcaaggataccagctgagacaaggagataacttcgaagtgtgggaacggccgctgtcgggacttgcatgggcggttgcaatgattaacaggcaagagatcggcggcccaaggtcctacactatcgcggtcgcatctctgggcaagggtgtggcctgtaaccctgcctgttttatcactcagcttctgcctgtgaagagaaaactcgggttctacgagtggacttcgcgcctgagatcacacatcaacccaaccggtaccgtgcttctgcaacttgaaaacaccatgcagatgtccctcaaagatttgctt

SEQ ID NO: 12254 - DNA, 1287 bp, synthetic construct
  misc_feature 1..1287: note = source = /note="Description of Artificial Sequence: Synthetic coding sequence"
  source 1..1287: mol_type = other DNA
atgcagttgcgtaatcccgagttacacctgggctgtgcgctggctctcaggtttctcgcactcgtgtcttgggacatcccaggggcacgcgctctggataacggcctggccagaactcccaccatgggttggctgcattgggaacgatttatgtgtaacttagactgtcaggaggagccagactcttgcattagcgagaagctcttcatggagatggccgagctcatggtgagcgaggggtggaaggatgccgggtatgaatacctgtgcatagacgactgttggatggcgccccaaagagactctgaaggaagactgcaggccgacccccagagatttcctcacggcattaggcaactcgctaactacgtacactcgaagggtctgaaactcggcatctacgcagacgtgggcaacaagacttgtgccggtttccccggcagcttcggctattacgacattgatgcgcagacatttgccgattggggtgttgatctgctgaagtttgacggatgctactgcgattcgttggagaatctggcggatgggtacaaacacatgtctttggcactgaatcgaactggcaggagtatcgtgtactcttgtgaatggccactgtacatgtggccttttcagaaacctaactacacagagattaggcagtattgcaaccattggagaaattttgccgacattgacgattcatggaaatcgatcaagtcgattctcgactggacaagcttcaatcaagaaaggatcgtcgatgttgccggcccagggggctggaatgatcccgacatgctggtgatcggaaactttgggttgagttggaaccagcaggttacacaaatggccctgtgggccatcatggcagcacccctgttcatgtctaacgacctgaggcatatcagccctcaagccaaagcccttctgcaggacaaggatgtcatcgccataaatcaggaccccctgggtaaacagggctatcagctgagacagggagataacttcgaggtctgggaacggcctctctcggggcttgcctgggcggtcgctatgatcaaccgacaggaaattggcggaccacgcagctataccattgctgtggcctctctgggaaaaggtgtcgcctgcaatccagcttgctttatcacccaattactgcccgtgaaaaggaaactgggattttacgagtggacaagtagactccgctctcacattaaccccactggtacagtactgttgcagctggagaataccatgcagatgtcactcaaggatctgctg

SEQ ID NO: 12255 - DNA, 1287 bp, synthetic construct
  misc_feature 1..1287: note = source = /note="Description of Artificial Sequence: Synthetic coding sequence"
  source 1..1287: mol_type = other DNA
atgcagctaaggaatcccgaactgcatctagggtgcgccctggccctgcgctttttggcactggtaagttgggacatccctggggctagggctcttgataatggcttggcgcgcacgccaactatgggctggctccactgggagaggttcatgtgtaacctcgattgccaggaagaaccagattcttgtatctccgagaagttgttcatggaaatggcagagctgatggtctcagaagggtggaaggatgccggatacgagtacctctgcattgacgattgctggatggctccgcagcgcgattcagaaggtcggctccaggcagacccccagcgatttccccatggaattcgacagttggccaactacgtgcattccaagggtctgaaactgggcatctacgccgatgtcggtaacaagacatgcgcagggttcccgggcagtttcggatattatgacatcgacgcacagaccttcgctgactggggagtggatcttcttaagtttgacggttgttactgcgattccctggagaacttggctgatggctataaacacatgagcttggcgttgaaccggacaggtcgatccattgtctactcgtgtgagtggccgttatatatgtggccctttcaaaaacccaactacactgaaatcagacagtattgcaatcactggcgaaactttgcagacattgacgacagttggaagagtatcaaatccatcctagactggacgtctttcaaccaggaaaggattgtggacgtggccggaccaggcgggtggaacgatccggacatgcttgtgatcggcaacttcggactgtcctggaaccagcaggtaacacagatggcgctgtgggcaattatggcagctcctctatttatgagcaacgaccttcgtcatatttctccccaagctaaggccctgctgcaggataaagacgtgatcgctatcaaccaggacccccttggaaaacagggataccagctgagacaaggcgataacttcgaggtgtgggaacggccattaagcggcctcgcatgggctgttgctatgataaacaggcaggaaattggcggccctcggagctacactatcgcagtggcaagtctggggaagggcgtagcatgtaacccagcttgtttcattactcaactgctgcccgtgaaacgcaagcttgggttctacgaatggaccagccgactgaggtcccacataaaccctaccggaactgtcctactgcagcttgagaataccatgcaaatgtccctcaaagacttgttg

SEQ ID NO: 12256 - DNA, 1287 bp, synthetic construct
  misc_feature 1..1287: note = source = /note="Description of Artificial Sequence: Synthetic coding sequence"
  source 1..1287: mol_type = other DNA
atgcaactgcgtaatcctgagctgcacctcggttgtgcgctcgcgctgcgatttcttgcactcgtctcgtgggacatacccggcgcccgcgctttggataatggcctggcccgcaccccaaccatgggatggctgcattgggagcgctttatgtgcaatcttgattgtcaggaggagccagacagctgcatttccgagaagctcttcatggagatggccgaacttatggtgagtgaaggctggaaggacgcgggctatgagtatctttgcatcgatgattgctggatggccccacagagggacagcgagggtagactgcaggcagacccccaacgatttccccacggcattagacagttggccaattatgtccacagcaagggcttgaagttgggcatctacgccgacgtgggcaataagacttgcgctggattcccgggctcttttggatactatgacatcgatgcccagactttcgctgattggggagtagacctactcaagttcgatggctgctactgtgattcgctggaaaatttggccgacggttacaagcacatgtcgctagctctgaatcgaaccggacgatcaatcgtgtattcctgtgaatggccactgtacatgtggccgtttcaaaagccaaattacacggagattagacaatactgcaaccactggcggaacttcgccgacatagatgattcatggaagtcgatcaagagcatactagactggactagctttaatcaggagcgtattgtggatgttgctggccccggaggatggaacgaccccgacatgctggtgattggcaatttcggcctgtcgtggaatcagcaggtgacccaaatggccttatgggcgattatggcagcgcccctgtttatgagcaatgatttgcgtcacatctccccgcaggccaaagcgcttttgcaagataaggatgtcattgctattaatcaggatccgttgggtaaacaaggctatcagctgagacaaggcgataatttcgaggtgtgggaacggccgctcagtggactcgcctgggctgtcgcgatgattaatcgccaggagatcggtggaccgcgctcctacacgatcgcggtagcatccttaggcaaaggcgtggcgtgcaaccccgcatgctttatcacccagctgctgccagtcaaacgtaagctgggattttacgaatggacttcgcgcctgcgtagccacataaatcccacaggcaccgttctgctgcagctggagaacactatgcaaatgagcctgaaggacctcctc

SEQ ID NO: 12257 - DNA, 1287 bp, synthetic construct
  misc_feature 1..1287: note = source = /note="Description of Artificial Sequence: Synthetic coding sequence"
  source 1..1287: mol_type = other DNA
atgcaactgcggaaccccgagctgcacttgggctgtgccctggcccttcgcttcctcgcactcgtctcctgggacatcccaggcgctcgcgctttggataatggattggccaggacacccaccatgggttggctgcattgggagaggttcatgtgcaacctcgactgccaggaggaaccagattcctgcatctctgagaaactgttcatggaaatggccgagcttatggtttccgaagggtggaaggacgctggatacgagtacctgtgtatcgacgactgctggatggccccccaacgagatagcgagggcagacttcaggcagacccacaaagatttccgcacgggatccgccagctggccaactacgttcacagcaaggggctcaagctggggatttacgccgacgtgggaaataagacttgtgccggcttccccggaagctttggctattacgatatcgatgcgcagacattcgcagattggggggtcgacctactgaaatttgacggttgctattgtgacagtctcgaaaatctggcggacgggtataaacacatgtccctggcgttgaatcgcacaggccgtagtattgtgtattcatgcgaatggccactttacatgtggccctttcagaagcccaattacacagagattaggcaatattgtaatcactggcggaattttgcagacatcgacgatagttggaagagcattaaatctattctcgactggacgtctttcaaccaggaacgcatcgtcgacgtagccggcccaggaggatggaacgaccccgatatgttggtgatcggcaacttcggccttagttggaaccagcaggtgacccagatggccctatgggcaatcatggccgcaccccttttcatgagcaacgatttgcgacatatctcacctcaagctaaggccctactccaggacaaggacgttattgctatcaatcaggacccactgggcaaacagggctaccagcttagacagggagacaatttcgaagtgtgggaaagacccctgagtggccttgcttgggccgtggcaatgatcaaccgacaagagattggaggtcccagatcatataccatcgcagtagcttctctaggaaagggggtagcctgtaatccagcttgcttcatcactcagttattacctgttaagcgtaagctcggtttctacgaatggacttccaggctcaggagtcatatcaaccctactgggacggtcttgttgcagctggaaaataccatgcagatgagcctgaaagacttgctg

SEQ ID NO: 12258 - DNA, 1287 bp, synthetic construct
  misc_feature 1..1287: note = source = /note="Description of Artificial Sequence: Synthetic coding sequence"
  source 1..1287: mol_type = other DNA
atgcagttaaggaacccagaactgcatctggggtgtgcgcttgccctgagattcttggcactggttagctgggatattcctggagcccgggcactggacaatgggctagctagaacccctacaatgggctggctgcactgggagaggttcatgtgcaatctggattgccaggaggagcctgactcctgtatctccgagaaactttttatggaaatggccgagctgatggtgagcgaaggctggaaggacgccgggtacgagtacttgtgcattgatgattgctggatggctcctcagcgggattcagaagggaggctccaggctgaccctcagcggttccctcatgggattcggcagttagcaaattatgtgcactctaaaggtttgaaactggggatctatgccgacgttggcaataaaacgtgcgccgggttccccggatcttttggctattacgatattgacgctcagacttttgcagattggggcgtggatttgcttaagttcgatggatgctactgtgatagtctggagaacttggctgacggctataagcatatgagtctggcgctgaacagaaccgggcggtccatcgtgtactcctgcgagtggcctctttacatgtggcctttccagaagcctaattatacggagattagacagtattgtaatcactggcgcaactttgcagacattgatgattcttggaagagtataaagtccattttggactggacgtcttttaaccaagaacgcattgtggatgtggccggacccggcggatggaatgaccctgacatgctggttatcgggaattttggactctcatggaaccagcaagttacacagatggcgctttgggccatcatggctgctcccctctttatgagtaacgatctgcggcatataagcccccaggcaaaggctctgctacaggacaaagacgtgattgctatcaaccaggatccgctggggaaacaggggtaccagcttagacagggggataatttcgaagtgtgggagaggcccctaagcggattggcgtgggcagtggccatgatcaacagacaggagatcggaggcccccgtagctacacaattgctgtggcatcattgggaaagggagtagcctgtaatcccgcttgcttcattacacagttactgcctgtgaaacggaaattaggattctacgaatggaccagccgactgcgttctcacatcaaccccacaggaacagtgctcttgcagctcgaaaacaccatgcagatgtcgctcaaggatctcctg

SEQ ID NO: 12259 - DNA, 1287 bp, synthetic construct
  misc_feature 1..1287: note = source = /note="Description of Artificial Sequence: Synthetic coding sequence"
  source 1..1287: mol_type = other DNA
atgcagttgcgaaacccagagttgcatctgggctgcgccctggctctgcggttcttggccctggtgtcttgggacattcctggggctcgggcgcttgacaacggactggctaggacaccaaccatgggctggctgcactgggagagatttatgtgcaacttggattgtcaggaagaacccgactcttgtattagcgaaaagttgtttatggagatggctgaactgatggtgtctgaagggtggaaagacgctggatatgagtatctgtgtatcgatgactgttggatggcccctcaaagggattcagaagggcggctgcaagctgatccgcagagattccctcacggcatacgccagttagcaaactatgtacactctaagggtctcaaacttgggatctatgctgatgtagggaacaaaacatgcgccggctttcctggttcctttggctactatgatatcgacgcccagacgttcgcggattggggggtcgacctgctgaaatttgatggttgctattgcgattctcttgaaaacctggccgacggctacaagcacatgagcctggccctgaataggaccggccgttcaattgtatattcctgcgagtggcccctatacatgtggccattccagaaaccgaactacactgaaatccgccagtattgcaatcattggagaaacttcgccgacattgacgactcatggaaaagcattaagtcgatcctagactggacaagtttcaatcaggagcgtatcgtggacgtggctggccctggaggttggaatgaccccgacatgctggtgatcgggaacttcggactgagctggaaccaacaggtgacccagatggccctttgggcgatcatggccgcacctctctttatgtcgaatgatctcagacatatttccccgcaggcaaaggccctgcttcaggacaaggatgtcatcgccatcaaccaagatccgctcggcaaacaaggttatcagcttcggcaaggagacaatttcgaggtgtgggaaaggcctctatctggcttagcatgggcggtggccatgattaataggcaggaaattggaggaccccggagctacacaatcgcggtcgccagcctcggaaaaggggtggcctgtaaccccgcgtgcttcatcacacagcttctgccagttaaaaggaaactgggattctacgaatggacatcaagactgcggagccatatcaaccccacaggcaccgttctgcttcagctggagaacaccatgcagatgtctctcaaggatctgctg

SEQ ID NO: 12260 - DNA, 1287 bp, synthetic construct
  misc_feature 1..1287: note = source = /note="Description of Artificial Sequence: Synthetic coding sequence"
  source 1..1287: mol_type = other DNA
atgcagctgcggaaccctgaattgcatctggggtgtgctctggcactgcgcttccttgcccttgtgagctgggatattcccggcgccagggcccttgacaatggacttgcacgtaccccgacaatgggttggctacattgggagagattcatgtgtaatctcgattgccaggaggagcccgactcatgcatcagcgaaaagctgtttatggaaatggctgagctgatggtgtctgaaggctggaaggatgccgggtatgaatacctgtgcattgatgattgttggatggctcctcagcgggactctgagggacggttgcaggcagacccgcaacggttcccccacggcatccgacagctcgctaattacgttcactccaagggccttaagctggggatttatgcagatgtgggaaacaagacctgcgccggattcccgggctccttcgggtactatgatatagatgctcaaactttcgctgattggggcgtcgatctgcttaaattcgatggatgttactgcgacagcctcgaaaaccttgcggatggatacaaacacatgtctttagctcttaataggaccgggcgctccatcgtgtactcttgtgaatggccactgtatatgtggccttttcagaagcctaattacaccgagatcagacagtactgtaatcactggcgtaactttgctgacatcgacgactcctggaagagtattaagtctatcttagattggacaagtttcaaccaggagcgcattgtggacgtggcaggacctgggggctggaacgatccagatatgcttgttattggaaattttggactaagctggaatcaacaggtgacacagatggctctgtgggcaataatggccgctcccctgtttatgagcaacgatctgcggcacataagcccccaggccaaagcactgctgcaagataaggatgtgattgcaattaatcaggaccctctggggaagcagggttaccagctaaggcagggggataacttcgaggtgtgggagagacctttgtctgggctcgcctgggcggtggctatgatcaatcgccaggaaatcgggggcccaagatcctataccatagcagttgcatcactgggcaagggagtggcctgtaatcccgcttgcttcattacacagttgctgcccgtgaaacggaagttaggcttctacgagtggacttcacgtctgcgatcacacataaatccaactggcacagtgctgctgcagctggagaatacgatgcagatgagtctgaaagacctgttg

SEQ ID NO: 12261 - DNA, 1287 bp, synthetic construct
  misc_feature 1..1287: note = source = /note="Description of Artificial Sequence: Synthetic coding sequence"
  source 1..1287: mol_type = other DNA
atgcagttgcgcaacccggagctgcacctggggtgcgctctggcgctcaggtttttggctctggtgtcgtgggacatcccgggagccagggccttggacaacggattggcgagaaccccgaccatgggttggctccattgggagcgatttatgtgcaacttggattgccaggaggaacccgacagctgtatttcggagaaactgttcatggaaatggctgagctcatggtgtcagagggatggaaggatgcgggctacgaatacctctgtatcgacgactgttggatggcgccgcagcgcgacagcgaaggacgcctccaggccgatccgcagcggttcccacacggaattagacaacttgccaattatgtacactcgaagggactgaagctgggaatctatgccgatgttggtaacaagacttgcgccgggttcccgggatccttcggctactacgacattgacgcccaaactttcgcggattggggagtggatctgctgaaatttgacgggtgctactgcgactctctggaaaacctcgctgacggctacaagcacatgagcctggccctcaacagaacgggtcggtcgatcgtgtactcctgcgaatggccactctacatgtggccgtttcagaagccaaactacaccgagatacgccagtactgtaatcattggcgcaatttcgccgatatcgatgactcctggaagtcaatcaagtcgattctggactggactagcttcaaccaagagcggatcgtcgatgtcgcaggtcctggcggctggaacgatccggatatgctcgtcatcggaaactttggattgtcgtggaatcaacaggttactcaaatggccctctgggcaatcatggcagcacccttgttcatgagtaacgacctccgacacatctcgccgcaggctaaggccctgctccaggataaagacgtgattgctatcaatcaagatcctctgggaaaacagggctaccaactgaggcaaggcgacaatttcgaggtgtgggaaagacccctgagcggactggcctgggccgtggcgatgatcaaccgccaggaaattggtggaccgcggagctacaccatcgcggtggcctctctcgggaagggcgtggcgtgcaatccagcatgcttcatcactcagcttctgccggtgaagaggaagctgggcttctacgaatggacgtcccgcctccggtcgcatatcaacccaaccggcaccgtactgctgcagctcgaaaatacgatgcagatgtcacttaaggaccttctc

SEQ ID NO: 12262 - DNA, 1287 bp, synthetic construct
  misc_feature 1..1287: note = source = /note="Description of Artificial Sequence: Synthetic coding sequence"
  source 1..1287: mol_type = other DNA
atgcagctccggaaccccgaactgcatttagggtgtgctctcgcccttagattcctcgctctcgtctcgtgggacatccccggggccagagcacttgataacggactcgctaggacaccaactatgggatggcttcactgggaacgcttcatgtgtaacctcgattgtcaggaagagcccgattcatgtatatcagaaaagctcttcatggaaatggccgaactcatggtatcagaagggtggaaagatgccggatatgaatacctgtgtatagatgactgttggatggccccccagcgagacagtgaagggcgactgcaggcagatccacagcgcttccctcacgggatcagacagctcgccaattatgtccactcgaagggactcaagttagggatatacgccgatgtcggaaacaagacatgtgccggatttccaggatcctttgggtattacgatattgatgctcagacatttgccgattggggggtggatctccttaagtttgatgggtgctactgtgactcactggagaacctcgccgacgggtacaaacacatgagtctggcattgaatcggactggacggtcaattgtgtactcatgtgaatggcctctgtatatgtggccattccagaaacctaattacacagagatacggcagtattgtaaccactggcggaattttgctgatatagatgacagttggaaatctataaagtcaatactcgactggactagttttaatcaggagcgaattgttgacgtggccgggccagggggatggaatgatcccgatatgctggttatcggaaattttggactgtcttggaaccagcaggtgacacaaatggcactgtgggcaataatggctgcccctctctttatgtctaacgatcttaggcatatctcccctcaggccaaagcccttcttcaggacaaagatgtgatcgctattaatcaggatcctctcgggaaacaggggtatcagctgaggcagggagacaacttcgaagtgtgggagaggcccctctctggactagcctgggccgtagccatgataaaccggcaggagattgggggaccacgatcttatacaatagccgtcgcctcactggggaaaggagtcgcatgtaatccagcctgctttataactcagctactcccagtcaaaaggaaattggggttttacgagtggacttctcgactgcgatcccacatcaaccccactggaacagtgctcctgcagctggagaacactatgcagatgtccctcaaggacttgctc

SEQ ID NO: 12263 - DNA, 1287 bp, synthetic construct
  misc_feature 1..1287: note = source = /note="Description of Artificial Sequence: Synthetic coding sequence"
  source 1..1287: mol_type = other DNA
atgcagctgcgtaaccctgagctgcacctcggttgcgcacttgcgcttcgatttctcgccctggtcagctgggacattccaggtgcacgcgcgcttgataacggacttgcaagaacccctactatgggttggcttcattgggaaagatttatgtgtaacctggactgtcaagaagaaccagattcgtgtataagcgaaaagctgtttatggagatggccgaacttatggtcagcgagggctggaaagatgcaggatacgaatacctgtgtattgacgattgttggatggctcctcaaagggattcagagggaaggcttcaggcagaccctcagcggtttccccatggtatacgacagcttgcgaactacgtgcattcaaaggggcttaaacttggaatttacgctgacgtgggaaataagacttgtgcaggatttccaggtagctttggttactacgatattgacgcccaaacgttcgcagattggggtgtggatctgctcaagttcgatggctgttactgtgattcgcttgagaatctggcagatggttacaagcatatgtcgcttgcattgaaccgcaccggtagaagcattgtgtactcatgtgaatggcccctctacatgtggccttttcagaaacctaactacactgaaataagacagtactgtaaccactggaggaattttgcggatattgatgactcgtggaagtcgattaagtcaattctcgattggacttcatttaaccaggagaggattgtcgatgtggccggccctggagggtggaatgatcccgatatgcttgttattggaaactttggccttagctggaaccaacaagtgactcagatggcgctctgggcgattatggcagcccccctgttcatgagtaacgatctcagacacatttcccctcaggcgaaggcacttcttcaagataaggatgtgatcgcaatcaatcaggatccactcggaaaacaaggatatcaactccgacagggcgacaactttgaagtctgggaacggccactgtccggtctggcatgggcggtagcaatgatcaatagacaggagatcggagggccaaggtcctacactattgccgtcgcatcgcttgggaagggagtggcgtgcaatcctgcatgcttcataactcaactgctgcctgtgaagcggaaacttgggttctacgaatggacctccagactgagatcgcatatcaatcctactggtaccgtccttctgcaactcgaaaacactatgcagatgtcgctcaaggatctcctg

SEQ ID NO: 12264 - DNA, 1287 bp, synthetic construct
  misc_feature 1..1287: note = source = /note="Description of Artificial Sequence: Synthetic coding sequence"
  source 1..1287: mol_type = other DNA
atgcagctgcgtaaccccgaactgcaccttggttgtgcacttgctttgcgtttcctcgccctcgtatcttgggatatcccaggcgcccgcgcactcgataacggactcgcacgcactcccacaatgggatggctccactgggaacgtttcatgtgtaatctggactgccaggaagagccagatagttgcatcagcgagaagttgtttatggagatggctgaactgatggtttctgagggttggaaggatgcaggatatgaatacctctgtatcgacgactgctggatggccccacagcgcgatagcgaaggtaggctccaggctgatccccaacgcttcccacacggcattagacagttggccaactacgtgcactctaagggtctcaagctgggtatctatgctgacgtgggaaacaagacatgcgctggtttcccaggttcctttggctattacgatatcgacgctcaaactttcgccgactggggtgtggatctgttgaaattcgatggctgctactgtgactcacttgagaatctggctgatggatacaagcatatgtcattggctttgaatagaaccggacgttccatcgtctatagctgcgagtggccactgtacatgtggcctttccagaaaccaaactacaccgaaatacgtcaatactgcaaccactggaggaacttcgctgatattgatgacagctggaagtctatcaaatctatacttgactggactagttttaatcaggaaaggatagtcgatgtagccggaccaggtggctggaacgatcccgacatgcttgtaatcggtaactttggattgtcttggaaccagcaggttacacagatggcactttgggctattatggctgctccactgttcatgtctaacgatttgcgccatatttctccccaggcaaaagctcttctgcaggacaaggatgtcatcgccatcaatcaggaccccctgggtaagcaaggataccaactccgccagggagacaattttgaggtctgggagaggcccctttcaggcctggcctgggctgtagccatgatcaacaggcaggagatcggtggccccaggtcttacacaatcgctgtggcctctctgggcaaaggcgtggcctgcaacccagcttgctttatcacacaactcctgcccgtaaagaggaaattgggattttacgagtggacctccaggctgagatctcacattaaccccacaggtacagtgctcctccagcttgaaaatactatgcagatgtccctcaaggacctgttg

SEQ ID NO: 12265 - DNA, 1287 bp, synthetic construct
  misc_feature 1..1287: note = source = /note="Description of Artificial Sequence: Synthetic coding sequence"
  source 1..1287: mol_type = other DNA
atgcagctccgcaaccccgaattacacttggggtgcgcactggccctgcgtttcctcgctttagtgagctgggatatccccggagcccgtgcacttgataacggtctcgcaaggactcccaccatggggtggctgcattgggaacgcttcatgtgcaatctggattgtcaggaagagcctgattcttgcatcagcgaaaaactgttcatggaaatggcggagttgatggtcagtgagggctggaaagacgcgggctacgagtatctctgcatcgatgattgctggatggccccacagcgcgactccgagggtaggctgcaagccgaccctcagcgcttcccacatggcattcggcagctggccaactacgtgcatagcaagggattaaagctcgggatctacgctgatgttggtaacaagacgtgtgccggttttcctggaagcttcggctactacgatattgacgcccagacctttgccgattggggtgtcgaccttctgaagtttgatggctgttactgcgatagtctggagaatttggctgacggatacaagcatatgtccctcgcgctgaataggaccggtcggtccatagtttacagttgcgaatggcccctgtatatgtggcccttccagaagccgaactatacagagatcagacagtattgcaatcattggcgaaacttcgcggatatagacgattcctggaaatccattaagtccatcctggactggacctcctttaatcaagaaagaatcgtagacgtggcaggtcctggcgggtggaatgaccctgatatgctggttatcggcaactttgggctgtcttggaaccagcaggtcacacagatggccctctgggcgattatggcagcccccctgttcatgtcaaatgatctgcgccacatctctcctcaggcgaaggccctgctacaggacaaggatgttatagctattaatcaggatccactcgggaagcaggggtatcagctgcggcaaggagacaacttcgaggtttgggaacggcctctctcgggcctggcgtgggccgtggcgatgatcaaccgacaggaaataggtggacctaggtcctataccatcgctgtggcatctctaggtaagggtgtggcctgcaatccagcctgcttcattactcagctcctacccgttaagaggaagctcggattttatgaatggacatcacggctaagatcccacatcaacccaactggcactgtcctgcttcagctcgagaataccatgcagatgagcctcaaagaccttctt

SEQ ID NO: 12266 - DNA, 1287 bp, synthetic construct
  misc_feature 1..1287: note = source = /note="Description of Artificial Sequence: Synthetic coding sequence"
  source 1..1287: mol_type = other DNA
atgcagctgcggaatcctgaactccacctgggttgtgccctcgctctgcggtttctggccctggtcagttgggatattcccggagcacgcgcactggacaacggcttggccaggacgcctactatgggctggctccattgggagcggttcatgtgcaacctggattgccaggaggaacctgactcctgcatctcggaaaaactgttcatggaaatggccgagctgatggtatccgaaggctggaaggatgccgggtatgagtacctttgcatagacgattgttggatggcgccacagagagactcggaaggacgcctgcaagcagacccgcagagattcccccacgggatccgacagctggccaactacgtgcactcgaagggactgaagttggggatctacgctgatgtgggtaacaaaacctgcgcgggtttcccgggatcgtttggatactacgacattgatgctcagacgtttgcagattggggcgtcgacctgcttaagttcgatggatgctactgcgactctctcgagaatctcgccgatggttacaaacatatgtccctggctctgaaccgaaccggaagatcaatcgtgtactcatgtgaatggccactgtacatgtggccgtttcaaaagccaaattacactgaaattcggcagtactgtaatcattggagaaacttcgcggacatcgatgacagctggaagtccatcaagtccatactggactggacttccttcaatcaggaacgaattgtggatgtggcggggccagggggctggaatgacccggacatgctcgtcattggaaatttcggtctgagctggaaccaacaggtgacccagatggcgctttgggccatcatggcagcgccgctgttcatgtcaaacgatcttcgccacatctcccctcaggcaaaggcgcttctccaggacaaagacgttatcgcgattaaccaagatcctctgggtaagcaggggtaccagctgcggcaaggagacaacttcgaagtgtgggaacggccgttgagcggtcttgcctgggccgtggcgatgatcaatcgccaagaaatcggaggcccccgctcctacaccatcgccgtggcctcactggggaaaggagttgcctgcaacccagcttgcttcattacccagttgctcccggtgaagcgcaaactcggattctacgagtggacgagtcggctcaggagccacatcaaccctactggaaccgtcctgctgcagctggagaacaccatgcagatgagcctgaaggatttgctg

SEQ ID NO: 12267 - DNA, 1287 bp, synthetic construct
  misc_feature 1..1287: note = source = /note="Description of Artificial Sequence: Synthetic coding sequence"
  source 1..1287: mol_type = other DNA
atgcagctccgtaatcccgaactgcatctgggctgcgctttggctctgcggtttctcgcgctggtctcctgggacataccaggtgctagggctttggacaacggactcgcacgaaccccgaccatgggatggctgcattgggagaggttcatgtgtaatcttgactgccaggaagagcctgattcttgcataagcgagaaattattcatggaaatggccgagttgatggtgagtgaaggttggaaggatgcagggtacgagtacctctgcattgatgactgctggatggcgccacaacgggatagcgaaggtcgcctccaggctgacccgcagcggttccctcatggaatccgccaactggcaaactacgttcactcgaaaggattgaagctcggcatatacgccgatgtgggcaataaaacttgcgctggcttccccgggtcatttggatactatgatattgacgctcagacctttgccgattggggggtggatctactcaagttcgacgggtgttattgtgattctttggagaaccttgcagatgggtacaaacatatgtctctcgccctcaatcgaacaggcagaagtattgtttactcctgtgaatggcccttatatatgtggccattccagaagcctaactatacggaaattcgtcagtattgcaatcactggaggaatttcgctgatatcgacgactcctggaaatcgatcaagagtatccttgactggacttcttttaaccaggaacgcatagtggacgtagcaggcccagggggctggaacgaccccgacatgcttgtgataggaaactttggcctgagctggaatcagcaggtaactcaaatggctctctgggcgattatggcagccccgctattcatgagcaacgacctgcggcacatctcgccgcaggccaaggccctcctgcaagataaagacgttatcgctataaaccaggaccccctggggaaacagggataccaactccgccagggagacaactttgaagtatgggaaagaccactgtccggcctcgcttgggccgtggccatgataaaccgtcaagaaattggtggccccaggagctacaccattgcggtcgcgtccctaggtaaaggagtggcctgcaacccggcatgctttatcactcagctgctgccggttaagcgcaagctaggattctacgaatggaccagtcgcctccgatcgcatataaaccctaccggaaccgtgctgctccagcttgagaatacgatgcagatgtctcttaaggacctccta

SEQ ID NO: 12268 - DNA, 1287 bp, synthetic construct
  misc_feature 1..1287: note = source = /note="Description of Artificial Sequence: Synthetic coding sequence"
  source 1..1287: mol_type = other DNA
atgcaattgagaaatccagagctacacctcggttgcgcacttgcactcagattcctcgcactggtgagttgggatatcccaggggctagggcacttgacaatggcctggcgagaactcccactatgggttggctccactgggagcggttcatgtgcaacctagattgtcaggaggaacccgatagctgtatcagcgaaaagctgttcatggagatggccgagctgatggtgagtgagggctggaaggatgctggatacgagtatctctgtatcgatgattgctggatggcgccgcaaagagactcggagggccgacttcaagccgatccacagcggttccctcacgggattcggcagttggccaattacgtgcactccaagggtctgaaactgggaatttatgctgacgttggcaacaaaacatgcgcgggctttccaggatcttttggctactatgacatagacgcccagacgtttgctgattggggcgtcgatcttttgaagttcgatgggtgttactgcgacagcttagagaacctggcggatggatacaagcacatgtccctggcactgaaccgcacagggcgcagtattgtgtacagctgcgagtggcccttgtacatgtggcccttccagaaacccaattacacagagatacgccagtattgcaaccactggcggaacttcgcagatatagatgacagctggaagtctatcaagagtattctggattggacgtccttcaatcaggagagaatcgtggatgtcgctgggccaggaggctggaatgaccccgacatgcttgtgatcggcaactttggcttgtcctggaatcagcaggttacccaaatggccttgtgggctattatggccgccccactctttatgagcaatgatctgcgacacatatcccctcaagcgaaagcgctgctccaggataaggacgtgatagctatcaatcaggacccactgggcaagcagggctatcagctgagacagggggacaactttgaggtatgggagcggccgctaagtgggctcgcctgggctgtagctatgattaaccgccaagagatcggcggcccaagaagttatactatagccgtcgctagtcttggtaagggagtggcttgcaatccagcatgtttcatcacgcagctgcttccggtgaagcgtaagttgggtttctacgagtggacctcccggctccgcagccatataaacccaacaggcacagtactgttgcaattggaaaataccatgcagatgagtcttaaggatctcctg

SEQ ID NO: 12269 - DNA, 633 bp, synthetic construct
  misc_feature 1..633: note = source = /note="Description of Artificial Sequence: Synthetic coding sequence"
  source 1..633: mol_type = other DNA
atgaagctctgggacgtggtggcagtgtgtctggttctgctgcataccgcatccgctttcccgctgccagcaggtaaaagacctcctgaagcccctgctgaagataggagcttgggcagacgccgggcgccttttgccctgtcctccgattccaacatgcctgaggactaccccgatcaatttgatgacgtgatggactttattcaagcaaccattaaacgactgaagcgtagcccagataagcaaatggcagtgctccctcggcgtgagagaaatagacaagccgcagcagcaaacccagagaactcgaggggaaagggcagacgtggacaacggggcaagaacagaggttgtgtgctgactgcaatccacctcaacgtcactgacttggggctgggatacgaaactaaagaggaactgattttccggtattgctcggggtcttgtgacgcagcagaaactacttacgacaaaattcttaagaacctttcaagaaaccgacgactcgtcagcgacaaggtcggacaagcatgttgtaggcctatagccttcgatgatgatctttccttcctggacgacaatttggtctaccatattcttagaaaacattctgccaagagatgcggttgtatt

SEQ ID NO: 12270 - DNA, 633 bp, synthetic construct
  misc_feature 1..633: note = source = /note="Description of Artificial Sequence: Synthetic coding sequence"
  source 1..633: mol_type = other DNA
atgaaattgtgggatgttgtcgcagtgtgtctcgtcctccttcatactgcgtctgccttcccgctgccagccggcaaacgtcctcccgaggcccccgctgaagaccgctctctgggccgtaggcgggcacccttcgccctaagctccgatagcaatatgcctgaagactatcctgatcagttcgacgacgtgatggattttatacaggctactatcaagagactgaaaaggtcccccgacaagcagatggcagtgctgccccgtcgtgagcggaatagacaggccgccgctgcaaatcccgagaattctcgggggaaagggcggcgtggccagcgcgggaaaaacagaggctgtgttctcaccgctattcatcttaatgtgactgatctgggacttgggtatgagacaaaggaggaactgatcttccgatattgtagcgggagttgcgatgcggctgaaacaacctatgacaagattctgaagaacctcagcaggaataggcgattagtgagcgataaggtgggccaggcctgttgcaggcccattgcctttgatgacgaccttagtttcctcgatgacaatctggtgtaccacattttgagaaaacactccgcgaaacgctgcggatgcata

SEQ ID NO: 12271 - DNA, 633 bp, synthetic construct
  misc_feature 1..633: note = source = /note="Description of Artificial Sequence: Synthetic coding sequence"
  source 1..633: mol_type = other DNA
atgaaattatgggacgttgtagccgtttgtctggtgctcttgcacaccgcatctgctttccctctgcccgccggaaagcggccacctgaagccccagcagaggaccggagtctcggaaggcggagagctccctttgcgttgtcgagcgacagcaatatgcctgaggattacccagatcagtttgacgacgtgatggacttcatacaggcaactatcaaaagactgaagaggagtcccgacaagcagatggcggtgctgcctaggcgagaaaggaataggcaggcagctgcagccaaccccgagaacagccgagggaaggggcggaggggacaacgagggaagaatcgaggctgcgtacttactgcgattcacctcaacgttacagatcttggtttagggtatgaaaccaaggaagaactaatttttcggtactgttccgggtcctgcgacgcagccgagactacctatgataaaatccttaaaaatctctcgcgtaatagaagactggtttcagataaggttggacaggcctgctgccgacctattgcttttgatgatgacctctcttttctggatgacaacctggtgtatcacatactgcggaagcatagtgcgaaacggtgtggctgtatt

SEQ ID NO: 12272 - DNA, 633 bp, synthetic construct
  misc_feature 1..633: note = source = /note="Description of Artificial Sequence: Synthetic coding sequence"
  source 1..633: mol_type = other DNA
atgaaactgtgggacgtggtagccgtgtgtctcgtgctgttgcacacagcatctgcttttccgctacccgccggcaagcggcctccggaggctcccgcagaggatagatcccttggacgacgcagggctcccttcgctttgtctagcgactctaatatgcccgaggactatcctgatcagttcgatgacgtcatggatttcattcaagcaaccatcaagaggctcaaaaggagtcccgataagcagatggccgtgctcccgaggcgggagcgtaaccgccaggccgctgctgccaaccctgagaactcgagaggtaagggccgtcgcgggcagcgcggcaagaatcgcggttgcgtgctgacagccatccacttaaatgtgaccgacctcggcctcggatatgagaccaaggaggagctgattttccggtattgtagcgggtcttgcgatgcagctgagacaacttacgacaagatcctcaaaaatttatcccgcaacagaagactggtgagcgataaggtgggtcaggcctgttgccgtcctattgcttttgacgatgatttatctttcctggacgataatttagtatatcacattctccgaaaacatagtgctaagagatgtgggtgtata

SEQ ID NO: 12273 - DNA, 633 bp, synthetic construct
  misc_feature 1..633: note = source = /note="Description of Artificial Sequence: Synthetic coding sequence"
  source 1..633: mol_type = other DNA
atgaagctctgggatgtcgtggcagtgtgtctggtgcttttgcacactgcatccgcatttcccttgcctgccggaaaacgtcctccggaggcacccgcagaagatcggagcctcgggagaaggagagctccattcgccttgtcatcggattcgaacatgcccgaggattaccccgaccagtttgatgatgttatggacttcatccaggcgaccattaaacgactgaagcgatcccctgacaagcagatggcagtgttgccgagacgcgaaagaaaccggcaagccgcggcagcaaatccagaaaactcgagaggaaagggcagacgcgggcaacgaggcaaaaaccggggatgcgtgttgaccgctatacatctgaatgtcaccgatcttggactgggttacgagactaaggaagaactgatctttagatactgttcaggttcgtgtgacgcagccgaaactacttatgacaagattcttaagaacctgtcccggaatagacggcttgtgtccgataaggtcggacaagcgtgttgcagacccattgcttttgacgacgacctctcattcctcgatgataacttggtgtaccatattcttagaaaacatagcgccaagcgctgcggttgcatt

SEQ ID NO: 12274 - DNA, 633 bp, synthetic construct
  misc_feature 1..633: note = source = /note="Description of Artificial Sequence: Synthetic coding sequence"
  source 1..633: mol_type = other DNA
atgaagctttgggacgtggtcgcggtgtgtttggtgttgctgcacacagctagtgctttccctctgccagcaggaaaaagacctcccgaggcccctgccgaggataggagtctcggacgacgcagggcaccattcgcattgtcatcagactctaacatgcctgaggattatcccgatcaattcgacgatgtgatggacttcattcaggcgaccattaagcgtctgaagagaagtccagacaagcaaatggctgtcctgccgcgtcgtgagaggaacagacaggccgccgcggcaaaccccgagaacagcagggggaagggccggcgcgggcagagggggaaaaacagaggttgtgtgctgactgccattcatttaaacgtcaccgatctggggctcgggtacgaaactaaagaagagctgatctttcgctactgttcaggctcctgcgacgctgccgagaccacctatgacaaaatccttaagaatcttagtcgaaataggcgtctggtgtccgacaaggtgggccaggcctgttgccggccaatcgccttcgacgacgacctttccttcctggatgataacttggtatatcatattctccgcaaacactccgctaagaggtgcggttgtatt

SEQ ID NO: 12275 - DNA, 633 bp, synthetic construct
  misc_feature 1..633: note = source = /note="Description of Artificial Sequence: Synthetic coding sequence"
  source 1..633: mol_type = other DNA
atgaagctgtgggacgtggtggccgtctgcctcgtactcctccacaccgcaagcgcatttcctttaccagccggaaagcggccacccgaagcaccagccgaggatcggtcactaggcagacgacgtgccccttttgctctgtctagcgatagtaacatgcctgaagattaccccgaccagttcgatgatgttatggatttcatccaagctacaatcaagcggcttaagagaagcccagataagcagatggccgtcttgccacgtcgggagcgtaaccgacaggctgcggctgccaaccctgagaattcacgaggcaaagggaggcggggacaacggggcaagaatagagggtgtgtcttgaccgcaatacatttgaatgttacagatctcggtcttggctatgagaccaaggaagagttgatctttcggtactgttcaggttcctgcgacgcggctgaaactacctacgacaagatcctcaagaatttatcgagaaaccgccgtctcgtttcagacaaggtgggacaggcatgctgtcgccccatcgccttcgatgatgatctgagcttccttgacgataatctggtgtatcatattctgcgcaagcactcagcaaagagatgcggatgtatt

SEQ ID NO: 12276 - DNA, 633 bp, synthetic construct
  misc_feature 1..633: note = source = /note="Description of Artificial Sequence: Synthetic coding sequence"
  source 1..633: mol_type = other DNA
atgaagctgtgggatgtggtggcagtgtgcctggtcctgttgcacaccgcatcagccttcccactgccggcgggcaaacgacctccagaggcgcccgcggaagatcgcagcctgggtcgccgccgcgcacccttcgccctgtcgtcagatagcaatatgccggaggactatccggaccagttcgacgatgtcatggatttcatccaagcaaccattaagcgcttgaagcggtcgccagacaagcaaatggccgtgctgccacggagggagcgaaaccggcaggcggccgccgctaacccggagaattcgcgaggaaaaggacggcggggacagagaggaaagaatagaggctgcgtgttgactgctatccatctcaacgtcaccgatctggggttgggttacgaaaccaaggaagagctcattttccggtactgctccgggtcatgtgacgccgctgaaacgacttacgacaagatactgaagaacttgagtcgcaaccgacggcttgtttccgacaaagtcggacaggcatgctgtcgccctatcgcttttgacgacgacctctcgtttcttgatgacaatctcgtctaccacatcctgcgaaagcatagcgccaaacggtgcggctgcatt

SEQ ID NO: 12277 - DNA, 633 bp, synthetic construct
  misc_feature 1..633: note = source = /note="Description of Artificial Sequence: Synthetic coding sequence"
  source 1..633: mol_type = other DNA
atgaagctgtgggacgtcgtggcagtgtgcctggtgctgcttcatactgctagcgcatttccactgcctgcggggaagaggccgcccgaagcaccagcagaggatcggtcgcttggccggcggcgtgccccgtttgcacttagctccgattcgaatatgcccgaggactaccctgatcagtttgatgatgtgatggacttcatccaggctactattaagcgccttaagagatcccctgacaaacaaatggccgtactccctcgccgagaacgtaaccgccaagcggctgcggcgaaccccgaaaactcacgtggtaaaggtcgcagagggcagcggggcaagaatagaggatgtgtgcttaccgccattcacctcaacgtgaccgacttgggccttggatatgaaacgaaggaggaactgatttttcgatactgctcgggtagttgtgacgcagccgaaactacctacgacaaaattctgaaaaacctgtcgcgaaatcggcgccttgtgtccgataaggtcggacaagcatgttgtcgtccaatcgcattcgacgatgatctctccttccttgatgataatctggtgtaccacatcctgcgtaagcattcagcaaagcgttgtggatgtatt

SEQ ID NO: 12278 - DNA, 633 bp, synthetic construct
  misc_feature 1..633: note = source = /note="Description of Artificial Sequence: Synthetic coding sequence"
  source 1..633: mol_type = other DNA
atgaaactgtgggacgtggttgcagtttgtctggtccttctgcacaccgcatccgcctttcctctgcccgcaggcaagcggcccccagaagcgccagcagaggatcggagccttggccgcagacgggcacccttcgcactttcgtcggattcgaatatgcccgaagattacccggatcagtttgacgatgtgatggactttattcaagcaactattaagaggcttaagcgcagcccagataagcagatggccgtgctgcctcgtcgggaaagaaatagacaagccgccgcagcgaatcctgagaactcccgtggtaaaggtaggcgggggcaaaggggtaaaaacagggggtgtgtgctgaccgccatccatcttaatgtgaccgatctcggattgggatacgaaaccaaggaggaactgattttccgctactgtagcggatcctgcgacgcagcggagacgacttacgataagattctgaaaaacctttccagaaatagacgcttggtgtcggataaagtcggacaggcctgttgtagacctattgctttcgacgatgatctgtcttttcttgatgacaatcttgtgtaccatatcctcagaaagcattctgctaagaggtgtggatgtatt

SEQ ID NO: 12279 - DNA, 633 bp, synthetic construct
  misc_feature 1..633: note = source = /note="Description of Artificial Sequence: Synthetic coding sequence"
  source 1..633: mol_type = other DNA
atgaaactctgggacgtggtagctgtctgcctcgtcctgcttcacaccgcatctgccttcccactccccgccggcaagcggcctcctgaagctcctgcggaagataggtccctgggtcgtagacgtgctcctttcgccctctcttctgactctaacatgcctgaagactatccggaccagtttgacgatgtgatggactttatccaagccaccattaagaggctgaaaagatcccccgataagcagatggcagtgctgccgaggagagaacggaatcgacaggccgccgctgcaaatccagaaaactcaagagggaaagggcgtcgaggtcagagggggaaaaacaggggatgcgtgttaaccgcaattcacttgaatgttacggacctgggcctgggttacgagaccaaagaagaactcattttcagatattgcagcggttcgtgcgacgccgctgaaacgacatacgataagatactaaaaaacctgagtcgaaatcgaagactcgtttcagacaaagtgggccaggcatgttgtcgcccaatcgcgttcgatgacgacctgtcctttctcgacgataaccttgtataccatatcctgcgaaagcatagtgctaagagatgtggctgcata

SEQ ID NO: 12280 - DNA, 633 bp, synthetic construct
  misc_feature 1..633: note = source = /note="Description of Artificial Sequence: Synthetic coding sequence"
  source 1..633: mol_type = other DNA
atgaaattgtgggacgttgttgctgtctgtctggtgttgttgcacacagcttccgctttccccctccccgcaggaaaaagaccacctgaagccccggcggaagatagatccctgggccgcagaagggcaccctttgctctgtcatcagactcaaacatgccagaagactatcccgatcagtttgacgatgtgatggattttatccaggcaactatcaaacggctcaaacggagtccagataagcaaatggccgtgcttccgcggagagagcggaatcggcaagcggcagcagctaatcctgagaattcaaggggaaagggtcgcaggggccaaagaggcaaaaaccgaggttgcgtattaaccgcaatccacttaaatgttacagatttaggcctagggtacgagaccaaagaggagctcatcttccgttactgcagtggtagctgtgacgctgcagagacaacatacgataaaattttgaaaaacttgtcccgcaaccgccggctggtgagcgacaaggtaggccaggcctgctgcaggcctattgctttcgatgacgatttgagtttccttgacgacaacctggtataccacatactgcggaaacacagcgctaaacgctgtggctgtatc

SEQ ID NO: 12281 - DNA, 633 bp, synthetic construct
  misc_feature 1..633: note = source = /note="Description of Artificial Sequence: Synthetic coding sequence"
  source 1..633: mol_type = other DNA
atgaagctgtgggatgtggtcgctgtctgcctggtgcttttgcatacggcatccgctttcccattgcccgcgggaaagcggcctcccgaggcacctgccgaggaccgctccttgggcagacggcgcgccccgttcgcactgtcgtcggattccaacatgccggaagattacccagatcaatttgatgacgtcatggatttcatccaggcaactatcaagagacttaaacgctcaccggataagcaaatggcggtgctgccgcgtagagagaggaatagacaggccgcggcggcgaatccggaaaatagtaggggaaagggccgcagaggtcaaagagggaagaacagagggtgtgtgctcaccgcgatccatctgaacgtgacggacctcggtctgggatacgagactaaagaagaactgattttcaggtactgctcagggtcgtgcgatgccgccgaaaccacgtatgacaaaatcctcaaaaatctgagccggaatagacggttggtgtcagacaaggtgggccaagcgtgctgtcggcctattgcctttgacgacgatctgtcatttctggacgacaacctggtctaccacatcctgcgcaagcactccgccaagagatgcggatgcatc

SEQ ID NO: 12282 - DNA, 633 bp, synthetic construct
  misc_feature 1..633: note = source = /note="Description of Artificial Sequence: Synthetic coding sequence"
  source 1..633: mol_type = other DNA
atgaaactgtgggacgtggttgctgtctgcttggtgcttctccacaccgcctccgccttcccccttcctgccggcaagaggccgccggaggctccggctgaagatcgttctctcggtcggaggcgcgcccctttcgccctctccagcgactccaacatgccggaggactacccggatcagttcgacgacgtcatggacttcatccaggcaaccatcaagcgactcaagcgctctcctgacaaacagatggctgtcctcccaagacgcgagcgcaatcgtcaagcagctgctgcgaaccctgagaactccagaggtaaaggcaggcgaggccagcgtggaaaaaacaggggctgcgtactgaccgctattcacttgaacgtgaccgatctgggtctgggctacgagactaaagaggagctgatttttcgatactgtagcggctcttgcgatgcggctgagactacctacgacaagatcctgaagaacctatcccgcaaccgcaggttggtgtcagacaaggtcggtcaggcctgttgccgccctatcgcctttgacgatgacctatctttcttggacgacaacctcgtttatcacatattgaggaagcactctgctaagcgttgcggttgtatt

SEQ ID NO: 12283 - DNA, 633 bp, synthetic construct
  misc_feature 1..633: note = source = /note="Description of Artificial Sequence: Synthetic coding sequence"
  source 1..633: mol_type = other DNA
atgaagctgtgggatgtcgtggctgtgtgcttggtgcttctgcatacagcatccgcgtttccgcttcccgcaggcaaaaggcccccggaggcgcctgccgaggatagaagccttggtaggcgccgtgccccatttgccctgagctctgattctaatatgccagaggattaccctgaccagtttgacgacgttatggactttatccaggcgaccatcaaacgtctgaagcggtcccccgataaacagatggccgtgttaccccggcgcgaacggaaccgacaagcggccgcggccaatcctgagaactcccgcggcaagggaaggcgggggcagcgggggaaaaaccgagggtgcgttttgactgccatccatttgaacgtgacagacctcgggctgggatacgaaacaaaggaagaactcattttccgctactgctccggaagttgcgatgctgccgagacaacctacgataagattctcaagaacctatccagaaatcgtcggctggtcagcgacaaggtgggccaggcctgctgccggcctattgcgttcgacgacgatctgagctttctggacgataacttagtgtatcacatcttgcgcaagcatagtgctaagcggtgtgggtgcatc

SEQ ID NO: 12284 - DNA, 633 bp, synthetic construct
  misc_feature 1..633: note = source = /note="Description of Artificial Sequence: Synthetic coding sequence"
  source 1..633: mol_type = other DNA
atgaagctgtgggacgtggttgccgtttgcctggttctactgcataccgcaagcgcttttcccttgcccgccggcaaaaggccaccagaagccccagccgaagacaggtcccttggacgtcgccgggcgcccttcgccctctcaagcgattctaacatgccggaagactaccccgatcagtttgatgacgtgatggattttattcaagctaccattaagaggttaaaaaggtcacctgacaaacagatggccgttctgccacgacgggagagaaataggcaagccgccgccgcaaatccggagaattctaggggaaaaggtaggaggggtcagagaggaaagaacaggggctgcgtgctaaccgcaattcacctgaatgtgactgacttgggccttgggtacgaaaccaaggaagaactcatttttagatattgcagtgggagttgtgatgctgctgagacaacttacgataagatcctgaagaacctcagtagaaataggcggctggttagcgataaggtgggccaggcatgctgccgacctattgcatttgatgatgacctgtcattcctggacgacaacttagtgtatcacattctgagaaaacattcagcgaaacgatgtgggtgtata

SEQ ID NO: 12285 - DNA, 633 bp, synthetic construct
  misc_feature 1..633: note = source = /note="Description of Artificial Sequence: Synthetic coding sequence"
  source 1..633: mol_type = other DNA
atgaagctttgggacgtagtagcagtctgcctggtgctgcttcacacagcctctgcctttcctctaccggcgggcaaaagaccacctgaggcgccagctgaggaccgttcactcggtagacgtagagcaccgtttgctttatcctctgactcaaacatgcccgaggactaccccgatcagttcgacgatgtcatggactttattcaggccacaattaagaggctcaaacggtcccccgacaagcagatggccgtactacccagacgggagcggaatcggcaggccgctgcagccaaccccgagaacagtcgaggtaaaggcaggcgagggcagaggggtaagaatagggggtgtgttctcaccgcaattcacctgaacgtgacagacctgggcctgggttacgaaaccaaagaagagctcatctttcgctactgtagcggatcctgtgacgcagccgaaactacttatgataaaatactgaaaaacctgtcccgaaacaggcgattagtctctgataaggtggggcaagcatgttgtcggcctattgctttcgacgacgacttgagctttttggacgataacctggtgtaccacattctgcgaaagcatagcgcaaagcgttgcggttgtatc

SEQ ID NO: 12286 - DNA, 633 bp, synthetic construct
  misc_feature 1..633: note = source = /note="Description of Artificial Sequence: Synthetic coding sequence"
  source 1..633: mol_type = other DNA
atgaaactgtgggacgtggtggcggtatgcttggttctgctgcacacggcatcggccttccctctgccggccggaaaaagaccgccagaggcccctgccgaggatagatccctgggacggcgtagagcgccgttcgccctgtcatcagactcgaatatgccggaggactaccctgaccagtttgacgatgtcatggacttcatccaagcaactataaagagacttaagcgctcgccagataagcaaatggccgtgctgccgagacgcgaacgcaaccggcaggcagctgcagccaatccggaaaattccaggggcaaaggaaggaggggccagagaggcaagaaccgaggctgtgtgctcactgccatccacctgaacgtgaccgacctgggcctcggctatgagactaaggaagaattgattttcagatactgctcaggaagctgcgatgccgctgaaaccacgtacgacaaaatcctcaagaacctgtcaagaaatcggcgactcgtctcggataaggtgggacaggcttgctgccgcccgatcgcttttgatgatgatctgtccttcttggacgacaatctcgtgtaccatattctgcggaagcattccgctaagcggtgtgggtgtatc

SEQ ID NO: 12287 - DNA, 633 bp, synthetic construct
  misc_feature 1..633: note = source = /note="Description of Artificial Sequence: Synthetic coding sequence"
  source 1..633: mol_type = other DNA
atgaagctgtgggacgtggttgcggtttgcctggtgctgctccatacggcgtccgcgttccctctccctgccggcaagaggccgcccgaggctccagccgaggaccgctcactcggtcggcgtagagccccgttcgctctgtcctcagattccaatatgcctgaagattatccagatcagtttgacgacgtgatggacttcatacaggcaacgattaagcggctcaagcgaagcccagataagcagatggccgtgctcccgcggcgggagagaaacaggcaggcagccgctgctaatccggagaacagcaggggtaaaggacggcgcggacaacgggggaagaatcgcggatgtgtcttgactgcaatccatctgaatgtcactgatctcgggctgggatacgaaaccaaagaagaactgatcttcagatactgctcaggatcttgcgatgcagcagaaactacctacgacaaaattctgaagaacctttcgcgcaaccggcgactcgtttctgacaaggtgggacaagcatgctgccgaccgatcgcatttgacgacgacctgtccttcttggatgacaaccttgtctaccacatcctgcgcaaacacagcgcgaagcggtgtggttgcatc

SEQ ID NO: 12288 - DNA, 633 bp, synthetic construct
  misc_feature 1..633: note = source = /note="Description of Artificial Sequence: Synthetic coding sequence"
  source 1..633: mol_type = other DNA
atgaagctgtgggatgttgtggcagtatgcctggttctgctgcacacggcctcagcctttcctcttccggctggcaaaaggccgcctgaagctcccgccgaggacagaagcttaggacgacgccgagctccctttgccctctcatccgatagtaacatgccagaggattaccctgaccagttcgatgacgtgatggatttcattcaggcgactattaagagactgaagagatccccggataagcagatggccgttttaccccggcgggagcgtaaccgccaggcagcagcagccaaccctgagaactcacggggcaaaggccgtcggggccagagagggaagaatcgaggctgcgtacttacagccatccatctcaacgtgaccgatctggggctggggtacgaaaccaaagaggaacttatctttcgatactgtagcggcagctgtgatgccgccgaaacaacctacgataagatactaaagaatctttccaggaaccgacgtctcgtgtctgacaaggtgggccaagcctgttgccggccaatcgccttcgatgacgatttgtcattcttggatgacaatctggtctatcatattctccgtaagcattccgctaagcgatgtggctgtatt

SEQ ID NO: 12289 - DNA, 633 bp, synthetic construct
  misc_feature 1..633: note = source = /note="Description of Artificial Sequence: Synthetic coding sequence"
  source 1..633: mol_type = other DNA
atgaagttgtgggatgttgtcgcagtttgtcttgttttattgcacaccgcctcagcatttccgctccccgctggaaagcgacctccggaagctccagctgaagatagaagcctaggtcgtaggcgcgctccttttgcattgtcttccgactccaatatgcctgaggactaccccgatcaatttgatgacgtgatggatttcattcaagctaccatcaagcgattaaagaggtctcctgacaaacaaatggcggtattgccacgtcgagagaggaaccgacaagctgcggctgcaaacccggaaaacagtcgaggcaagggtagacgtggacagcggggtaaaaaccgtggatgtgtactaaccgcaattcatcttaatgtcactgacttgggacttggttatgagaccaaagaagaacttattttcagatactgctcaggttcgtgcgatgctgcagaaacgacatacgataaaattttgaaaaatctctcaaggaacaggcgccttgtttctgataaagttggacaggcgtgttgccgtccgattgcattcgatgatgatctgtcgttcttggatgacaatttagtttatcacatcttgcgtaaacattctgccaaaagatgcggttgcata

SEQ ID NO: 12290 - DNA, 633 bp, synthetic construct
  misc_feature 1..633: note = source = /note="Description of Artificial Sequence: Synthetic coding sequence"
  source 1..633: mol_type = other DNA
atgaagctttgggacgtcgtcgccgtctgccttgttctgctgcataccgcctctgcttttccactgcctgcagggaaaagaccaccggaggccccagcggaagacagatccctcggtcgaaggcgggccccgttcgcattgtcttctgatagtaacatgcctgaggattacccagaccagttcgatgacgtcatggatttcattcaagcaacaataaagaggctgaagcgatctcctgacaaacagatggctgtcctgccccggcgcgagagaaaccgccaagccgcggcagcgaatcccgaaaacagccgagggaaaggacgccgcgggcaaagaggcaaaaatcgtggctgcgttctgactgcaatccatttgaatgttacagatctcggcctgggatacgaaaccaaagaggaactgattttccgctattgctcgggatcttgtgacgcggctgagactacatacgataagattctgaaaaacctgagtcggaatcgacgtctagtgtctgataaggtcggacaagcttgttgtaggcctatagcatttgacgatgacttatctttccttgacgacaatctggtgtatcacatactgcggaaacatagcgctaagagatgtggctgcatc

SEQ ID NO: 12291 - DNA, 633 bp, synthetic construct
  misc_feature 1..633: note = source = /note="Description of Artificial Sequence: Synthetic coding sequence"
  source 1..633: mol_type = other DNA
atgaagttgtgggacgtggtggctgtctgcctcgtgctgctccacactgcctccgcgttccctttgccggccggaaagaggccgccggaggcccccgcagaggaccgctcgttgggacgtcgcagagcaccattcgcgctttcatctgattcgaacatgccagaagattacccggaccagtttgatgatgtcatggatttcattcaggccaccattaagcggctgaagcggtcaccagataagcagatggctgttctgcccagaagagaacgcaataggcaggccgcagccgctaaccccgaaaacagcaggggcaaaggacggagaggtcagcgcggtaagaacaggggatgtgtgctgaccgctatccacctgaacgtcactgacctgggcctgggatatgagactaaagaagaactgatcttccggtactgcagcgggtcatgcgacgctgcagaaactacgtacgataagatcctgaaaaacctgtcgcggaataggcgacttgtgtcagacaaagtcggtcaggcgtgttgcagacctattgctttcgatgatgatctctccttcttggacgacaacttggtgtaccacatcctgagaaaacactccgcgaagcgctgcggatgtatc

SEQ ID NO: 12292 - DNA, 633 bp, synthetic construct
  misc_feature 1..633: note = source = /note="Description of Artificial Sequence: Synthetic coding sequence"
  source 1..633: mol_type = other DNA
atgaaattgtgggatgtggtggcggtgtgcctggtgctcctccacacggcctccgcgttccctctgccggctgggaagcggccgccggaagccccagccgaggataggagcctgggccgccggagagctccgttcgccctctcgtccgactctaatatgccggaggactatccagatcaattcgacgacgtgatggacttcatccaggccactatcaagcggctgaaacgctcaccggacaagcaaatggcagtgcttccccgccgggaacggaatcggcaggcagccgccgctaatccagagaactcacgcggtaagggacggcggggccaacgaggaaagaaccgcggctgcgtacttaccgccatccacttgaacgtgactgacttgggattggggtacgaaaccaaggaggagcttatctttcgctactgctccggatcgtgtgatgcagctgaaaccacctacgacaagatcctgaagaatctgtcgaggaaccgcagactggtgagcgacaaggtgggacaagcatgctgcagacctatcgcgttcgatgacgacctgtcctttctggacgacaatctggtgtaccatattctccgcaagcactcggcaaagcgatgcggatgcatt

SEQ ID NO: 12293 - DNA, 633 bp, synthetic construct
  misc_feature 1..633: note = source = /note="Description of Artificial Sequence: Synthetic coding sequence"
  source 1..633: mol_type = other DNA
atgaagttgtgggatgttgtggcagtttgtcttgtgctacttcataccgcaagtgcgttccctctgccagccggaaaacgaccacctgaagcacctgccgaggaccgttcccttggaaggaggagggcaccattcgccctttcttctgattctaacatgcctgaagattatcccgatcaattcgatgatgttatggactttattcaggcaactatcaaaagattgaaacgtagtccagacaaacagatggctgtgttgccaagaagagaaagaaacagacaagctgctgccgctaacccggagaattcaagagggaagggccgtcgtggtcaacgggggaaaaaccgaggatgcgtgctcactgcgatacacctgaacgtgacagatctgggtttggggtatgagaccaaggaagagctcatctttcgttattgttctgggagttgtgacgctgccgaaaccacctatgataagattttaaagaacctcagccgtaatcgccgccttgtttcagacaaggtgggtcaggcttgctgccgacctatagcattcgacgatgatcttagcttccttgatgacaaccttgtatatcatattctgagaaagcatagcgcaaagcgttgtggttgcatc

SEQ ID NO: 12294 - DNA, 633 bp, synthetic construct
  misc_feature 1..633: note = source = /note="Description of Artificial Sequence: Synthetic coding sequence"
  source 1..633: mol_type = other DNA
atgaagctatgggatgtggtcgcagtctgcctggtcctgcttcacaccgccagcgcctttccactgcctgctggtaaacggcctccggaagcaccagccgaagatcgtagtctgggcaggaggagggcgcccttcgcactgagttcagattcaaacatgccagaagactaccccgaccaattcgacgacgtcatggactttatccaggcaacgatcaagcgtcttaagcgaagtcccgacaaacagatggctgttctgccgaggcgagaacgcaaccgacaggccgcagccgccaatcctgaaaactcgcgcggcaagggacgaaggggccagcgcggcaaaaacaggggatgcgtgctgactgcgattcatttgaacgtgactgatcttggcctgggttacgagaccaaagaggagttaatatttcgttattgtagcggctcatgtgacgctgccgaaactacctacgacaagatactgaaaaatctttctaggaatcggcggctggtctcggacaaagtcggtcaggcttgctgcagaccgatagcctttgatgatgacttgagcttccttgatgacaaccttgtctaccatatcctacggaaacactccgctaaacgctgtggctgcatt

SEQ ID NO: 12295 - DNA, 633 bp, synthetic construct
  misc_feature 1..633: note = source = /note="Description of Artificial Sequence: Synthetic coding sequence"
  source 1..633: mol_type = other DNA
atgaagctgtgggatgttgtggccgtgtgcctcgtcttgctgcatacagcatcagctttcccactgcccgcaggaaaacgtccacctgaggcccccgctgaagaccgcagtctgggccgtcgccgcgctcccttcgcattgtctagcgattctaacatgcctgaagattacccagaccagttcgatgacgtgatggatttcatccaggccactatcaagcgcctcaaacgttcacccgacaagcagatggcagtgctgcctcgtagagaaagaaaccgtcaagctgcagccgctaaccccgagaatagtaggggaaagggtcgcagaggccaaaggggcaagaaccgtggttgcgtccttacagctatccatttgaacgtaaccgacctcggcctgggttacgaaaccaaggaggagctgatctttcgttactgctctggatcctgcgatgccgccgaaaccacctatgacaagatcctgaaaaacttgtcacgcaacagacgtctggttagcgataaagttggtcaggcctgctgtcgccccattgcctttgacgatgacctttctttcctggatgacaaccttgtgtatcatatactgcgtaagcactccgccaaacgctgcggctgcatc

SEQ ID NO: 12296 - DNA, 633 bp, synthetic construct
  misc_feature 1..633: note = source = /note="Description of Artificial Sequence: Synthetic coding sequence"
  source 1..633: mol_type = other DNA
atgaagctgtgggatgtggtcgcagtgtgcctggtgctgctgcacaccgcgtctgcattcccgctgccagcaggtaaaagaccgcctgaggcaccagcagaagatcgctcgttgggcagaagaagagcacccttcgctctgtcaagcgatagtaacatgccagaagattatcctgatcagtttgatgacgtcatggacttcatccaagctaccataaaacggctcaaacggtccccggacaagcagatggcagtgctccctaggagagaaagaaatcgacaagccgcagcggcgaaccctgaaaattcgcgaggcaagggacggcgtggtcagcgcggaaaaaacagggggtgtgtgctgacggccattcatcttaacgtgactgatctgggtctgggatacgaaaccaaggaggaacttatctttcgctactgttctggatcatgtgatgcggctgaaactacctacgataagatcctgaagaacctctcccgcaatagaaggcttgtgtcggacaaggtcggacaagcatgttgccgcccgattgcatttgacgacgatctctcctttcttgacgataacctcgtataccacatacttagaaagcattcggcaaaaagatgtggttgcatc

SEQ ID NO: 12297 - DNA, 633 bp, synthetic construct
  misc_feature 1..633: note = source = /note="Description of Artificial Sequence: Synthetic coding sequence"
  source 1..633: mol_type = other DNA
atgaaactttgggacgttgtcgcagtatgtcttgtgctgctgcacactgcaagcgcatttccgctgccagccggtaaaaggcctcctgaggctccggcggaggatcgatcgctgggccgtcgacgggccccatttgccctgtcgtcggattcaaatatgccagaggactatcctgatcaatttgacgatgtgatggatttcatccaggcaaccataaagcgtctcaagaggagtccagacaaacagatggcagtgttgccacgccgtgagaggaacagacaagcagccgcagctaaccccgaaaatagccgcgggaagggtcgccgcggacaaagaggaaagaatagagggtgcgtgcttactgcaattcatctcaatgtcaccgaccttggcctcggttacgagactaaagaagaattgatcttccgctactgtagcggctcgtgtgacgccgcagaaactacctacgacaaaatcctgaaaaacctttcaagaaacaggcggcttgtctcagataaggtggggcaagcatgttgcaggccaatcgcctttgatgatgatttgtccttccttgatgataatctcgtgtaccatattcttaggaagcactccgccaagcgatgtggttgcatt

SEQ ID NO: 12298 - DNA, 633 bp, synthetic construct
  misc_feature 1..633: note = source = /note="Description of Artificial Sequence: Synthetic coding sequence"
  source 1..633: mol_type = other DNA
atgaaattgtgggatgtcgtcgccgtgtgcctcgtgcttctacataccgccagcgcattccctctgcctgccggaaagcgaccccccgaggctccagcagaggacagatctctggggcgtaggcgggctccttttgctctgtccagcgattctaacatgcccgaagattatccagatcagtttgatgacgtaatggacttcatccaggctaccatcaaaagattgaaacggtcccccgacaagcagatggccgtgctcccccggcgagagcggaatcggcaggccgccgccgctaacccagaaaactctaggggcaaagggcgacgggggcagagaggcaaaaacaggggctgtgtgttaaccgcaatacacctgaatgtaaccgatctcggcctcggatatgagacaaaagaggagctgatcttccggtactgtagtggatcctgcgacgccgcagagaccacctacgacaaaatcctgaagaatctgtccaggaacagacgcctggtgtccgataaggtcggtcaggcttgctgccggcccatagccttcgatgatgacctgagcttcctagatgacaacctggtttaccacattctgcggaaacacagcgccaagaggtgcggctgcatc

SEQ ID NO: 12299 - DNA, 633 bp, synthetic construct
  misc_feature 1..633: note = source = /note="Description of Artificial Sequence: Synthetic coding sequence"
  source 1..633: mol_type = other DNA
atgaagctgtgggacgtggtcgcggtgtgtctggtgcttctccatactgcatcggcgttcccgctgcccgcaggaaagcggccgccggaggcccctgctgaggaccgctccctgggacggagacgcgcgccattcgcgctctccagcgactccaacatgcctgaggattatccggatcagttcgacgacgtgatggatttcatccaagcaactatcaagaggttgaagcggagcccggataagcagatggccgtcctgccaaggcgggagcggaacaggcaggccgccgcagcgaacccggagaactcgaggggcaagggcagacggggacaacgcggaaaaaaccgcggatgcgtgcttaccgctatccacctgaatgtcaccgatctcgggctgggctacgagacgaaggaagaacttatcttccgctactgcagcggatcctgcgatgctgctgaaaccacgtacgacaagattctgaaaaacctttcacgcaatcggcggctcgtctccgataaggtgggacaggcctgctgccggcctattgcattcgacgacgatctgtcctttctcgacgataatctggtctaccacatcctgaggaagcatagcgccaagcggtgcggatgcatt

SEQ ID NO: 12300 - DNA, 633 bp, synthetic construct
  misc_feature 1..633: note = source = /note="Description of Artificial Sequence: Synthetic coding sequence"
  source 1..633: mol_type = other DNA
atgaagctatgggatgtggttgctgtttgcctggtcctgctgcatactgccagtgcgtttccactgcccgccggcaagcgcccgcccgaggcccccgcagaggatcggagtcttggtcggcgcagggcgcctttcgctctttctagtgacagcaatatgccggaagactaccccgaccaattcgatgacgtcatggacttcatccaggcgaccattaagaggctgaaacgatccccagataagcagatggcagttctgcctcgtcgtgaaaggaacagacaggctgctgccgctaacccagagaattcacgggggaagggcagaaggggccagcgaggcaaaaaccggggatgcgttctgaccgctattcatctgaatgtaactgacttgggattagggtatgagaccaaggaggagctgattttccggtattgcagcggttcctgtgatgctgcagagactacctacgataaaatcctgaaaaatttgtctagaaacagacggcttgtctcagataaagtgggacaagcgtgctgcagaccaattgccttcgatgacgacctgtccttcctcgatgacaatctggtgtaccacatcctgcggaagcactctgccaaaagatgtgggtgcatc

SEQ ID NO: 12301 - DNA, 633 bp, synthetic construct
  misc_feature 1..633: note = source = /note="Description of Artificial Sequence: Synthetic coding sequence"
  source 1..633: mol_type = other DNA
atgaaactctgggatgtggtggcagtgtgtttggttcttctgcatacggcatctgcgtttcctcttcccgccggtaagaggccacctgaagcacctgcagaagatcggtcccttggacggcgaagggcgccttttgcactctcttccgacagcaacatgccagaggattacccagaccaatttgatgacgttatggacttcattcaagctaccatcaaacggcttaagagatcgccggataagcagatggcggtgcttcctagaagagagcggaacagacaggccgccgccgctaacccagagaactcgagaggaaagggtcgtagaggacagagagggaaaaacagaggctgtgtcctcactgcgattcatctcaacgtcacggatctgggacttggatacgaaaccaaggaagaactgatctttagatactgttcgggctcatgtgatgcagctgaaactacgtatgataagattctcaagaatttgtcacggaaccggaggctggtgtccgataaagtgggtcaagcctgctgtagacccatcgctttcgatgatgacctgtccttccttgatgacaacctggtgtaccatatccttcgaaagcatagcgcaaagcggtgcggttgtatt

SEQ ID NO: 12302 - DNA, 633 bp, synthetic construct
  misc_feature 1..633: note = source = /note="Description of Artificial Sequence: Synthetic coding sequence"
  source 1..633: mol_type = other DNA
atgaagctctgggacgttgtggcagtctgccttgtcctgcttcacactgcctccgcctttcctctccctgcaggaaagcggcctccggaagcacctgctgaggaccggagcctgggccgcaggagggccccttttgcactgagctccgactcaaacatgccagaggattacccagatcagtttgacgacgtaatggacttcatacaggcaacgatcaagcggctgaagcgcagccccgataaacagatggctgtgctgccccgacgggaaagaaaccgacaggctgctgcagcaaaccctgagaatagccgaggtaaaggacgacgcggccagcgcggcaagaataggggttgtgtattgaccgctatacaccttaacgtgacggatctcggattgggttatgagaccaaggaagagctgatcttccgatattgctctggatcttgtgatgcagccgagacaacatacgataagatcctcaagaacttgtcaaggaataggaggcttgtcagcgataaagtcgggcaggcatgttgtcgccccattgcctttgatgacgatctgtcttttctggacgacaacctggtgtatcatatcctgcgaaaacacagtgcaaagcgctgtgggtgcatc

SEQ ID NO: 12303 - DNA, 633 bp, synthetic construct
  misc_feature 1..633: note = source = /note="Description of Artificial Sequence: Synthetic coding sequence"
  source 1..633: mol_type = other DNA
atgaagttgtgggacgtggtggccgtgtgccttgtgcttttgcatactgccagcgccttccccctccctgctggaaagcggccaccggaggcccccgccgaggataggtctctcgggcgcagaagagcaccattcgcactgagttcagacagcaacatgcccgaggattaccctgaccagttcgatgatgtcatggactttatacaagctaccattaaaaggctgaagcggtctccagacaagcagatggccgtcctacccagacgagagcgtaacagacaggccgccgcagccaaccctgaaaattcaagagggaagggaaggaggggccagaggggcaaaaataggggctgtgtgctcacagcaattcacctcaacgtgaccgatttgggattaggatatgagacaaaggaggagctcatttttaggtattgctcaggtagctgcgatgccgccgaaacaacctacgacaagatattgaagaacctgagccgaaaccggcgactcgtgtccgacaaggtgggccaggcttgctgcaggcctatcgcctttgatgacgatctgagcttcctggacgacaatctggtctatcacattttacggaaacactcggccaagaggtgtggctgcatc

SEQ ID NO: 12304 - DNA, 633 bp, synthetic construct
  misc_feature 1..633: note = source = /note="Description of Artificial Sequence: Synthetic coding sequence"
  source 1..633: mol_type = other DNA
atgaaactgtgggacgtggtagctgtgtgcctggtgctactgcacactgccagtgcattcccactcccagccgggaaacgccccccagaagcccccgctgaagaccgcagtctaggaagaaggagagcccctttcgccctgagttccgattccaacatgccagaagattacccagatcagttcgatgatgtgatggattttattcaggccacaatcaaaagactgaaaagatctcctgataagcagatggccgtgttgccccgccgggaacgaaatcgccaggctgccgcagccaaccccgagaattcccggggaaagggacggcggggacagcgagggaaaaacaggggatgcgtgctcactgccatccacctcaatgtgactgatctggggttagggtacgaaacaaaagaagagctgatatttcggtactgctctggaagttgcgatgctgccgaaactacatatgacaaaatactgaaaaacttgtcccgcaatagacggctcgtgtccgataaagtcgggcaggcctgttgtcggcccatcgcctttgatgatgatctctcctttctagatgataatttagtctatcacatcctgcggaagcatagtgcgaaacgctgcgggtgtatc

SEQ ID NO: 12305 - DNA, 633 bp, synthetic construct
  misc_feature 1..633: note = source = /note="Description of Artificial Sequence: Synthetic coding sequence"
  source 1..633: mol_type = other DNA
atgaaactgtgggacgtggttgcagtgtgtctggtcctcttgcataccgcgtccgcgtttcctctgccagcaggaaaaagacctcctgaagcccccgcagaggatcggagccttggaagaaggcgcgctccatttgcactttcgagcgactcgaacatgcccgaggactacccggaccagttcgacgatgtgatggacttcatccaagcaacgattaagcggcttaagagatccccagacaagcaaatggctgtgctccctcggcgtgagagaaatcgccaggcagccgccgccaatcctgaaaattctcgaggtaaaggtagaagaggccagcgcggcaagaatcgaggatgcgtgctgactgcaatccacctgaacgtgaccgatctgggactgggatacgaaaccaaggaggagctgatatttcgctactgttccggttcatgtgatgcggccgagacgacttacgacaagatcctgaaaaatctctcccggaacagacgtctcgtgtcagataaggttggccaggcttgttgccgtcctattgcctttgatgacgatctctccttcctcgatgacaatctcgtctatcatattctcaggaaacattctgccaaaaggtgtggatgtatc

SEQ ID NO: 12306 - DNA, 633 bp, synthetic construct
  misc_feature 1..633: note = source = /note="Description of Artificial Sequence: Synthetic coding sequence"
  source 1..633: mol_type = other DNA
atgaagctctgggacgtggtggccgtgtgtctggtgctgctccatactgcctccgcttttcctctgccggcggggaagaggccgccagaagctccagccgaggaccgatcactgggacggcgcagagctccgtttgccttgtcgagcgattccaatatgccagaggactacccggaccaattcgatgacgtgatggactttatccaggcgactatcaagcggctcaaaaggagcccagataagcagatggccgtgttgccgcggcgcgaaagaaaccggcaggcagcggccgcgaaccctgaaaactcccgaggaaaaggacgacggggccagcggggaaaaaaccggggctgtgtcttgaccgcaatccacctgaacgtcactgatctgggtctggggtacgaaaccaaggaagagctcattttccgctactgctcaggctcttgcgacgcagcagagactacctacgacaagatactcaagaatttgtcgcgcaatagacgcctggtcagcgataaggtcggacaagcatgttgccgcccgatcgcattcgatgatgacctttcgtttctggacgacaatctcgtctaccacattttgcggaaacattccgccaaacggtgcggatgcatc

SEQ ID NO: 12307 - DNA, 633 bp, synthetic construct
  misc_feature 1..633: note = source = /note="Description of Artificial Sequence: Synthetic coding sequence"
  source 1..633: mol_type = other DNA
atgaaactgtgggacgtggtggcggtctgcctcgtgctgctgcatacagctagtgcatttcccttgcctgccgggaagcgcccccctgaggctcctgccgaagaccgaagcctggggagaaggcgggccccattcgctttgtcttctgatagtaatatgcctgaagactaccccgatcagttcgacgacgtgatggatttcattcaggctacaatcaaacggcttaagagaagccccgataagcagatggctgtcctgcctcgcagagaaagaaatcgtcaggccgcggctgccaaccccgagaatagccgcggcaaaggccgtcgtggacagagaggcaagaaccgcggatgtgtcctgacagctatccaccttaacgttaccgacctgggtctaggctacgaaactaaggaggagttgatcttcaggtactgctcaggatcctgcgacgccgctgaaacgacttacgacaaaatactgaaaaacttgtcacgcaacagacggttagtcagtgataaggtaggccaggcgtgttgtcggcctatcgcatttgatgacgatctctcgtttcttgatgataacttggtgtatcatatcctgcgcaaacactcggctaagagatgcggctgtatc

SEQ ID NO: 12308 - DNA, 633 bp, synthetic construct
  misc_feature 1..633: note = source = /note="Description of Artificial Sequence: Synthetic coding sequence"
  source 1..633: mol_type = other DNA
atgaaactctgggacgtcgttgcggtgtgcctcgtccttctgcacactgcctcagcgttcccactgccagccggtaaaagaccgcctgaggctcccgcggaagatcgatcgcttggacggcgccgcgccccttttgcactgagctccgactcaaacatgccggaggactacccggaccaattcgatgacgtgatggattttatccaggcgacgattaagagattgaagcgctcgccggacaagcagatggccgtgctgcccaggcgtgagagaaatcggcaagccgctgcagccaacccggaaaatagccgcgggaagggcagacgcggccagaggggaaagaaccggggctgtgtgctcactgcaattcatctgaacgtcaccgatctcggactgggatacgaaaccaaagaagagctgatcttcagatattgctccggatcttgcgacgccgccgaaaccacttacgacaagatcctcaagaacttgtcgcggaacaggcggctggtgtcggacaaggtggggcaggcatgttgccgcccaatcgctttcgacgatgacctgtccttcttggatgataatctggtgtaccacatcctccgcaagcatagcgcgaaacggtgcggatgcatc

SEQ ID NO: 12309 - DNA, 633 bp, synthetic construct
  misc_feature 1..633: note = source = /note="Description of Artificial Sequence: Synthetic coding sequence"
  source 1..633: mol_type = other DNA
atgaaactgtgggacgtggtggcggtgtgcctcgtcttgctgcacaccgccagcgccttccccttgcctgctgggaagaggccgccagaagcgccagccgaagacagaagcctgggcagaagacgcgccccgtttgcactgtcctccgacagcaatatgccggaggattaccccgaccagttcgatgacgtcatggactttatccaagccaccatcaaacggctgaagcggtcgcctgataagcagatggcggtgctcccgcgccgggaaaggaaccgacaagctgcggccgcgaaccctgaaaactcgcgcggaaaaggaagaagagggcagcggggtaaaaatcgtggatgtgtgctgaccgccattcaccttaacgtcaccgacctgggccttgggtacgaaaccaaagaagaattgattttcagatactgctcgggttcgtgcgacgccgcagaaactacttacgacaagatcctgaagaatctgtcgagaaacagaaggctggtgtcggacaaggtggggcaggcttgctgcagaccgatcgctttcgacgacgacctgtcgttcctcgacgataacctcgtctaccatattctgcgcaaacactcagcgaagcggtgcggatgcatc

SEQ ID NO: 12310 - DNA, 633 bp, synthetic construct
  misc_feature 1..633: note = source = /note="Description of Artificial Sequence: Synthetic coding sequence"
  source 1..633: mol_type = other DNA
atgaagctgtgggacgtggttgcagtgtgccttgtcctgctgcatactgcatcggcattccccctgccagctgggaagcgcccgccagaagcccctgccgaagatcggtcactcggtcgtcgtagagccccatttgcactgtcctcagatagcaacatgccggaagattaccctgatcagtttgacgatgtgatggactttatacaagcaaccatcaagcggctgaagagatccccggacaaacaaatggcggtgctgccacgacgagagaggaatcggcaggcagcagcagcaaatccagagaactcgagaggcaaagggcgccgcggacaacgggggaaaaaccgcggatgcgtcctgaccgcgatccatcttaatgtgacggatcttgggctgggatacgaaactaaggaggaacttatctttcgctactgttcggggagctgtgacgcagccgaaacgacctacgacaagatccttaagaatctgtccagaaataggaggctggtgtccgacaaggtgggtcaagcatgttgtcgacccatcgcatttgacgatgatctgtcgttccttgatgacaatctggtttaccacattcttcggaaacattcggcaaagagatgtggttgtatc

SEQ ID NO: 12311 - DNA, 633 bp, synthetic construct
  misc_feature 1..633: note = source = /note="Description of Artificial Sequence: Synthetic coding sequence"
  source 1..633: mol_type = other DNA
atgaagctgtgggatgtggtggcagtctgtctggtgttgcttcataccgcatccgcgtttcctctcccagcaggaaagcgaccaccagaagcaccagcagaggaccgttcgttgggaagaaggagagcaccttttgccctgtcctccgattcaaacatgcctgaagattaccctgaccagtttgacgatgtcatggatttcatacaggccacgattaaacgtcttaagcgcagccccgacaaacaaatggcggtccttccacgaagagaacgtaacaggcaagccgcggccgcaaaccccgaaaactcgcggggcaagggacggagaggtcagcgcggtaagaaccggggctgcgtgcttaccgcaattcatctgaacgtgacggatttgggcctcggttacgaaactaaggaggaactcatctttcgatactgtagcggatcctgtgacgcagcagaaaccacctacgacaagattctcaaaaacttgtcgcgcaatcgtagacttgtgtccgataaggtgggccaggcgtgttgcagacctattgcatttgatgatgacctgtcgttcctggacgacaacctcgtctatcatattctgcggaagcattcggcaaagagatgtggatgtata

SEQ ID NO: 12312 - DNA, 633 bp, synthetic construct
  misc_feature 1..633: note = source = /note="Description of Artificial Sequence: Synthetic coding sequence"
  source 1..633: mol_type = other DNA
atgaaattgtgggacgtggtggcggtgtgcctggttttgctgcataccgcatcagcatttcccctgccagcagggaagcgccctcccgaggctcccgccgaggaccgctctctgggtaggcggcgggcacccttcgcgcttagcagtgatagtaatatgccagaggactaccctgaccagtttgacgacgttatggactttattcaggctacaataaaacgcctgaaacgaagccctgataagcagatggccgtcttgcctcggcgggagcggaacaggcaggcagcagccgccaatccagaaaactctagaggcaaggggagaagaggacagagggggaagaaccgcggatgcgtcttgactgctatccatttgaacgtgacggatttgggtcttggatacgaaaccaaggaagaactcatattcagatattgttctggctcatgtgacgcagctgagacaacctacgataagatcttgaaaaacctgtctcggaatcggcggctggtgtctgacaaggtcggccaggcttgctgcagaccgatcgcctttgacgacgatctgagctttctggatgataatcttgtgtaccacatcttgcggaaacactctgccaagcgctgcggctgtatc

SEQ ID NO: 12313 - DNA, 633 bp, synthetic construct
  misc_feature 1..633: note = source = /note="Description of Artificial Sequence: Synthetic coding sequence"
  source 1..633: mol_type = other DNA
atgaagctgtgggatgtggtggccgtctgcctggtgctgctccataccgcttcagctttccctctccctgcaggcaagaggccgccagaagctccagctgaagatcgctcattgggccggagacgcgccccctttgctctttcgagcgatagcaatatgcctgaagattaccctgaccagttcgacgacgtcatggactttatccaggccactatcaagcggctgaaacgctcgccagataagcagatggccgtgctgccacggcgcgagaggaaccgacaggcggcagccgcgaacccagaaaatagccggggtaaggggcgccggggacaacggggcaagaatcggggctgtgtgctgaccgccatccacctcaacgtgactgatcttgggctgggctatgaaaccaaagaggaactgatattcagatactgttcgggatcttgcgatgcggctgagactacctacgacaaaatcctgaaaaatctctcccgcaaccgccggctggtgtcggacaaggtgggacaagcctgttgccgcccgatcgcgttcgatgatgacctgagcttcctggatgacaacctggtgtaccacatcctgcggaagcacagcgccaaacgatgcggatgcatc

SEQ ID NO: 12314 - DNA, 633 bp, synthetic construct
  misc_feature 1..633: note = source = /note="Description of Artificial Sequence: Synthetic coding sequence"
  source 1..633: mol_type = other DNA
atgaaattatgggacgtggttgcggtctgtctcgttttgctccacaccgcctcagcattccccctgccagccgggaagcggccccccgaggcacccgcagaggatagaagtcttgggcgcaggcgggccccttttgccctgtcttctgattcaaacatgcctgaggactatcctgaccagtttgacgatgtcatggatttcattcaggccacgatcaaacgactgaagcgttcccctgacaagcaaatggcggtcctaccgagaagagaaaggaaccgtcaggctgccgccgctaaccctgagaatagcagagggaagggtcggagaggccagagaggcaaaaaccgggggtgcgttctgacagccattcacttgaacgttacagacttgggtttggggtacgagaccaaagaagaactgatctttaggtactgtagcggatcatgcgacgccgctgagactacctatgacaagattctcaagaacctctctaggaatcgacggcttgtgagcgataaggtcggacaggcctgttgcaggccgatagccttcgacgacgacctgagttttttggacgacaaccttgtgtatcatattctccgtaaacatagcgcaaagaggtgcggatgcatt

SEQ ID NO: 12315 - DNA, 633 bp, synthetic construct
  misc_feature 1..633: note = source = /note="Description of Artificial Sequence: Synthetic coding sequence"
  source 1..633: mol_type = other DNA
atgaaattgtgggacgtggtggccgtgtgcctggtcttgcttcacacggcaagcgctttccccttacccgctggaaagaggccacccgaagctccagctgaagatcgctccctggggagacgtcgcgctcccttcgcactttcatccgatagcaacatgcctgaggattaccccgatcagtttgacgatgtgatggattttatacaggccactattaagcgccttaagcggtcgccagacaaacagatggccgtgctgccccgccgtgagagaaacagacaggcagctgccgctaatccggaaaattcacgaggcaaagggagacgtgggcagagagggaagaatcgggggtgcgtcctaaccgccatacacctgaacgtgacagacttgggcttgggctatgagaccaaggaagagctgatcttccgttattgttctggctcctgcgacgcagcagagacgacatacgacaaaattctcaagaacttatctcggaaccgacggctggtgagcgacaaggtagggcaggcatgttgtcggccaattgcctttgatgacgatttgagttttctggacgataatcttgtgtatcatatattgagaaaacactccgcaaagcggtgcggatgtatc

SEQ ID NO: 12316 - DNA, 633 bp, synthetic construct
  misc_feature 1..633: note = source = /note="Description of Artificial Sequence: Synthetic coding sequence"
  source 1..633: mol_type = other DNA
atgaagctgtgggatgtggtggccgtgtgtctggtgttgctgcataccgccagcgcatttccacttccggctggtaaacgacctccagaggcaccggcggaagatagaagcctcggtaggaggcgcgccccatttgcactgtcgtcagactcgaacatgcctgaggactacccggatcaatttgatgatgtcatggatttcatccaagcgactatcaagagacttaagcggagcccagacaagcaaatggcagttctccctagacgggaaagaaaccggcaggccgccgctgcaaacccagaaaactcccgaggtaaggggagaaggggacagaggggaaagaaccgaggatgcgtgctgactgctattcacctcaatgttaccgatcttggtcttggctacgaaactaaggaagagctgatttttcggtactgttcaggctcatgcgatgcagcagagactacttacgacaaaattctcaagaacttgtctcgcaatcgccgtctcgtcagcgataaagtgggacaggcgtgttgccgcccaatagccttcgatgatgacctcagtttcctggatgataaccttgtgtaccacattctccggaagcactcagcaaaacgatgtggttgtatc

SEQ ID NO: 12317 - DNA, 633 bp, synthetic construct; identical to SEQ ID NO: 12315
  misc_feature 1..633: note = source = /note="Description of Artificial Sequence: Synthetic coding sequence"
  source 1..633: mol_type = other DNA

SEQ ID NO: 12318 - DNA, 633 bp, synthetic construct
  misc_feature 1..633: note = source = /note="Description of Artificial Sequence: Synthetic coding sequence"
  source 1..633: mol_type = other DNA
atgaaactttgggatgtcgtcgcagtgtgtctggtgttgctgcatactgcatccgcattccctctgcctgcgggaaagcgccctcccgaggcccccgcagaagatcgttccctcggccggaggagggccccttttgcactttccagcgatagcaacatgcccgaggactaccctgaccagttcgatgacgtcatggatttcatacaggcaactatcaagcgcctgaagcgatcacctgataagcagatggcagtccttccacgaagagaacgtaatcgccaagcagcagcagcgaaccctgagaattcaagaggaaaggggcggcgtggacagagaggaaagaatcggggatgtgtgttgactgcaatccaccttaacgttaccgatctgggattgggctatgaaaccaaggaggaactgatcttcagatactgttccgggtcctgtgacgcggccgaaaccacctacgataagatcctgaagaatctttctcgaaacagacggcttgtgtcggacaaggtgggtcaagcatgctgtcgccctatagcgtttgacgatgatttgtcattcctcgatgataaccttgtctaccacattctgcgcaagcattcggcaaaaagatgcggttgtatt

SEQ ID NO: 12319 - DNA, 633 bp, synthetic construct
  misc_feature 1..633: note = source = /note="Description of Artificial Sequence: Synthetic coding sequence"
  source 1..633: mol_type = other DNA
atgaaactgtgggacgtcgtggctgtgtgtctggttctgctacacacagcctcagcattcccactccctgcgggcaagcggccaccagaggctcccgcggaggaccgctcgcttggacggcggcgagctccattcgccttgagctcggacagcaatatgcctgaggattacccagatcaattcgatgacgtgatggatttcattcaggcgaccatcaagcgacttaaacgctccccagacaagcagatggcggtgcttccgcgaagggaacgtaatcggcaagctgcagcggcgaatcctgagaattcgcgagggaagggtcgccgcggacagaggggtaaaaaccgaggttgtgtgctcacggccatccacctgaacgtgacggacctcggtctgggctatgagacgaaggaggagctgatcttccgctactgcagcggatcgtgtgatgccgccgagacaacttatgataagatccttaagaacctgagccgcaatcgccgtctggtctctgacaaggtgggccaggcttgctgtcgacccatcgcgttcgatgatgatctcagctttttggatgataacctggtctaccatattctgcgcaagcactccgccaagcgctgcggttgcata

SEQ ID NO: 12320 - DNA, 633 bp, synthetic construct
  misc_feature 1..633: note = source = /note="Description of Artificial Sequence: Synthetic coding sequence"
  source 1..633: mol_type = other DNA
atgaagctatgggatgtcgttgctgtctgcctcgtgctgctccataccgcctctgcttttcccctgccagccggcaaaaggcctcctgaagcccccgcagaggatcggtcacttgggaggcgcagggcgccctttgccctgagctctgattccaacatgcctgaagactaccctgaccagtttgatgacgtgatggacttcatccaggccaccattaagcgactgaaacggtcccccgacaagcagatggctgtgctgcctaggcgtgagcgtaaccgacaggcagcggccgcaaatcccgaaaacagccgcggcaaaggccgtagggggcagaggggcaagaatcgaggatgcgtgctgacagcaattcatctgaacgttactgacctgggattggggtacgagaccaaggaagagctaattttccggtactgcagcgggtcttgtgacgctgccgagacgacttacgacaaaatccttaagaacctgtcgaggaaccggagactggtcagtgacaaagtcggccaagcctgctgccggccaatcgctttcgacgatgatctttctttcctagacgacaatttagtgtaccatattctgaggaaacattctgctaaaagatgcggctgtatc

SEQ ID NO: 12321 - DNA, 633 bp, synthetic construct
  misc_feature 1..633: note = source = /note="Description of Artificial Sequence: Synthetic coding sequence"
  source 1..633: mol_type = other DNA
atgaaactgtgggacgttgtggctgtttgtctggttctgcttcataccgcaagcgcttttccccttcctgcagggaaacggccccccgaggcacctgccgaagatcgctccttgggcagacgccgcgctccattcgcattgagtagcgactcaaacatgcctgaagactaccccgatcagttcgacgacgtgatggactttatccaggcaaccatcaagcgattgaaaaggtctccagataaacagatggccgtactaccccgaagggaacggaatcggcaagccgccgcagcgaatcctgagaattctcgcggaaaaggcaggcggggccaacgtggaaagaatcgggggtgtgtgctgacagctatacacctgaacgtaacagatcttggcctcgggtacgagactaaagaggagctgatctttaggtactgctcaggcagctgtgatgccgccgagaccacatacgataagatccttaagaacttgagcagaaatcgtcgccttgtatctgacaaggtgggccaggcctgctgtaggcccattgcttttgatgatgacctgagctttctggacgacaacttagtgtaccacatcctgcgaaagcatagcgccaagcggtgtggctgtatt

SEQ ID NO: 12322 - DNA, 633 bp, synthetic construct
  misc_feature 1..633: note = source = /note="Description of Artificial Sequence: Synthetic coding sequence"
  source 1..633: mol_type = other DNA
atgaaactgtgggacgtggtcgccgtctgcttggttctgcttcatacggcatctgcgtttccattgcccgcagggaaaagacccccagaagccccagcagaagacagatcgctggggcgacggcgggcacccttcgccctgtccagtgactccaacatgccggaagactacccagatcagtttgacgatgtgatggatttcattcaagcaaccataaagaggctcaaaagatcgcctgacaagcagatggctgtgctcccgcgtagagagcgcaacaggcaggccgccgctgccaatcccgaaaacagccgcggcaagggacgacgtggacagaggggtaagaacaggggatgcgtgctgaccgcaatacacttaaacgtgacagatctcggactgggatacgaaaccaaagaagagctaatatttcgctattgttctggaagctgtgatgcagcggagaccacgtacgacaaaatcctgaagaatctgtcccggaatagaagactcgtgagtgataaagttgggcaggcatgctgtcgtcccatcgcttttgatgatgacctaagcttcctggatgataaccttgtctaccatattctgcggaaacattcggccaagcggtgtgggtgtatt

SEQ ID NO: 12323 - DNA, 633 bp, synthetic construct
  misc_feature 1..633: note = source = /note="Description of Artificial Sequence: Synthetic coding sequence"
  source 1..633: mol_type = other DNA
atgaagctttgggatgtggtagcagtgtgtcttgtgctgttacacaccgcaagcgcctttccattacccgcggggaaacggcccccagaagccccagcagaggacagatccttgggaagacggagggcacccttcgctctgtcatctgactctaacatgcccgaagactacccagaccaattcgacgacgtgatggacttcatccaagcgacaatcaaacgactgaaaaggtcccccgataagcagatggcggtgctgccacgacgtgaacgtaatagacaggccgccgcagccaaccccgagaattcaagaggaaagggtaggaggggccagcgtggtaagaatcgcggatgcgtgctgactgcaattcacttgaacgtgaccgacctgggactgggatatgaaaccaaagaggagctgatctttcgctactgctcgggctcttgtgatgccgctgagaccacttacgataagatcttaaagaatctctcccgcaacagaaggctcgtctctgacaaggttgggcaggcctgttgccgtcctatcgcctttgatgatgacctgtccttcctagacgacaatcttgtatatcatatactccgaaaacattccgctaagcgttgcggctgtata

SEQ ID NO: 12324 - DNA, 633 bp, synthetic construct
  misc_feature 1..633: note = source = /note="Description of Artificial Sequence: Synthetic coding sequence"
  source 1..633: mol_type = other DNA
atgaagttgtgggatgtggtggcagtttgtctggtgctgcttcatacggcttccgccttcccactgccggctggtaagcggccacccgaagcgcctgcagaggatagaagtctgggcagacggcgcgctccattcgccctgtcatccgattccaacatgccggaggattatcccgatcaattcgacgacgtgatggacttcatccaggcaacaattaaacggcttaagaggagccctgacaagcagatggctgtgttgccaagacgggagaggaaccggcaagccgccgcagccaatccggagaatagccgaggcaaagggagaagaggtcaacgaggaaagaaccgcggatgtgtgctcacggccattcatctgaacgtgacagacctcggacttggttacgagacaaaggaggagctgatcttccggtattgttccggttcctgtgacgctgccgagacaacatacgacaaaatcctgaaaaacctctccaggaacaggagactggtctccgacaaagtaggccaggcatgttgcagacccattgccttcgacgatgacctgagttttctcgatgacaacctggtataccatattctgagaaagcactcagctaaacgctgcggttgcata

SEQ ID NO: 12325 - DNA, 633 bp, synthetic construct
  misc_feature 1..633: note = source = /note="Description of Artificial Sequence: Synthetic coding sequence"
  source 1..633: mol_type = other DNA
atgaaactctgggacgtggtggctgtgtgtctcgttctgctccatactgcatccgcctttcctcttccagcgggcaaacgcccacccgaagcacctgcagaggacaggtcccttggaaggcggcgcgctccgtttgcattgagcagcgattcaaacatgcctgaggactaccctgatcagttcgatgatgtgatggatttcattcaggcaacgataaaacgactcaaaagatcgccagataagcagatggcggtactccctcggagggaaagaaacagacaagcagcagctgcaaatccggagaattcgagaggtaagggacgcagaggccaaagggggaagaaccgcggatgcgtccttaccgctattcacctgaacgtcaccgatcttgggctcggctatgagactaaagaagagcttatcttcagatactgttccggttcgtgtgacgcagctgagacgacctacgataagatcctgaaaaatctttcccgcaataggcgtctggtgtccgataaagtggggcaggcctgttgcagacctatagcatttgacgacgatctgtcatttctggacgataacctggtttaccatattctgcgaaagcacagcgcaaagcgctgcggatgtatt

SEQ ID NO: 12326 - DNA, 633 bp, synthetic construct
  misc_feature 1..633: note = source = /note="Description of Artificial Sequence: Synthetic coding sequence"
  source 1..633: mol_type = other DNA
atgaaactttgggatgtcgtagctgtctgtcttgttttactgcataccgcatcggcgtttcctctgccagcgggcaagagacctccggaagcgcccgcagaagacagaagcttaggacgccgacgcgctccgttcgcactgagcagcgattcgaatatgcctgaagactacccagatcaattcgatgatgtcatggactttatccaagcgacaatcaaacgcttgaaacgctctccagacaagcaaatggctgtcttacctaggcgcgaaagaaatcggcaggcagctgccgctaacccggaaaacagcagaggcaaaggtagacgaggacagcgtggcaaaaacagagggtgcgttttaacagcaatccacctaaacgtaacggatcttggtcttggctatgaaacaaaagaagaattaatctttcgctattgcagcggctcttgcgatgcagcagaaacgacgtatgacaaaattctcaagaatttgtctcgcaatagacgtttggtctcagataaagtcggccaggcatgctgtcgcccgatcgcgtttgatgacgacctctcctttctcgacgacaacttggtctaccatattttacgcaagcactctgcgaaaagatgcggatgtatc

SEQ ID NO: 12327 - DNA, 633 bp, synthetic construct
  misc_feature 1..633: note = source = /note="Description of Artificial Sequence: Synthetic coding sequence"
  source 1..633: mol_type = other DNA
atgaagctgtgggatgtggtcgcagtgtgtcttgtgcttctgcacactgcctcagcctttccgctgccggcaggcaagcgtcctcctgaagccccagcagaagatagatcgttgggacggcgccgcgcaccctttgcactgtcatcggattcaaatatgcctgaggattacccagatcagttcgacgatgtgatggatttcattcaggcgaccattaagcgcttgaagcgctcgcctgataaacaaatggcagtcctccctaggagagagcgcaacagacaagcagcagcagcaaatccagaaaactctaggggcaagggtcggcgcggccagagggggaagaatagaggttgtgtccttactgctatccatctcaatgtgaccgatctcggactcggctacgagactaaggaggagctcatcttcaggtactgttcgggttcatgtgacgcggcagaaaccacctatgacaagatccttaagaatctgtcaagaaaccggcgcctggtgtccgacaaggtcggtcaggcgtgctgccgccccattgcttttgacgacgatcttagctttcttgatgataacctggtgtaccacatactgcggaaacactcggcaaaaagatgcggttgcata

SEQ ID NO: 12328 - DNA, 633 bp, synthetic construct
  misc_feature 1..633: note = source = /note="Description of Artificial Sequence: Synthetic coding sequence"
  source 1..633: mol_type = other DNA
atgaagctttgggatgtagttgcagtatgcttagttttgttacatactgcaagtgcattcccattaccagcaggtaagcgaccaccagaagcaccagctgaagatcgttctttaggaagaagaagagctccttttgctttatctagtgactctaatatgccagaagattacccagatcaatttgatgatgtaatggattttatacaagctactataaagagacttaagcgtagtccagataaacaaatggctgttttaccaagaagagaaagaaatagacaagctgctgcagctaatccagaaaatagtcgaggaaagggaagacgtggacaacgtggaaaaaatcgagggtgtgttttaacagctattcatcttaatgttactgaccttggattaggatatgaaacaaaggaagaattaatttttagatattgttcaggatcttgtgacgcagctgaaacaacttatgacaaaattttaaagaatttatcaagaaatagaagacttgtatcagataaagttggacaagcctgttgtagaccaatagcatttgatgatgatttaagttttcttgatgacaatcttgtttatcatattcttagaaaacattcagcaaaaagatgtggatgtatc

SEQ ID NO: 12329 - DNA, 633 bp, synthetic construct
  misc_feature 1..633: note = source = /note="Description of Artificial Sequence: Synthetic coding sequence"
  source 1..633: mol_type = other DNA
atgaaactgtgggacgtcgttgctgtctgtctggtgcttttgcacacagcctccgcttttcctctgcccgcaggaaaaagaccacctgaagccccagccgaagatagatctctcggtcgaaggcgggctcctttcgctctgtcctccgacagcaatatgcccgaggattaccccgaccagtttgatgacgtgatggactttattcaggctacaattaagagattgaagcgaagcccagacaaacaaatggctgtcttgcctagacgtgagaggaaccgccaggccgctgcagcaaaccccgaaaactcccggggcaaggggcgcagaggccagagggggaaaaatcgaggatgtgttcttaccgccatacatttaaatgtcaccgacctgggactgggctacgaaacaaaggaggagttgatctttagatattgtagcggatcttgtgacgctgccgagactacctatgataagatattaaagaacctctcccgcaaccgccggttggtatccgataaagttggacaggcatgttgtagacccattgctttcgatgatgatctttcgttccttgacgacaatcttgtctatcacatactgcggaaacattccgcgaagcggtgcggttgtatc

SEQ ID NO: 12330 - DNA, 633 bp, synthetic construct
  misc_feature 1..633: note = source = /note="Description of Artificial Sequence: Synthetic coding sequence"
  source 1..633: mol_type = other DNA
atgaagctatgggacgtggtggctgtgtgcctggttttgctgcatacggccagcgcattccctctgccggctggaaagagacctccagaagcacctgccgaggaccgcagcctgggacgccgtcgcgcaccatttgccctgagcagcgacagcaatatgcctgaggattatcctgaccaatttgacgatgtcatggattttattcaggcaacgattaagcgcttgaagcgcagtccggacaagcaaatggcggtgttacctcgtcgcgagcgcaatcgccaagctgccgcggcaaatccagagaactctcgtggtaaagggcggcgcggtcaacgcggcaagaatagaggatgtgttctgacagcgattcatctcaacgttaccgacctgggcctgggctatgagacaaaagaggaactgatcttccgctattgtagcggatcctgtgatgcagccgaaacgacctacgataagattctgaagaacctgagcaggaatcgccgtctggtttccgataaagttggccaggcgtgttgtcgcccaatcgcctttgatgacgatctttcattcctcgatgataacttggtgtaccacatactgcgtaaacacagcgcgaagcgttgcgggtgcatc

SEQ ID NO: 12331 - DNA, 633 bp, synthetic construct
  misc_feature 1..633: note = source = /note="Description of Artificial Sequence: Synthetic coding sequence"
  source 1..633: mol_type = other DNA
atgaaactatgggatgtagtagcggtatgtctagttctattacatacggcgtcggcgtttccgctaccggcgggtaaacgaccgccggaagcgccggcggaagatcgttcgctaggtcgacgtcgtgcgccgtttgcgctatcgtcggattcgaatatgccggaagattatccggatcaatttgatgatgttatggattttatacaagcgacgataaaacgattaaaacgttcgccggataaacaaatggcggtactaccgcgacgtgaacgtaatcgtcaagcggcggcggcgaatccggaaaattcgcgtggtaaaggtcgtcgtggtcaacgaggtaaaaatcgtggttgtgttctaacggcgatacatctaaatgtaacggatttaggtttaggttatgaaacgaaagaagaactaatatttcgttattgttcgggttcgtgtgatgcggcggaaacgacgtatgataaaatattaaaaaatctatcgcgtaatcgtcgtctagtatcggataaagttggtcaagcgtgttgtcgtccgatagcgtttgatgatgatttatcgtttctagatgataatttagtatatcatatattacgaaaacattcggcgaaacgttgtggttgtata

SEQ ID NO: 12332 - DNA, 633 bp, synthetic construct
  misc_feature 1..633: note = source = /note="Description of Artificial Sequence: Synthetic coding sequence"
  source 1..633: mol_type = other DNA
atgaaactctgggacgtcgttgccgtgtgcctggtgcttctccacaccgcgtccgcgttcccactcccggcgggaaagcggccgccggaagcgcctgcggaggatcggtccctcggtcggcggcgggccccgttcgcattgtcgtcagactcgaacatgccggaggattacccggatcagttcgacgacgtgatggacttcatccaggccaccatcaaacggctgaagagatccccggataagcagatggcagtgctcccaaggcgcgaacgcaacagacaagcagcagcggcgaatccggaaaactcgagaggcaagggccgccggggacagcgcggaaagaacagaggctgtgtgcttaccgccattcatctcaatgtgaccgatctcggtctgggatacgagactaaggaggagctgatcttccgctactgctcggggagctgcgatgccgctgaaacgacctacgacaaaatcctcaagaacctctcaagaaaccgccgcctggtcagcgacaaggtggggcaagcctgttgcaggcctatcgcgttcgacgacgatctgagcttcctggacgataacctggtttaccacatcctgcggaaacattccgcgaagagatgcggatgtatc

SEQ ID NO: 12333 - DNA, 633 bp, synthetic construct
  misc_feature 1..633: note = source = /note="Description of Artificial Sequence: Synthetic coding sequence"
  source 1..633: mol_type = other DNA
atgaagttgtgggatgtcgtggcggtgtgcttggtgctcctccacactgcatcggcgttccccctccctgcgggaaaaagaccgccggaggctccagcagaggatcggagcctggggcggcggagggccccgttcgcgctgtccagcgattcgaatatgcctgaggactacccggatcagttcgacgacgtcatggatttcatccaggcgaccatcaagcgattgaagaggtccccggacaagcaaatggcggtgctgccgcgccgcgagcggaacaggcaggccgccgcggccaatcccgagaattcgcgcgggaagggacgccgcggccagcggggaaagaaccgcggttgcgtgctcactgccatacatctgaatgtcactgatctgggccttggatacgaaactaaggaagagcttatcttccgctactgctcaggaagctgcgatgctgcggaaactacctacgacaaaatcctgaaaaatctgtcccggaacagacgactggtgtcggacaaggtgggacaagcgtgttgccggccgatcgcttttgatgacgacctgtcgtttctggacgataatcttgtgtaccatatcctcagaaagcatagcgcgaagcggtgtggatgcatt

SEQ ID NO: 12334 - DNA, 633 bp, synthetic construct
  misc_feature 1..633: note = source = /note="Description of Artificial Sequence: Synthetic coding sequence"
  source 1..633: mol_type = other DNA
atgaaactgtgggatgtcgtagctgtctgtctggtgcttctgcatacagcatccgcgtttcccctcccagccggaaaacgccctccagaagcaccagctgaagataggagtttaggacgacggcgggctccattcgccctcagtagtgacagtaacatgcccgaagattatcccgatcagttcgatgatgtgatggattttatacaggcaactatcaaacgcctgaaacggagtcccgataaacagatggccgttctacctaggagagaacggaatcggcaggctgccgctgcaaacccagaaaactcaaggggaaaagggagacggggacagagaggaaaaaatagagggtgtgtgcttactgccatacacctgaatgtgacagatctggggcttggatatgaaacaaaggaagaactaatcttccgatattgttcagggtcctgtgatgctgccgaaactacttatgataaaattctcaaaaatctgtctagaaatcgaaggctcgtgtccgataaagtggggcaggcatgctgtcggcccatcgccttcgatgatgacctgtcattcttagacgacaacctggtttatcatattctccggaaacactctgctaaaaggtgtgggtgtata

SEQ ID NO: 12335 - DNA, 633 bp, synthetic construct
  misc_feature 1..633: note = source = /note="Description of Artificial Sequence: Synthetic coding sequence"
  source 1..633: mol_type = other DNA
atgaaactttgggacgtcgtggccgtgtgtctggtgctgctgcatacagcctcagcatttcccctgccagccggaaaaaggccaccagaggccccagctgaagatagaagcttgggaagaaggcgggcccccttcgctttgagctcagacagtaacatgccggaggactatcccgatcagtttgatgatgtgatggattttatccaagctacgatcaagcgcctcaaacgatcaccagacaagcagatggccgttttgccgcgaagggagcgcaataggcaggcagccgcagccaaccctgagaacagtcggggtaagggtcgccggggacagcgggggaaaaaccgaggctgtgttttgactgcgatccacttgaatgtcaccgaccttgggctgggatacgagactaaggaggaactcatctttcgctattgcagtggctcatgcgatgccgctgaaacaacctacgacaagatcctaaagaacctatctaggaatcggcgtctcgtctccgacaaagtgggccaagcatgctgtcgcccaattgcttttgatgacgatctctcctttcttgatgacaacctcgtctatcacatccttcgaaagcacagcgctaagcgttgtggatgcatc

SEQ ID NO: 12336 - DNA, 633 bp, synthetic construct
  misc_feature 1..633: note = source = /note="Description of Artificial Sequence: Synthetic coding sequence"
  source 1..633: mol_type = other DNA
atgaagctgtgggatgttgtggccgtgtgtctcgtgcttctgcataccgcaagcgcattcccgcttcctgctggcaagaggcctcccgaagcgcccgcagaggatagatcactgggccggaggagagcccccttcgccctctcgtccgattccaatatgccagaagactatcctgaccaatttgacgacgtaatggattttatccaggctacaatcaagcgcctgaaacgctctccagataagcagatggctgtgcttccgcggagagagcggaaccggcaagccgccgcagctaacccagaaaactcaaggggtaaagggaggcgcggccagcgtggcaagaatagaggctgtgtgttgaccgcaatacatttgaacgtaaccgatctaggtctaggctacgagacgaaagaggagttgatatttagatattgcagcgggtcctgtgatgcagccgaaactacatatgataagatcttaaagaatctttctcgcaacagacgccttgtttccgataaagttggacaggcatgctgcagacctattgcttttgacgatgacttaagttttttggatgacaatctcgtgtaccatattctccgaaaacactccgcgaagcgttgcgggtgcatt

SEQ ID NO: 12337 - DNA, 633 bp, synthetic construct
  misc_feature 1..633: note = source = /note="Description of Artificial Sequence: Synthetic coding sequence"
  source 1..633: mol_type = other DNA
atgaagctgtgggatgtggtggccgtctgcctcgtactgctgcacacagcttctgcgttcccgctgccggctggtaagaggccccctgaggcgcctgctgaggaccgctccctcggtaggagacgcgccccctttgctttgtcctccgactctaacatgcccgaggactacccagatcagtttgacgatgttatggacttcattcaagccactatcaaacgcctgaagagatcacccgacaaacagatggccgttctcccgaggagggaaaggaacagacaagccgctgctgctaatcccgagaatagtcgcggaaagggaaggcgcggacaacgcggtaaaaataggggctgtgtgctcacagctattcatctcaacgtcactgaccttggcctcggttatgagactaaggaggaactcatcttcaggtactgctccggatcatgtgacgcagccgagaccacatacgacaagatattgaagaatctctcacgcaaccgccgccttgtctccgacaaagtgggtcaagcatgttgccgcccaatcgcctttgatgacgatctgtcatttttggacgataacctcgtctaccacattctgaggaagcactctgcaaagcgctgcggatgtatc

SEQ ID NO: 12338 - DNA, 633 bp, synthetic construct
  misc_feature 1..633: note = source = /note="Description of Artificial Sequence: Synthetic coding sequence"
  source 1..633: mol_type = other DNA
atgaaactttgggacgtggtcgcggtgtgcctggtgctgctgcataccgcttcagccttccctctgccggcgggtaaacgcccgccagaagcccctgccgaagatagatccctcggacggcggcgcgcccctttcgcgctcagctcggactcgaatatgccagaggactaccccgaccagttcgatgacgtgatggactttatccaagccactatcaaacgccttaaacgctccccggataagcagatggccgtgctgccgcgaagagaacgcaaccggcaggccgccgcggctaacccagagaacagccgcggaaaaggaaggagaggacagcggggcaagaacagaggatgcgtgctgactgccatccatctgaatgtgactgacctgggcctgggatatgaaacgaaggaggagctcatctttcgctactgctccgggtcatgcgacgcagcggaaaccacttacgataagatccttaagaatctctcccgcaatcggcgcctcgtgagcgacaaagtcgggcaagcgtgttgccggccaatcgcattcgacgacgacctgtcgtttctcgacgataacctggtgtaccacatcctgagaaaacatagcgcgaagcgctgcggatgtatc

SEQ ID NO: 12339 - DNA, 633 bp, synthetic construct
  misc_feature 1..633: note = source = /note="Description of Artificial Sequence: Synthetic coding sequence"
  source 1..633: mol_type = other DNA
atgaagctgtgggacgtcgtcgccgtgtgcttagtgctgctgcacaccgcaagtgctttccccttgccagccggaaaacgccctcccgaggcacctgcagaggatcggtcgctcggcagaagaagagctcctttcgccctgtcctccgactcaaatatgcctgaggattacccagatcagttcgacgacgtcatggatttcattcaagcaacaataaagagactgaaacggtctcccgacaagcagatggctgttctgccacgcagagagaggaataggcaggctgccgcagctaatcccgagaacagtaggggcaaaggccgccggggtcagcgaggaaaaaacaggggttgcgtgctgacagcgatccacctcaatgttaccgacctcggactgggctacgagaccaaggaggagttgattttccgatattgttcaggtagctgcgatgccgccgagactacgtatgacaagatcctgaaaaatttgagtagaaacaggcggctagtatctgacaaagtcggacaggcatgctgtaggcctatcgcttttgatgacgatctcagctttctggatgataatctcgtgtatcacatccttcgcaagcacagcgccaaaaggtgtggctgtatt

SEQ ID NO: 12340 - DNA, 633 bp, synthetic construct
  misc_feature 1..633: note = source = /note="Description of Artificial Sequence: Synthetic coding sequence"
  source 1..633: mol_type = other DNA
atgaaactgtgggatgttgtggcagtatgtctggtgttgcttcatacggcaagcgcatttccattacccgcaggcaaaagaccgccagaggctccagccgaggatcggtcgttagggcgcagacgagctcccttcgccctctcttccgacagtaatatgccagaagattatccagatcaatttgacgatgtgatggactttattcaggcaacgattaagcgactgaaacggtcacccgataaacagatggctgtcctaccccggagagagagaaacaggcaggcagccgccgccaatccagaaaactctagaggcaaggggcggcggggccagagaggtaaaaataggggatgcgtcttaacagcaatccatctcaacgtgaccgacctcgggctaggatatgagacaaaagaggagctcatatttaggtactgtagtgggtcatgtgatgccgccgagacgacttacgacaagatcctgaaaaacctgtcgaggaataggcggctagtgagtgacaaagtggggcaagcatgttgcaggcccatcgccttcgatgacgatctctctttcctggatgacaacttggtgtaccacatcctgaggaaacattctgcgaaacgctgtggttgtatc

SEQ ID NO: 12341 - DNA, 633 bp, synthetic construct
  misc_feature 1..633: note = source = /note="Description of Artificial Sequence: Synthetic coding sequence"
  source 1..633: mol_type = other DNA
atgaaattgtgggatgtggtcgcagtgtgtctggttcttttgcacaccgcgtcagcattcccgctccctgctggaaaaagaccacctgaggcacctgcagaggatagatcacttggacggcggcgggctccgtttgcccttagctcggattcgaatatgccagaagattacccagaccagtttgatgacgtgatggatttcatccaagcgaccattaagcggcttaagaggagtcccgacaaacagatggcagtgcttcccaggcgtgaacgaaaccgacaagcagcggctgcgaaccctgaaaattccagaggaaaggggagacgaggtcaaagagggaagaaccgcggatgtgtgttgactgccattcacctgaacgtcaccgacctgggtcttggatacgaaacgaaagaagaactgatattcagatattgttcgggatcctgcgacgcagcagagactacctacgacaaaatccttaagaatctgtcacgcaaccggcgactggtgagtgataaggtaggccaggcttgttgccggccaatagcatttgatgatgatctgagctttcttgatgataacctcgtctaccatattctgagaaagcattccgccaagcggtgtggctgcatt

SEQ ID NO: 12342 - DNA, 633 bp, synthetic construct
  misc_feature 1..633: note = source = /note="Description of Artificial Sequence: Synthetic coding sequence"
  source 1..633: mol_type = other DNA
atgaaattgtgggatgtggtggctgtgtgtttagtgctgctgcacaccgcctccgccttccctttacccgccggaaagaggccaccagaagcgcctgccgaagaccgcagcttgggcaggcgacgcgcaccatttgcacttagttctgacagtaacatgcccgaggactacccggaccagtttgatgatgttatggacttcattcaggcaacaattaagagactaaagcgctcacctgataagcagatggcagtcctgccaaggcgcgagcggaatcggcaagctgcagcagcaaatcccgagaacagtcggggcaaaggaaggcgcggtcagcgaggcaagaacagaggatgtgtgctaaccgctatccatctgaatgtgacggatttaggtttaggctacgagacgaaggaggagctcattttcaggtattgttccggcagctgcgacgcggccgaaactacatatgacaagattctgaagaacttgagccgcaacaggcgtctcgtgagcgataaagtgggtcaagcttgctgtaggcccattgccttcgatgatgatctgagcttcctggatgataacctggtctatcacatcctccgaaaacattctgcaaaacgctgtggctgtatt

SEQ ID NO: 12343 - DNA, 633 bp, synthetic construct
  misc_feature 1..633: note = source = /note="Description of Artificial Sequence: Synthetic coding sequence"
  source 1..633: mol_type = other DNA
atgaagttgtgggacgttgtcgccgtatgcctcgtgctccttcacacggcaagtgccttcccactgccagcgggcaagcgacctcctgaggcgccagcagaggatcgctcactcggccgccggcgagccccttttgcattgtcctcggattccaatatgcccgaagactatcctgatcagtttgatgacgttatggatttcattcaggcaaccattaagaggctgaaaaggagcccggataagcagatggctgtgttgcctcgaagggagcggaataggcaagctgccgccgctaatccggaaaatagcaggggaaaggggaggcgaggacaaaggggaaaaaatcgagggtgtgtacttacagcaatccacctaaatgtaacggatctcggacttggctacgaaactaaggaagagctcatcttccgatattgctcgggttcctgtgatgctgcggaaacaacctatgacaaaatactgaagaacctgagcaggaataggcgcctggtctcagacaaggtcggccaggcgtgctgtaggccaatcgcttttgacgacgacctctcttttttggatgacaacctggtctaccatatcctgcgtaagcattctgccaagcgatgtggatgcatt

SEQ ID NO: 12344 - DNA, 633 bp, synthetic construct
  misc_feature 1..633: note = source = /note="Description of Artificial Sequence: Synthetic coding sequence"
  source 1..633: mol_type = other DNA
atgaaactttgggacgtggtggcagtgtgtctggtgctgttacacaccgcaagcgcattccccctgccagccggcaaacgaccgcctgaggcccccgccgaggatcgctccctggggcgcagacgggctcccttcgccttgtcctccgacagtaacatgcccgaagactatcctgaccagtttgatgacgtgatggatttcatacaagcaacaatcaaacggttaaagaggtcaccagataaacagatggccgtcctcccccgtagagaacggaatcggcaggctgccgccgccaaccctgagaatagtagaggcaaggggagacgaggccaacgcggaaaaaatcgcggatgcgtgctaacagccattcacctaaacgtgactgatttaggactcggctatgaaacgaaggaagagctcatcttccggtactgttcgggatcatgtgacgccgctgagacaacttacgacaagattttaaaaaacctaagtcgaaaccggcgtctggtgtccgacaaggttggccaggcttgctgccgcccgatcgcatttgatgatgacctgtcatttctggacgacaatttagtctatcatattctccggaaacatagcgctaagcgctgtggctgcata

SEQ ID NO: 12345 - DNA, 633 bp, synthetic construct
  misc_feature 1..633: note = source = /note="Description of Artificial Sequence: Synthetic coding sequence"
  source 1..633: mol_type = other DNA
atgaagttgtgggacgtggtcgccgtgtgcctggtgctcctgcatactgcgtcggccttcccgctcccggctggcaagcgaccgcccgaggctccagcagaagatcggtcactgggaaggcgtcgcgcgcctttcgccctgtcgtcggatagcaacatgccggaggactacccggatcagtttgatgacgtgatggatttcatccaggccactatcaaacgcctcaagcggagcccagacaagcagatggctgttctgccgcggagggagcggaacagacaggcggcggccgccaacccggagaactcacggggaaagggtaggagaggacagcgcgggaagaacaggggctgcgtgctcactgccatccatcttaacgtgaccgatctgggactcgggtacgaaacgaaggaagaactcattttccggtactgctcaggctcctgcgatgccgcagaaaccacgtacgacaagattcttaagaacctctcccggaatcgccgccttgtgtcagataaggtgggacaggcttgctgccggccgatcgcatttgacgacgacctgtccttcctggacgacaatctggtgtaccacatcctgcggaagcacagcgctaagcgctgcggatgtatt

SEQ ID NO: 12346 - DNA, 633 bp, synthetic construct
  misc_feature 1..633: note = source = /note="Description of Artificial Sequence: Synthetic coding sequence"
  source 1..633: mol_type = other DNA
atgaaactttgggacgtggtggccgtgtgtttggtccttcttcacacggcatccgcattccctctgccagccggaaagaggcctccggaagctccagcagaagatcgcagcctgggacggagacgcgccccttttgcactctcctccgattcgaacatgccagaggactaccccgaccagtttgatgacgtgatggatttcattcaggcgaccattaagcgcctcaaaagatcacccgataagcagatggcagtgcttccaagacgtgagcgcaaccggcaagcagcagctgcgaacccagaaaattccagaggaaagggaaggcgcggccaaagaggaaaaaaccgtgggtgtgtgcttaccgcaatccatcttaatgtcacggacctcggtcttggttacgaaaccaaggaggaactgatttttcgttactgttctggttcgtgcgatgcggcggagactacttacgacaaaatcctcaaaaatctgtcccgaaataggagacttgtgtcggataaagtcggccaggcatgttgcaggcccattgcatttgacgacgacctttcattcctggatgacaacctcgtctaccatatcctgagaaaacattccgcgaagagatgcggttgcatt

SEQ ID NO: 12347 - DNA, 633 bp, synthetic construct
  misc_feature 1..633: note = source = /note="Description of Artificial Sequence: Synthetic coding sequence"
  source 1..633: mol_type = other DNA
atgaagctttgggatgtggtggctgtttgtctggtgctattgcacactgcttcagcttttccccttcccgccgggaaacggccccccgaagcccccgcggaagacaggagcctgggccggagaagagcacccttcgctctctctagcgattcgaatatgcccgaagattaccctgaccaatttgatgacgtgatggactttatccaggcaactattaaacgcctgaagaggagtccggacaagcagatggccgtgctcccacgtagggagcgaaacaggcaggcagctgccgccaaccctgaaaactcccgcggcaaagggcggcgaggacaaagggggaagaaccggggatgtgtgttgaccgcaatccatttaaatgtgaccgatctggggcttggctatgagactaaggaggaactcatctttcggtactgctcaggatcatgtgatgccgctgaaactacctacgataaaatcctcaagaacctttcacgcaacagaaggcttgtctctgacaaagttggccaggcctgctgccgccctatcgcctttgacgatgacttatcttttctcgacgacaacttggtctatcatatcttgaggaagcactccgctaaacgctgtggatgcatt

SEQ ID NO: 12348 - DNA, 633 bp, synthetic construct
  misc_feature 1..633: note = source = /note="Description of Artificial Sequence: Synthetic coding sequence"
  source 1..633: mol_type = other DNA
atgaaactgtgggacgtcgtggctgtctgtcttgtccttctccataccgcttcggcgttcccactgccggccggaaaacgcccgccagaagcccctgctgaggacagaagcctgggccggcgccgcgcgccgttcgcgctgtcaagcgactcaaatatgccagaagattaccctgatcaattcgacgacgtgatggactttatacaggcgaccatcaaaaggctgaagagatccccggataagcagatggcggtgctgccgcggcgagaaaggaaccgccaggccgccgccgcaaaccccgagaactcgagaggtaagggaaggagggggcagcgaggaaaaaaccgcggatgcgtgctcacggcaattcacctcaacgttaccgacctgggactcggttatgagactaaggaagaacttatcttcagatactgctcaggctcctgcgacgctgctgagactacctacgacaagatactgaagaatctctcgcgcaatcggaggctggtgtccgacaaagtggggcaagcctgttgccgcccgatcgccttcgatgacgatctgtcgtttctggacgataacttggtctaccacattcttagaaagcatagcgcaaagaggtgcggttgcatc

SEQ ID NO: 12349 - DNA, 633 bp, synthetic construct
  misc_feature 1..633: note = source = /note="Description of Artificial Sequence: Synthetic coding sequence"
  source 1..633: mol_type = other DNA
atgaaactttgggacgtggtggccgtctgcctggtgcttctccataccgcatcggccttcccactgccagcgggcaaacgccctcctgaggcacctgccgaggatcgcagccttgggagacgccgagctccatttgcactctcgagcgattccaacatgccggaagattaccctgatcaatttgacgatgtcatggactttatccaggcaaccattaaacgtctgaaacgatccccagataaacagatggcggtcctccctcgtcgcgagagaaatcgccaggccgcagcagcaaacccagaaaactcgagaggtaagggtcggcgtggccaacgaggaaagaacagaggatgtgtgcttactgccattcaccttaacgttacggatctcggactcgggtacgaaactaaggaagagttgatatttcgctactgctccggttcctgtgacgcagcagaaactacctacgacaagatcttgaaaaatctgtcaagaaaccgacggctcgtgtccgacaaagtgggtcaggcttgttgcaggcctatagcatttgacgacgatctttcgttccttgacgacaatctggtctaccatattctccggaagcacagcgcaaagagatgtgggtgcatc

SEQ ID NO: 12350 - DNA, 633 bp, synthetic construct
  misc_feature 1..633: note = source = /note="Description of Artificial Sequence: Synthetic coding sequence"
  source 1..633: mol_type = other DNA
atgaagctgtgggacgtggtggcagtatgtctggtgctgttgcacacggcatcagccttcccattgcccgcaggcaaacggcccccggaggcccccgctgaggaccgcagcttaggaagacgccgtgctcccttcgccctaagtagtgactcaaatatgccagaagattacccagatcaattcgatgatgtgatggacttcatacaggcaaccatcaagaggcttaagagaagccccgacaagcagatggcggtgttgccacgcagagaaaggaaccggcaagctgccgctgcaaaccctgagaactctaggggcaagggcagacgaggacagcgaggtaagaatcgaggatgcgtgctgacagccattcatttgaacgtcaccgacctggggttgggttacgagacaaaagaagagctgatttttaggtattgttcagggtcctgtgacgcagctgaaactacctatgataagattctgaagaacctcagtcggaaccgtcgcctggtgtctgacaaagtcgggcaggcatgctgccgccctattgcattcgatgacgatttatcattcctagacgacaacctggtgtaccacatcttgcgcaagcatagcgcgaaacggtgtggctgtatt

SEQ ID NO: 12351 - DNA, 633 bp, synthetic construct
  misc_feature 1..633: note = source = /note="Description of Artificial Sequence: Synthetic coding sequence"
  source 1..633: mol_type = other DNA
atgaaactttgggacgtggtcgcggtttgtctcgtcttgcttcatactgcatctgctttccctctgcctgcgggtaaacggcctcccgaagcacctgcagaggacagatcgctgggtagacgccgggccccgtttgcgctctcatcggactcaaatatgccggaggactacccagatcagtttgatgacgtcatggatttcatccaagccaccatcaaacgcctcaaaagaagcccggataagcaaatggctgtgctgcctcgccgggaacggaacagacaggcagccgctgcgaaccccgaaaattcacgcggcaagggacgcaggggacagcgggggaagaaccgcggatgcgtgttgaccgctatccatctgaatgtgaccgatctgggattgggatacgaaaccaaagaagaactcatcttcagatattgctcgggctcctgcgacgcggccgaaaccacttacgacaagatcctgaaaaatctctcccgcaaccggaggctcgtgtccgataaagtgggacaggcatgctgcaggccaatcgccttcgatgatgacttgagcttcctcgatgataacctggtgtaccatatcctcagaaagcattccgcgaagaggtgcggatgcatt

SEQ ID NO: 12352 - DNA, 633 bp, synthetic construct
  misc_feature 1..633: note = source = /note="Description of Artificial Sequence: Synthetic coding sequence"
  source 1..633: mol_type = other DNA
atgaagctgtgggatgtggtggccgtctgtctcgtcctcctgcataccgcgtctgcctttccgctgccagccggcaagcggccaccggaagctccggctgaggaccgatcacttggtcggcgccgtgctcccttcgccttgtcatcagactcgaacatgccagaggattaccctgaccagttcgacgacgtcatggatttcatccaggctaccatcaaacgcctgaaacgttcgcccgacaaacagatggccgtgcttccgcgccgggagaggaacagacaggccgcagccgcaaacccggaaaattcccgggggaagggccgcagggggcaacggggcaagaatagaggatgcgtgctgactgcgattcatctcaacgtgaccgatctcggattgggatacgaaacgaaggaggagctgatttttcgctactgcagcggatcgtgcgatgcggcggagactacctacgacaagatcctcaagaatctctcacggaacagaaggttggtgtcggataaggtgggacaggcctgttgccggcctatcgcatttgacgatgacctgtcgttcctggacgataatcttgtgtaccacatcctgcgcaagcattcagcgaagcggtgtggatgcatc

SEQ ID NO: 12353 - DNA, 633 bp, synthetic construct
  misc_feature 1..633: note = source = /note="Description of Artificial Sequence: Synthetic coding sequence"
  source 1..633: mol_type = other DNA
atgaagctttgggatgttgtggcagtgtgcctggtgcttcttcatacagcctcagccttccctcttccagcaggaaaacgccctcctgaagcaccggctgaagatcgttccctgggcaggagaagggccccttttgcgctttccagtgactctaacatgccagaggattaccctgaccagtttgacgatgtcatggacttcattcaggcaaccatcaaaaggctcaaacgctctcccgataaacagatggccgtgttaccgcggagggaacggaaccggcaagctgcagccgccaacccagagaacagcaggggaaagggaagaaggggccagagagggaaaaatcgcggatgcgttctcaccgcgatacacctcaatgtgaccgatctcggactgggttatgaaaccaaggaggagctcatttttagatactgcagtggctcttgcgacgcagcagagaccacctacgacaaaattcttaaaaaccttagccgaaacaggagattggtcagcgataaggttggccaagcgtgctgccgacctattgcctttgacgacgacttgagcttccttgacgataatttagtttaccacattctacgcaaacactccgctaagcggtgtggatgtatc

SEQ ID NO: 12354 - DNA, 633 bp, synthetic construct
  misc_feature 1..633: note = source = /note="Description of Artificial Sequence: Synthetic coding sequence"
  source 1..633: mol_type = other DNA
atgaaactatgggacgtggtggcagtgtgcttggtgctgctccacacagcctcggccttccctcttccagcaggaaaaagacccccggaggcacccgcagaggatagatcgttaggccgcagacgtgccccatttgcacttagcagcgacagtaatatgccagaagactatcccgatcagtttgacgatgtgatggacttcattcaagcgacaatcaaaaggctaaagcgctccccagataagcagatggccgtcctgccgaggcgcgaacgcaatagacaggcggctgccgcaaacccagagaactcacgcggaaaggggcgacggggccagagaggcaagaatagaggatgtgttctgaccgcgatacaccttaatgtgactgatctcggtctcggttacgaaaccaaagaggaactcatcttccgatactgctcgggctcctgcgacgccgctgagactacttacgacaagattctaaagaatcttagtcgtaacagacgactagtgtcagataaagtgggtcaggcttgctgcagacctattgctttcgacgacgacctttctttcctggacgataaccttgtgtatcacatcttgcggaagcattccgccaaacgatgcggatgcatc

SEQ ID NO: 12355 - DNA, 633 bp, synthetic construct
  misc_feature 1..633: note = source = /note="Description of Artificial Sequence: Synthetic coding sequence"
  source 1..633: mol_type = other DNA
atgaagctctgggacgtcgtggccgtgtgcctcgtgcttcttcatactgcgtcagccttccctctgccggctggaaaaagacccccggaggcgccggcggaagatcgctccctgggtcgccggagggcaccattcgcgctgtcctccgacagcaatatgccagaggattacccagaccagttcgacgacgtaatggatttcattcaggctaccattaagagactcaagagatctccggacaagcaaatggctgtcctcccccgccgcgaacgcaacaggcaagccgccgccgctaaccccgaaaactcccgcgggaaagggcggcggggacagcggggaaagaatcgcggttgcgttctgacggcaatccaccttaatgtgactgatctgggcctcggatatgaaaccaaggaggaactgatctttcgctactgctcgggatcgtgcgacgccgccgaaacgacctacgacaaaattctcaaaaatctcagccgtaaccgacggctggtgtcggacaaagtgggacaggcatgttgtcgcccgatagctttcgacgatgatttgtcattcctcgatgacaacctcgtgtaccacatcctccgcaaacactcggcaaagcggtgtgggtgcatc

SEQ ID NO: 12356 - DNA, 171 bp, synthetic construct
  misc_feature 1..171: note = source = /note="Description of Artificial Sequence: Synthetic coding sequence"
  source 1..171: mol_type = other DNA
atgaagtgggtgagcttcatctcgcttctctttctgttctcctcagcctacagcggctcgttggataaacggcacggagacgggtccttctcagatgaaatgaacaccattctggacaatctggcggcacgcgacttcatcaactggctcatccagaccaagatcactgac

SEQ ID NO: 12357 - DNA, 171 bp, synthetic construct
  misc_feature 1..171: note = source = /note="Description of Artificial Sequence: Synthetic coding sequence"
  source 1..171: mol_type = other DNA
atgaagtgggtgagtttcatttctttgctgtttctgttctcatctgcgtattcaggaagtctcgacaagagacacggcgacggcagttttagcgacgaaatgaacaccatcctagacaacctggccgctagggattttatcaactggcttattcagacaaagatcaccgac

SEQ ID NO: 12358 - DNA, 171 bp, synthetic construct
  misc_feature 1..171: note = source = /note="Description of Artificial Sequence: Synthetic coding sequence"
  source 1..171: mol_type = other DNA
atgaaatgggtgtctttcatctccctcctatttttgttctccagtgcctatagcggctctcttgacaagcgccatggcgacggaagcttcagcgacgaaatgaacacaatcctggacaatctggcagcgagagactttattaactggctgattcagacaaaaattacggac

SEQ ID NO: 12359 - DNA, 171 bp, synthetic construct
  misc_feature 1..171: note = source = /note="Description of Artificial Sequence: Synthetic coding sequence"
  source 1..171: mol_type = other DNA
atgaagtgggtgtccttcattagcctgctgtttttgttctcgagcgcgtactcgggctccctggataagagacacggagatggatccttttccgatgaaatgaataccatcctcgataatctcgcagccagagactttatcaactggctcatccagactaagattaccgat

SEQ ID NO: 12360 - DNA, 171 bp, synthetic construct
  misc_feature 1..171: note = source = /note="Description of Artificial Sequence: Synthetic coding sequence"
  source 1..171: mol_type = other DNA
atgaagtgggtttcattcatatctctactcttcttgtttagcagcgcttatagcgggagcctagacaagcgccatggcgatggaagtttttccgacgaaatgaacactatcctagacaaccttgctgcgcgcgattttattaactggctgatacagacgaagatcacagat

SEQ ID NO: 12361 - DNA, 171 bp, synthetic construct
  misc_feature 1..171: note = source = /note="Description of Artificial Sequence: Synthetic coding sequence"
  source 1..171: mol_type = other DNA
atgaagtgggtttcttttatctcactcctctttcttttctcttcggcctacagcggctctctggataagcggcatggagacgggtcgttcagcgacgagatgaacacaattttagacaacctggcagcccgggactttatcaattggctgatccagacgaagatcactgac

SEQ ID NO: 12362 - DNA, 171 bp, synthetic construct
  misc_feature 1..171: note = source = /note="Description of Artificial Sequence: Synthetic coding sequence"
  source 1..171: mol_type = other DNA
atgaagtgggtgtccttcatatcacttttgtttcttttttccagcgcttactccgggtcgcttgataagcggcatggagacgggtcttttagcgatgagatgaacaccatcctggacaatctcgccgcccgtgatttcattaactggctcatccagactaaaatcaccgat

SEQ ID NO: 12363 - DNA, 171 bp, synthetic construct
  misc_feature 1..171: note = source = /note="Description of Artificial Sequence: Synthetic coding sequence"
  source 1..171: mol_type = other DNA
atgaaatgggtctctttcatttccctgttgttcctgttcagctctgcttatagcgggagtctcgataaaagacacggcgacggatcgttcagcgatgagatgaacacaatacttgataatctcgcagcgcgggacttcatcaattggctgatacagacaaagatcaccgat

SEQ ID NO: 12364 - DNA, 171 bp, synthetic construct
  misc_feature 1..171: note = source = /note="Description of Artificial Sequence: Synthetic coding sequence"
  source 1..171: mol_type = other DNA
atgaagtgggtgtcatttatctccttgctctttctcttttcgtctgcgtactcaggatccctggataaaaggcatggagacggctccttttcagacgagatgaacaccatcctcgacaatcttgctgcaagagacttcataaactggcttattcaaacgaagataactgat

SEQ ID NO: 12365 - DNA, 171 bp, synthetic construct
  misc_feature 1..171: note = source = /note="Description of Artificial Sequence: Synthetic coding sequence"
  source 1..171: mol_type = other DNA
atgaagtgggtgtcttttatctcgctccttttcctgtttagctctgcctacagtggcagcctagataagagacacggggacggcagtttttcagatgaaatgaacacgattttggataaccttgctgcaagggatttcatcaattggctaattcaaaccaagatcacagat

SEQ ID NO: 12366 - DNA, 171 bp, synthetic construct
  misc_feature 1..171: note = source = /note="Description of Artificial Sequence: Synthetic coding sequence"
  source 1..171: mol_type = other DNA
atgaaatgggtttcatttatcagccttctgtttctgttttcaagcgcatactccggatccctggataagagacacggcgatggatccttctcggacgaaatgaacaccattttggacaatcttgctgcgcgcgacttcataaactggctcattcagacgaagattaccgat

SEQ ID NO: 12367 - DNA, 171 bp, synthetic construct
  misc_feature 1..171: note = source = /note="Description of Artificial Sequence: Synthetic coding sequence"
  source 1..171: mol_type = other DNA
atgaagtgggtgagtttcatctcactactgtttctgttcagttcagcttattcaggaagcttagataaaaggcacggtgacggctccttctctgatgagatgaacacgatcctggacaacctggcggcccgtgattttatcaactggctgatccagactaagatcactgac

SEQ ID NO: 12368 - DNA, 171 bp, synthetic construct
  misc_feature 1..171: note = source = /note="Description of Artificial Sequence: Synthetic coding sequence"
  source 1..171: mol_type = other DNA
atgaagtgggtttccttcattagccttctctttcttttttcgtcagcttacagcggttccctggacaaaagacatggagacggctcattttccgacgaaatgaataccatcttggataacctggccgcacgtgatttcatcaactggctgattcaaacgaagataactgat

SEQ ID NO: 12369 - DNA, 171 bp, synthetic construct
  misc_feature 1..171: note = source = /note="Description of Artificial Sequence: Synthetic coding sequence"
  source 1..171: mol_type = other DNA
atgaagtgggtgtcgtttatctcgctcctgttcttgttcagcagcgcatactccggatcgttggataagcggcatggagacggatcctttagcgacgaaatgaataccattcttgataaccttgcagcccgtgactttatcaactggctgatccagaccaagataaccgat

SEQ ID NO: 12370 - DNA, 171 bp, synthetic construct
  misc_feature 1..171: note = source = /note="Description of Artificial Sequence: Synthetic coding sequence"
  source 1..171: mol_type = other DNA
atgaagtgggtgagcttcatatcgctgttgtttcttttctcttccgcgtactccgggtctctggataagcggcatggggacggaagtttttcagatgagatgaataccattcttgacaatctggctgcccgagactttatcaattggctcatccaaacaaaaatcacggac

SEQ ID NO: 12371 - DNA, 171 bp, synthetic construct
  misc_feature 1..171: note = source = /note="Description of Artificial Sequence: Synthetic coding sequence"
  source 1..171: mol_type = other DNA
atgaagtgggtgtcgtttatcagcctgctcttcctctttagctcggcgtactccggatcactggacaagaggcacggtgatgggtccttctccgatgaaatgaacaccattctggataaccttgccgcccgagacttcattaactggctgattcaaaccaagataaccgat

SEQ ID NO: 12372 - DNA, 171 bp, synthetic construct
  misc_feature 1..171: note = source = /note="Description of Artificial Sequence: Synthetic coding sequence"
  source 1..171: mol_type = other DNA
atgaagtgggtttcttttataagcttgctttttctgttttcttcggcttattccggctccttagataaaagacacggtgatggtagttttagtgatgagatgaatacgatcctagataatctagccgcaagagattttatcaattggctgattcaaacgaagattacagat

SEQ ID NO: 12373 - DNA, 171 bp, synthetic construct
  misc_feature 1..171: note = source = /note="Description of Artificial Sequence: Synthetic coding sequence"
  source 1..171: mol_type = other DNA
atgaagtgggtgtcattcatctccctgctgtttctcttctcgtccgcatactcgggctcactggacaaacgccatggagacggatccttttccgacgagatgaataccattctggacaacctggcggcccgcgactttatcaactggctgatccagactaagatcactgac

SEQ ID NO: 12374 - DNA, 171 bp, synthetic construct
  misc_feature 1..171: note = source = /note="Description of Artificial Sequence: Synthetic coding sequence"
  source 1..171: mol_type = other DNA
atgaaatgggtgagcttcatttccttgcttttcctctttagctctgcatactctggaagtcttgacaaaagacacggggacggatcttttagtgatgagatgaatacaatactggataatttggcagctcgggatttcatcaattggctgatccagacaaaaatcacagat

SEQ ID NO: 12375 - DNA, 171 bp, synthetic construct
  misc_feature 1..171: note = source = /note="Description of Artificial Sequence: Synthetic coding sequence"
  source 1..171: mol_type = other DNA
atgaagtgggtgtcctttatctccctactgttcctttttagcagtgcttactctggttcattggacaagcgccacggcgacggatctttctctgacgaaatgaacactattttagacaacctggccgcccgggacttcatcaactggttaattcaaacaaagattacagac

SEQ ID NO: 12376 - DNA, 171 bp, synthetic construct
  misc_feature 1..171: note = source = /note="Description of Artificial Sequence: Synthetic coding sequence"
  source 1..171: mol_type = other DNA
atgaagtgggtgtcattcattagcctgctttttctgttctcgtcagcctacagcggtagccttgacaagcgccacggcgacggatcattctccgatgaaatgaacactatcctggacaacctggcggcccgggactttatcaattggctcatccaaacgaagataacggat

SEQ ID NO: 12377 - DNA, 171 bp, synthetic construct
  misc_feature 1..171: note = source = /note="Description of Artificial Sequence: Synthetic coding sequence"
  source 1..171: mol_type = other DNA
atgaaatgggtgagctttatctcactgctctttcttttctcatcggcctactccggtagcttggataagagacatggagatggttccttttccgatgagatgaataccatcctcgacaacctcgccgcacgcgacttcatcaactggctgattcaaacgaagattactgac

SEQ ID NO: 12378 - DNA, 171 bp, synthetic construct
  misc_feature 1..171: note = source = /note="Description of Artificial Sequence: Synthetic coding sequence"
  source 1..171: mol_type = other DNA
atgaaatgggtgagtttcatttcactcttgttccttttttcctcggcctacagtggaagcctggataagagacacggcgacgggtcgtttagcgatgaaatgaacactatcctggataacctcgctgcgcgggacttcatcaattggctgatccagacgaagatcaccgac

SEQ ID NO: 12379 - DNA, 171 bp, synthetic construct
  misc_feature 1..171: note = source = /note="Description of Artificial Sequence: Synthetic coding sequence"
  source 1..171: mol_type = other DNA
atgaagtgggtgtcgttcatctccctgctcttcctgttctccagcgcctactccggctcgttggacaagcgacacggggacgggagcttctccgatgaaatgaataccatccttgacaacctcgcagctagagactttatcaactggctgattcaaactaaaatcacggat

SEQ ID NO: 12380 - DNA, 171 bp, synthetic construct
  misc_feature 1..171: note = source = /note="Description of Artificial Sequence: Synthetic coding sequence"
  source 1..171: mol_type = other DNA
atgaagtgggtgagctttatctcattgctgttcctcttttctagtgcatattctggctctctggataagcgccatggagacggtagcttctctgacgagatgaataccattctggacaacttagccgcacgcgacttcatcaattggttgatacagacaaaaattaccgat

SEQ ID NO: 12381 - DNA, 171 bp, synthetic construct
  misc_feature 1..171: note = source = /note="Description of Artificial Sequence: Synthetic coding sequence"
  source 1..171: mol_type = other DNA
atgaagtgggtctcattcatctcactgctgtttctattttcttctgcctactcgggatccctcgacaaacgtcatggtgacggctcattttctgacgagatgaacactattctggataacctggccgctcgagatttcatcaattggctgattcaaacaaagattacagac

SEQ ID NO: 12382 - DNA, 171 bp, synthetic construct
  misc_feature 1..171: note = source = /note="Description of Artificial Sequence: Synthetic coding sequence"
  source 1..171: mol_type = other DNA
atgaagtgggtctctttcatatctctcttattcctgttctcgtcggcatactctggtagcctcgataagaggcatggtgatggttcgttctctgatgaaatgaacacaatcttggataacctggcagcccgcgatttcatcaactggctgatccagaccaagatcaccgac

SEQ ID NO: 12383 - DNA, 171 bp, synthetic construct
  misc_feature 1..171: note = source = /note="Description of Artificial Sequence: Synthetic coding sequence"
  source 1..171: mol_type = other DNA
atgaagtgggtgtcctttatcagtctcctgttcctcttttcatcggcttactccggaagcctcgacaaaagacatggtgatggcagcttctcggacgaaatgaacactattctcgacaatctcgcggcccgggacttcatcaactggctcatccaaacgaagattaccgat

SEQ ID NO: 12384 - DNA, 171 bp, synthetic construct
  misc_feature 1..171: note = source = /note="Description of Artificial Sequence: Synthetic coding sequence"
  source 1..171: mol_type = other DNA
atgaaatgggtatcgttcatctcgctcctgtttctcttctcaagcgcgtactccggatccctcgataagagacacggagacggatcgtttagcgatgaaatgaacactatacttgataacctggctgccagggatttcatcaattggctcattcagaccaagatcaccgac

SEQ ID NO: 12385 - DNA, 171 bp, synthetic construct
  misc_feature 1..171: note = source = /note="Description of Artificial Sequence: Synthetic coding sequence"
  source 1..171: mol_type = other DNA
atgaagtgggtgtcgtttatctcccttctgtttctgttttcctccgcgtacagcggatcacttgataaacgccatggggatggctcattttccgatgaaatgaacaccattctggacaaccttgcagcacgagatttcatcaactggctgatccaaaccaagattactgac

SEQ ID NO: 12386 - DNA, 171 bp, synthetic construct
  misc_feature 1..171: note = source = /note="Description of Artificial Sequence: Synthetic coding sequence"
  source 1..171: mol_type = other DNA
atgaaatgggtgagcttcatttcgctgctgttcctgttctcatctgcttacagcggatcccttgacaaaagacatggagacggatcgttttccgatgaaatgaacaccatcctcgacaatctggccgcgcgggactttatcaactggctgatccagactaagattacggac

SEQ ID NO: 12387 - DNA, 171 bp, synthetic construct
  misc_feature 1..171: note = source = /note="Description of Artificial Sequence: Synthetic coding sequence"
  source 1..171: mol_type = other DNA
atgaaatgggtgagttttatatctctgctgtttctattctcttccgcctatagtggttctctcgacaaacggcacggtgacggatcattcagtgacgagatgaacactatactagacaaccttgctgcccgcgactttattaattggctgatacagacaaagatcaccgac

SEQ ID NO: 12388 - DNA, 171 bp, synthetic construct
  misc_feature 1..171: note = source = /note="Description of Artificial Sequence: Synthetic coding sequence"
  source 1..171: mol_type = other DNA
atgaagtgggtgagcttcatctcgctgctttttctgtttagctccgcttactccggatcgctggacaagcgccatggcgatggctcattctcagacgaaatgaacactatcctggacaatttggcagctagggacttcatcaactggctcattcagactaagattaccgat

SEQ ID NO: 12389 - DNA, 171 bp, synthetic construct
  misc_feature 1..171: note = source = /note="Description of Artificial Sequence: Synthetic coding sequence"
  source 1..171: mol_type = other DNA
atgaaatgggtctcgtttatctctctgctgttccttttctctagcgcatacagtggatcgctggataagcgccacggtgatggatcattcagcgatgagatgaacactattctggataacttggctgctagagactttataaactggctgatccagacaaaaataactgac

SEQ ID NO: 12390 - DNA, 171 bp, synthetic construct
  misc_feature 1..171: note = source = /note="Description of Artificial Sequence: Synthetic coding sequence"
  source 1..171: mol_type = other DNA
atgaaatgggtgtcctttatctccctcctctttctgttctcttcggcatactcggggtcgctggataagcgccacggagacggctcattctcggatgagatgaacaccatactcgacaatcttgcggccagagacttcatcaactggctgatccagactaagattaccgac

SEQ ID NO: 12391 - DNA, 171 bp, synthetic construct
  misc_feature 1..171: note = source = /note="Description of Artificial Sequence: Synthetic coding sequence"
  source 1..171: mol_type = other DNA
atgaaatgggtgtcgtttatctccctcttgttcctcttttcctccgcatactcgggatcactggacaagaggcacggcgacgggagcttctcagatgaaatgaataccatcttggacaacctggctgcgcgggatttcatcaactggctgatacagacgaagatcactgac

SEQ ID NO: 12392 - DNA, 171 bp, synthetic construct
  misc_feature 1..171: note = source = /note="Description of Artificial Sequence: Synthetic coding sequence"
  source 1..171: mol_type = other DNA
atgaaatgggtatcgtttatatcgttattatttttattttcgtcggcgtattcgggttcgctagataaacgacatggtgatggttcgttttcggatgaaatgaatacgatattagataatctagcggcgcgagattttataaattggttaatacaaacgaaaataacggat

SEQ ID NO: 12393 - DNA, 171 bp, synthetic construct
  misc_feature 1..171: note = source = /note="Description of Artificial Sequence: Synthetic coding sequence"
  source 1..171: mol_type = other DNA
atgaagtgggtgagcttcatcagcctgcttttcctcttctccagcgcatactcagggtcgctcgataagcggcacggggatggttccttttcggatgaaatgaacaccattctggataatcttgcagcacgggactttatcaactggctgatacagaccaaaatcactgac

SEQ ID NO: 12394 - DNA, 171 bp, synthetic construct
  misc_feature 1..171: note = source = /note="Description of Artificial Sequence: Synthetic coding sequence"
  source 1..171: mol_type = other DNA
atgaagtgggtgtcttttatctccctccttttcctattctccagcgcatatagcggttccctggacaagcggcatggcgatgggagcttctcagacgaaatgaatactatccttgacaatctggcggccagagactttattaactggctaatccagacgaagatcaccgac

SEQ ID NO: 12395 - DNA, 171 bp, synthetic construct
  misc_feature 1..171: note = source = /note="Description of Artificial Sequence: Synthetic coding sequence"
  source 1..171: mol_type = other DNA
atgaagtgggtctcctttatctcactgctgttcttgttttcgtccgcatacagtggctcattagataaacggcacggagatgggtcgttttccgatgagatgaataccattcttgacaacctcgcagcccgagactttattaattggttgatccagacaaaaattactgat

SEQ ID NO: 12396 - DNA, 171 bp, synthetic construct
  misc_feature 1..171: note = source = /note="Description of Artificial Sequence: Synthetic coding sequence"
  source 1..171: mol_type = other DNA
atgaagtgggtgtcatttatctctctcctgtttcttttctcgagcgcatactcaggatcgctggacaaacggcacggtgacggctcattctccgatgagatgaacactatcctcgacaatctggcggcccgagatttcatcaactggttgatccaaacgaagatcaccgac

SEQ ID NO: 12397 - DNA, 171 bp, synthetic construct
  misc_feature 1..171: note = source = /note="Description of Artificial Sequence: Synthetic coding sequence"
  source 1..171: mol_type = other DNA
atgaaatgggtgtcatttatcagcctgctttttctcttctcgtccgcctactcgggtagccttgacaagcgccacggtgatggttcctttagcgatgaaatgaacacgatcctggacaacctggcagcgagggatttcattaactggcttattcagaccaaaatcaccgat

SEQ ID NO: 12398 - DNA, 171 bp, synthetic construct
  misc_feature 1..171: note = source = /note="Description of Artificial Sequence: Synthetic coding sequence"
  source 1..171: mol_type = other DNA
atgaagtgggtcagctttatctccttgctttttctgttctcttcggcctacagcggatcactggataagaggcatggggatggatctttttcagacgaaatgaacacgatccttgacaatctggcggcacgcgacttcattaactggcttatccaaactaagattactgat

SEQ ID NO: 12399 - DNA, 171 bp, synthetic construct
  misc_feature 1..171: note = source = /note="Description of Artificial Sequence: Synthetic coding sequence"
  source 1..171: mol_type = other DNA
atgaagtgggtatcgtttatctcgctgctctttctcttcagtagcgcttattcgggttccctcgacaaacgccacggtgatggctccttctcagacgagatgaacaccatcctcgataacttagccgctcgagactttataaattggctaattcagacaaaaattacagac

SEQ ID NO: 12400 - DNA, 171 bp, synthetic construct
  misc_feature 1..171: note = source = /note="Description of Artificial Sequence: Synthetic coding sequence"
  source 1..171: mol_type = other DNA
atgaaatgggtttctttcatttcattactttttcttttctctagtgcatattcaggaagtcttgataaaagacatggggatggatcctttagtgatgaaatgaatactattttagataatttagcagcaagagattttattaattggcttattcaaactaaaataactgat

SEQ ID NO: 12401 - DNA, 171 bp, synthetic construct
  misc_feature 1..171: note = source = /note="Description of Artificial Sequence: Synthetic coding sequence"
  source 1..171: mol_type = other DNA
atgaagtgggtcagcttcatttcactcctgttccttttttcctcggcctactccggcagcctggacaagcgacacggagatggctcattttcggatgaaatgaacacgattctggacaaccttgctgcacgcgacttcatcaattggctgatacagactaagattaccgac

SEQ ID NO: 12402 - DNA, 171 bp, synthetic construct
  misc_feature 1..171: note = source = /note="Description of Artificial Sequence: Synthetic coding sequence"
  source 1..171: mol_type = other DNA
atgaaatgggtcagcttcatctccttgctgtttctcttctctagcgcgtactcaggttctctggataagagacacggagacggatccttcagtgatgaaatgaatacaatcttggataacctggccgcccgtgacttcattaactggctgatccagactaagatcaccgac

SEQ ID NO: 12403 - DNA, 171 bp, synthetic construct
  misc_feature 1..171: note = source = /note="Description of Artificial Sequence: Synthetic coding sequence"
  source 1..171: mol_type = other DNA
atgaaatgggtaagttttatcagccttttattcttgttctccagtgcttactcaggttcactcgataagcgacatggggacggcagtttttccgatgagatgaacactattctggataacctagccgctcgcgatttcattaattggctgattcagaccaaaatcactgac

SEQ ID NO: 12404 - DNA, 171 bp, synthetic construct
  misc_feature 1..171: note = source = /note="Description of Artificial Sequence: Synthetic coding sequence"
  source 1..171: mol_type = other DNA
atgaaatgggtttcctttataagtctcctttttctgtttagttccgcatatagtggaagtttggataagcgtcacggagacggttctttttccgacgaaatgaacactatccttgataatttggctgctcgcgatttcatcaactggctcatccagacaaagatcactgac

SEQ ID NO: 12405 - DNA, 171 bp, synthetic construct
  misc_feature 1..171: note = source = /note="Description of Artificial Sequence: Synthetic coding sequence"
  source 1..171: mol_type = other DNA
atgaagtgggtctccttcatctccctgctcttcctgttttcttcagcctacagcggaagtcttgacaagagacatggagacggcagctttagcgacgaaatgaacactattttagacaatctggccgcaagagatttcattaactggttgatacagactaagatcactgac

SEQ ID NO: 12406 - DNA, 171 bp, synthetic construct
  misc_feature 1..171: note = source = /note="Description of Artificial Sequence: Synthetic coding sequence"
  source 1..171: mol_type = other DNA
atgaaatgggtgtcctttatctcacttctgttccttttttcgtcagcttactctggtagcctggacaagagacacggcgacggatcgttctcggacgagatgaataccatcctggacaacctggcggcccgcgatttcatcaactggctgatccagactaagatcacggat

SEQ ID NO: 12407 - DNA, 171 bp, synthetic construct
  misc_feature 1..171: note = source = /note="Description of Artificial Sequence: Synthetic coding sequence"
  source 1..171: mol_type = other DNA
atgaagtgggtgtcgtttatcagtctcctttttctgttcagctctgcatattccggctcattagataaaaggcacggagatggtagcttctcagacgaaatgaacaccatcctagataatcttgctgcaagggactttattaactggctaatacagacgaagatcacagac

SEQ ID NO: 12408 - DNA, 171 bp, synthetic construct
  misc_feature 1..171: note = source = /note="Description of Artificial Sequence: Synthetic coding sequence"
  source 1..171: mol_type = other DNA
atgaaatgggttagttttatctcactgctcttcctgttctcatccgcgtatagtggcagtctggacaagagacacggcgacggctccttctctgacgagatgaacacaatcttagacaacttggcagcacgagatttcatcaactggctgatacagacaaaaattactgac

SEQ ID NO: 12409 - DNA, 171 bp, synthetic construct
  misc_feature 1..171: note = source = /note="Description of Artificial Sequence: Synthetic coding sequence"
  source 1..171: mol_type = other DNA
atgaagtgggtgtctttcatctcgcttctgttcttgttctcttccgcgtacagcggatcgctggataaaagacacggcgacggatctttctcagacgaaatgaataccatcttggataacctggcagctagggactttatcaactggctgattcagaccaagatcactgac

SEQ ID NO: 12410 - DNA, 171 bp, synthetic construct
  misc_feature 1..171: note = source = /note="Description of Artificial Sequence: Synthetic coding sequence"
  source 1..171: mol_type = other DNA
atgaagtgggtatcattcatatctctgctctttctgttctcctctgcctattctggatctctagataaacgtcacggagatgggtcgttcagtgatgaaatgaacactatactggataaccttgccgctagggatttcataaactggctaatacagacaaaaataactgat

SEQ ID NO: 12411 - DNA, 171 bp, synthetic construct
  misc_feature 1..171: note = source = /note="Description of Artificial Sequence: Synthetic coding sequence"
  source 1..171: mol_type = other DNA
atgaagtgggtgagctttatttcgttgctttttctgttttcgtccgcttattctggttcccttgacaagcgccacggagatggttcctttagcgacgagatgaacactattctggataacttagccgcccgagacttcatcaattggctgatacagactaagatcactgat

SEQ ID NO: 12412 - DNA, 171 bp, synthetic construct
  misc_feature 1..171: note = source = /note="Description of Artificial Sequence: Synthetic coding sequence"
  source 1..171: mol_type = other DNA
atgaagtgggtctcttttatctcattgctgttcctgttcagtagcgcctattccgggtcgctcgacaagagacacggcgatggttccttctccgacgagatgaacacaatccttgataaccttgctgccagagattttattaattggctcatccagacgaagataaccgat

SEQ ID NO: 12413 - DNA, 171 bp, synthetic construct; identical to SEQ ID NO: 12387
  misc_feature 1..171: note = source = /note="Description of Artificial Sequence: Synthetic coding sequence"
  source 1..171: mol_type = other DNA

SEQ ID NO: 12414 - DNA, 171 bp, synthetic construct
  misc_feature 1..171: note = source = /note="Description of Artificial Sequence: Synthetic coding sequence"
  source 1..171: mol_type = other DNA
atgaaatgggtgtccttcatcagcctcctctttcttttttcctctgcctatagcgggagtctggataaaagacacggagacgggtccttttccgacgagatgaacactattcttgacaaccttgccgccagagatttcatcaattggctgattcaaacaaaaattaccgac

SEQ ID NO: 12415 - DNA, 171 bp, synthetic construct
  misc_feature 1..171: note = source = /note="Description of Artificial Sequence: Synthetic coding sequence"
  source 1..171: mol_type = other DNA
atgaagtgggtgtccttcatttcactgctgttcctcttttcatcggcctactccggaagcctggacaaacggcacggagacgggtccttttccgatgagatgaatactatccttgacaacctggccgcccgcgacttcatcaattggctcattcagaccaagatcactgac

SEQ ID NO: 12416 - DNA, 171 bp, synthetic construct
  misc_feature 1..171: note = source = /note="Description of Artificial Sequence: Synthetic coding sequence"
  source 1..171: mol_type = other DNA
atgaagtgggtgtctttcatatctctcctcttccttttctcgagcgcatattcgggctccctggacaaacgccacggagacggatcatttagcgacgaaatgaacaccatcctggataatctggccgcccgggactttatcaattggctcatccaaactaagattactgat

SEQ ID NO: 12417 - DNA, 171 bp, synthetic construct
  misc_feature 1..171: note = source = /note="Description of Artificial Sequence: Synthetic coding sequence"
  source 1..171: mol_type = other DNA
atgaaatgggtctctttcatttcactccttttcctcttttcttcagcgtacagtggctcacttgacaaacgtcacggagatggcagtttttccgatgaaatgaatacgattcttgacaatcttgcagcccgcgattttatcaattggctgatccaaactaaaattacagat

SEQ ID NO: 12418 - DNA, 171 bp, synthetic construct
  misc_feature 1..171: note = source = /note="Description of Artificial Sequence: Synthetic coding sequence"
  source 1..171: mol_type = other DNA
atgaagtgggtgtcctttatctcactgctgtttctgtttagctccgcctactccggcagtcttgacaaaaggcacggggatggcagcttttctgacgagatgaatacaattcttgataacttggctgctcgagactttatcaactggcttatccagaccaaaatcactgac

SEQ ID NO: 12419 - DNA, 171 bp, synthetic construct
  misc_feature 1..171: note = source = /note="Description of Artificial Sequence: Synthetic coding sequence"
  source 1..171: mol_type = other DNA
atgaaatgggtaagctttatctctttactgttccttttctcatccgcttactccggatcactggataagaggcacggggatggctccttttccgatgaaatgaacaccattcttgataacttggcagcacgagatttcataaactggctgatccagacaaagatcacagac

SEQ ID NO: 12420 - DNA, 171 bp, synthetic construct
  misc_feature 1..171: note = source = /note="Description of Artificial Sequence: Synthetic coding sequence"
  source 1..171: mol_type = other DNA
atgaagtgggtttcttttatcagtctcttgttccttttctcttctgcctatagtgggtcacttgacaagcgccatggagatggcagttttagtgatgaaatgaacaccatcctggacaacctagcagcccgtgactttataaattggctcatacaaaccaagatcaccgat

SEQ ID NO: 12421 - DNA, 171 bp, synthetic construct
  misc_feature 1..171: note = source = /note="Description of Artificial Sequence: Synthetic coding sequence"
  source 1..171: mol_type = other DNA
atgaagtgggtctcattcatatcactgctctttctgttcagttccgcctatagtggtagtctagacaagcgacatggggacgggtctttcagtgatgaaatgaacaccatcctagataacttggccgctagagactttattaattggctgattcaaacaaaaattacagat

SEQ ID NO: 12422 - DNA, 171 bp, synthetic construct
  misc_feature 1..171: note = source = /note="Description of Artificial Sequence: Synthetic coding sequence"
  source 1..171: mol_type = other DNA
atgaagtgggtcagcttcatctccctcctcttcctgttctccagtgcatactcgggttcgctggataaacgccacggagacggctcgttctcagacgaaatgaacactattctggataatctggccgcgagggactttatcaactggctcatacagacgaagatcaccgat

SEQ ID NO: 12423 - DNA, 171 bp, synthetic construct
  misc_feature 1..171: note = source = /note="Description of Artificial Sequence: Synthetic coding sequence"
  source 1..171: mol_type = other DNA
atgaagtgggtgagtttcatatcattgctgttcttattttccagtgcttatagtgggtcactcgacaagaggcacggcgacgggtcattctccgacgaaatgaataccatcttagacaacttggctgccagagattttatcaactggttgattcagaccaaaatcaccgat

SEQ ID NO: 12424 - DNA, 171 bp, synthetic construct
  misc_feature 1..171: note = source = /note="Description of Artificial Sequence: Synthetic coding sequence"
  source 1..171: mol_type = other DNA
atgaagtgggtctcttttattagcctacttttcttattctcttccgcctactccggaagtctggacaagcggcacggagacggttccttcagtgacgaaatgaacactatcttggacaatctggcggcacgggacttcatcaactggctgatccagactaagatcacagat

SEQ ID NO: 12425 - DNA, 171 bp, synthetic construct
  misc_feature 1..171: note = source = /note="Description of Artificial Sequence: Synthetic coding sequence"
  source 1..171: mol_type = other DNA
atgaagtgggtgtcgtttatctccctgctgtttctcttctcctcagcctactctggcagcctcgacaaacggcatggtgatggatcgttttcagatgagatgaacactattctcgacaacctggccgcaagagacttcatcaattggttgattcaaactaagataaccgat

SEQ ID NO: 12426 - DNA, 171 bp, synthetic construct
  misc_feature 1..171: note = source = /note="Description of Artificial Sequence: Synthetic coding sequence"
  source 1..171: mol_type = other DNA
atgaagtgggtgagcttcatctcgttgctgtttctgttttcaagcgcatactcgggttcactggacaaaagacacggtgacggcagcttctcagatgaaatgaacactatcctggacaatctggctgcccgggatttcattaactggctcatccaaacgaaaatcactgac

SEQ ID NO: 12427 - DNA, 171 bp, synthetic construct
  misc_feature 1..171: note = source = /note="Description of Artificial Sequence: Synthetic coding sequence"
  source 1..171: mol_type = other DNA
atgaagtgggttagcttcatctcgctgctgttcttgtttagctccgcctatagcggttccctggacaaaaggcatggagacggtagcttttccgacgagatgaacacgattctggataacctggctgcgcgcgactttatcaactggttgattcaaaccaagattaccgac

SEQ ID NO: 12428 - DNA, 171 bp, synthetic construct
  misc_feature 1..171: note = source = /note="Description of Artificial Sequence: Synthetic coding sequence"
  source 1..171: mol_type = other DNA
atgaaatgggtgtccttcatcagcctcctcttcctgttctcatccgcatactccggatcgctggacaagcggcacggggatggatcattctccgacgaaatgaacactatcctcgacaacctggcggcgagagacttcattaactggctgatccaaaccaagattacggat

SEQ ID NO: 12429 - DNA, 171 bp, synthetic construct
  misc_feature 1..171: note = source = /note="Description of Artificial Sequence: Synthetic coding sequence"
  source 1..171: mol_type = other DNA
atgaagtgggtctcctttattagcctccttttccttttctcttcagcgtatagcggatctcttgacaaacgacatggcgacggctcattttccgacgaaatgaatacaattctagataatctcgccgccagggattttattaattggctgatccagaccaaaattaccgac

SEQ ID NO: 12430 - DNA, 171 bp, synthetic construct
  misc_feature 1..171: note = source = /note="Description of Artificial Sequence: Synthetic coding sequence"
  source 1..171: mol_type = other DNA
atgaaatgggtttcattcatctccctgctctttttgttctcaagcgcttactccgggtcgctggacaaacgccatggggacgggtccttctccgacgagatgaacaccatcctggacaatctggccgccagagattttatcaactggttgatccagaccaagataacggat

SEQ ID NO: 12431 - DNA, 171 bp, synthetic construct
  misc_feature 1..171: note = source = /note="Description of Artificial Sequence: Synthetic coding sequence"
  source 1..171: mol_type = other DNA
atgaagtgggtgtccttcatttcactgctcttcctgtttagtagcgcgtattccggttctctggacaaaaggcatggggacggctcattcagtgacgaaatgaataccattctggacaacctggctgcacgggactttattaattggctcattcagactaagatcacagac

SEQ ID NO: 12432 - DNA, 171 bp, synthetic construct
  misc_feature 1..171: note = source = /note="Description of Artificial Sequence: Synthetic coding sequence"
  source 1..171: mol_type = other DNA
atgaaatgggtgagttttatatcactccttttccttttttcttccgcttactccgggagtctcgataagagacacggggatggatcgttctcagatgaaatgaacacaattctcgataatctcgctgcaagggatttcataaactggctcattcagacaaaaatcactgat

SEQ ID NO: 12433 - DNA, 171 bp, synthetic construct
  misc_feature 1..171: note = source = /note="Description of Artificial Sequence: Synthetic coding sequence"
  source 1..171: mol_type = other DNA
atgaaatgggtgagctttatctccctgcttttcctctttagctcagcatactctggatccctggataagagacacggagatggctcattcagtgatgaaatgaataccatactggacaacctggccgcccgcgatttcattaactggctcatccagactaagatcactgac

SEQ ID NO: 12434 - DNA, 171 bp, synthetic construct
  misc_feature 1..171: note = source = /note="Description of Artificial Sequence: Synthetic coding sequence"
  source 1..171: mol_type = other DNA
atgaaatgggtgagctttatcagccttctttttcttttttcatccgcttactcaggctcgcttgacaagagacatggagacggttcgttcagcgatgagatgaacactatcctggacaaccttgcagcaagggactttatcaattggcttattcagaccaagattaccgac

SEQ ID NO: 12435 - DNA, 171 bp, synthetic construct
  misc_feature 1..171: note = source = /note="Description of Artificial Sequence: Synthetic coding sequence"
  source 1..171: mol_type = other DNA
atgaaatgggtgagcttcattagcctgctgtttcttttctcgagcgcatactcgggctcacttgacaagcgccatggcgacggatcgttcagcgatgaaatgaataccatactggacaatctcgctgcacgggactttatcaattggctgattcagacgaaaatcaccgat

SEQ ID NO: 12436 - DNA, 171 bp, synthetic construct
  misc_feature 1..171: note = source = /note="Description of Artificial Sequence: Synthetic coding sequence"
  source 1..171: mol_type = other DNA
atgaagtgggtttctttcatctctttgctattcttgttttcatccgcatattctggcagccttgataagaggcacggcgatggcagtttcagcgacgaaatgaacactattctggacaacttggctgctcgagattttatcaactggctcatacaaactaaaatcaccgac

SEQ ID NO: 12437 - DNA, 171 bp, synthetic construct
  misc_feature 1..171: note = source = /note="Description of Artificial Sequence: Synthetic coding sequence"
  source 1..171: mol_type = other DNA
atgaagtgggtatcctttatttctcttctttttctgtttagttccgcgtattctggttctctggataagcgacacggtgatggttccttttcagatgaaatgaacaccattcttgataacctggctgctcgcgactttatcaactggttgattcaaaccaagatcaccgat

SEQ ID NO: 12438 - DNA, 171 bp, synthetic construct
  misc_feature 1..171: note = source = /note="Description of Artificial Sequence: Synthetic coding sequence"
  source 1..171: mol_type = other DNA
atgaaatgggtgagtttcatctccctgctgttcctttttagctcagcctactctggatccctggataagaggcacggggatggaagcttttctgacgagatgaatacaatcctcgacaacctcgctgctagggacttcatcaattggctgatccaaactaagatcacagac

SEQ ID NO: 12439 - DNA, 171 bp, synthetic construct
  misc_feature 1..171: note = source = /note="Description of Artificial Sequence: Synthetic coding sequence"
  source 1..171: mol_type = other DNA
atgaagtgggtgtcctttattagcctcctgttcctatttagttccgcttactccggatccctggataaacgccatggcgatggcagttttagcgacgagatgaataccatcctcgataacttggctgcgagggatttcattaactggcttatccagactaagattaccgat

SEQ ID NO: 12440 - DNA, 171 bp, synthetic construct
  misc_feature 1..171: note = source = /note="Description of Artificial Sequence: Synthetic coding sequence"
  source 1..171: mol_type = other DNA
atgaagtgggtttcatttatctcactgctcttcctgtttagctccgcttacagcgggagcctcgataaacgccacggcgacggttctttctcggacgaaatgaacaccatattggacaatctggccgcgcgggattttattaattggttgatacagacaaaaattacagat

SEQ ID NO: 12441 - DNA, 171 bp, synthetic construct
  misc_feature 1..171: note = source = /note="Description of Artificial Sequence: Synthetic coding sequence"
  source 1..171: mol_type = other DNA
atgaagtgggtgagttttatttcccttcttttcctgttcagctcagcgtactcaggaagtctggacaaacgccacggggacggtagcttttctgatgaaatgaataccattctcgataatctcgctgctcgcgacttcatcaactggctgatccagaccaaaataactgac

SEQ ID NO: 12442 - DNA, 171 bp, synthetic construct
  misc_feature 1..171: note = source = /note="Description of Artificial Sequence: Synthetic coding sequence"
  source 1..171: mol_type = other DNA
atgaaatgggtcagttttatctccctcttgttcctctttagctcagcatattccggcagtctggacaaaaggcatggcgacggatcatttagtgatgaaatgaacaccattctggataatcttgcggctagggatttcattaactggctgatccagaccaagatcacagac

SEQ ID NO: 12443 - DNA, 165 bp, synthetic construct
  misc_feature 1..165: note = source = /note="Description of Artificial Sequence: Synthetic coding sequence"
  source 1..165: mol_type = other DNA
atgccatcatcagtgtcatggggaattctgctgctggcaggtctttgttgtttggtgccggtgtcccttgctcacgcagaaggaacttttacttccgatgtgtcgagctacttggagggacaggccgcgaaggaattcatagcatggctggtccgggggcgagga

SEQ ID NO: 12444 - DNA, 165 bp, synthetic construct
  misc_feature 1..165: note = source = /note="Description of Artificial Sequence: Synthetic coding sequence"
  source 1..165: mol_type = other DNA
atgccatcaagcgtgtcctggggtatcctgctcctagccgggctgtgttgcctggtgccagtctctttggctcacgcagagggtaccttcaccagcgatgtaagtagctacctggaggggcaggcagccaaggaattcatagcctggctggtaagggggaggggg

SEQ ID NO: 12445 - DNA, 165 bp, synthetic construct
  misc_feature 1..165: note = source = /note="Description of Artificial Sequence: Synthetic coding sequence"
  source 1..165: mol_type = other DNA
atgccatctagtgtgagttggggcatcttgttgctggcgggtctgtgctgccttgtacccgttagtctggctcacgcagagggaacgtttacctctgacgtgtcctcatatttggaagggcaggccgccaaagaattcatagcctggctggtgcgtggtcgggga

SEQ ID NO: 12446 - DNA, 165 bp, synthetic construct
  misc_feature 1..165: note = source = /note="Description of Artificial Sequence: Synthetic coding sequence"
  source 1..165: mol_type = other DNA
atgcccagcagcgtgagttggggtattctcctgctcgcgggtctgtgctgcctcgtaccggtgtcactggcgcacgcagagggaacattcacgtctgatgtgtccagctatctggaaggacaggcggctaaagaatttatcgcatggctggtgagggggagaggt

SEQ ID NO: 12447 - DNA, 165 bp, synthetic construct
  misc_feature 1..165: note = source = /note="Description of Artificial Sequence: Synthetic coding sequence"
  source 1..165: mol_type = other DNA
atgccgtcgtcggtatcgtggggtatattactattagcgggtttatgttgtttagttccggtttcgttagcgcatgcggaaggtacgtttacgtcggatgtttcgtcgtatttagaaggtcaagcggcgaaagaatttatagcgtggctagtacgtggtcgaggt

SEQ ID NO: 12448 - DNA, 165 bp, synthetic construct
  misc_feature 1..165: note = source = /note="Description of Artificial Sequence: Synthetic coding sequence"
  source 1..165: mol_type = other DNA
atgccaagctcagtgtcttggggaatcttgctgttggccggtctttgctgcctggtgccggtgtccctcgcccatgccgagggaacttttaccagcgacgtgtcatcgtacctcgaaggccaggccgccaaggagttcattgcgtggctggtgaggggacgcgga

SEQ ID NO: 12449 - DNA, 165 bp, synthetic construct
  misc_feature 1..165: note = source = /note="Description of Artificial Sequence: Synthetic coding sequence"
  source 1..165: mol_type = other DNA
atgccttcctccgtgtcatggggtattctgctgcttgcaggcctctgttgcctggtgcctgtgtccttggcccacgctgaaggcacttttacttccgacgtttcgagctaccttgaaggtcaagcagccaaggagttcatcgcttggctcgtgcgcgggcgtgga

SEQ ID NO: 12450 - DNA, 165 bp, synthetic construct
  misc_feature 1..165: note = source = /note="Description of Artificial Sequence: Synthetic coding sequence"
  source 1..165: mol_type = other DNA
atgccaagcagcgtgagctggggaatcctgctcctggccggcctctgctgtctcgtcccggtgtcccttgctcatgcggaaggaacgtttacctccgacgtcagctcctacctggaggggcaggcggcgaaggagttcatcgcttggcttgtgcgcggtcgcggt

SEQ ID NO: 12451 - DNA, 165 bp, synthetic construct
  misc_feature 1..165: note = source = /note="Description of Artificial Sequence: Synthetic coding sequence"
  source 1..165: mol_type = other DNA
atgcctagctcggtgtcctggggcattctcctgcttgcaggactgtgctgtctcgttcctgtctcgctggcccatgcagaaggtacttttacgtccgatgtgtcatcctacctggaaggacaggcagcaaaggaattcatcgcgtggttggtcagaggccgaggc

SEQ ID NO: 12452 - DNA, 165 bp, synthetic construct
  misc_feature 1..165: note = source = /note="Description of Artificial Sequence: Synthetic coding sequence"
  source 1..165: mol_type = other DNA
atgccatcctcggttagctggggaattctgctgctcgcaggtctgtgttgccttgtgcccgtttcgctggcgcatgccgaaggaactttcacctccgatgtgtccagttacctcgaaggtcaagctgcaaaggagtttatcgcctggttggtcagaggacgtggc

SEQ ID NO: 12453 - DNA, 165 bp, synthetic construct
  misc_feature 1..165: note = source = /note="Description of Artificial Sequence: Synthetic coding sequence"
  source 1..165: mol_type = other DNA
atgccttcaagcgtgtcatggggcattcttttgctggcaggactttgctgtcttgtccccgtgtccctcgcacatgctgaaggaacgtttacctcagatgtctcgtcgtacctggaaggacaggcagcgaaggaattcatcgcttggctcgtcagaggaaggggc

SEQ ID NO: 12454 - DNA, 165 bp, synthetic construct
  misc_feature 1..165: note = source = /note="Description of Artificial Sequence: Synthetic coding sequence"
  source 1..165: mol_type = other DNA
atgcctagcagcgtatcctggggcattctccttctggcgggtctgtgctgcttagtcccagtgtccctcgcgcatgccgaaggcaccttcacgtccgacgtcagctcctatctggagggccaggcggcgaaagaattcatcgcttggctcgtcagaggcaggggt

SEQ ID NO: 12455 - DNA, 165 bp, synthetic construct
  misc_feature 1..165: note = source = /note="Description of Artificial Sequence: Synthetic coding sequence"
  source 1..165: mol_type = other DNA
atgcctagcagcgtcagctggggaatcctccttctcgccggactttgctgtctggtgccagtatcgctggctcatgcagaaggaacctttacttctgatgtctcatcgtacctggagggccaagctgccaaggaattcattgcatggctggtccgcgggagaggt

SEQ ID NO: 12456 - DNA, 165 bp, synthetic construct
  misc_feature 1..165: note = source = /note="Description of Artificial Sequence: Synthetic coding sequence"
  source 1..165: mol_type = other DNA
atgcccagcagtgtatcgtggggaatccttttgctcgccggcctgtgctgcctcgtcccggtctccttggctcacgcagaaggcacattcaccagcgacgtcagtagctaccttgaggggcaggcagccaaggaatttatcgcgtggctcgtgcgaggcagaggc

SEQ ID NO: 12457 - DNA, 165 bp, synthetic construct
  misc_feature 1..165: note = source = /note="Description of Artificial Sequence: Synthetic coding sequence"
  source 1..165: mol_type = other DNA
atgccttcatctgtgtcttggggtattctcctccttgctggtctgtgctgcttggttcccgtttcactggcacatgctgagggcaccttcacttctgatgtcagttcgtatctggagggccaggcagccaaggagtttatcgcctggcttgtgcgcggaagaggc

SEQ ID NO: 12458 - DNA, 165 bp, synthetic construct
  misc_feature 1..165: note = source = /note="Description of Artificial Sequence: Synthetic coding sequence"
  source 1..165: mol_type = other DNA
atgccctcttccgtgagctggggcatcctgttgctggccggcctgtgctgtctcgtgcctgtttctctggctcatgctgagggaacctttaccagcgatgtgtcttcctacctggaaggacaggcggccaaggagttcatcgcctggctcgttagaggaaggggc

SEQ ID NO: 12459 - DNA, 165 bp, synthetic construct
  misc_feature 1..165: note = source = /note="Description of Artificial Sequence: Synthetic coding sequence"
  source 1..165: mol_type = other DNA
atgccgagctcagtcagctggggaatcctgctcctggccggactttgttgtcttgtgccagtgagtcttgcgcatgcagaaggcacattcacatcagacgtcagtagctatctcgaaggccaagctgccaaagagtttatagcctggctggtccgaggacgcggc

SEQ ID NO: 12460 - DNA, 165 bp, synthetic construct
  misc_feature 1..165: note = source = /note="Description of Artificial Sequence: Synthetic coding sequence"
  source 1..165: mol_type = other DNA
atgccctcctccgtgagctggggcatcctgctcttggcgggtctgtgctgcctggtgccggtgtccctggctcatgcagaaggaacctttactagcgatgtgagttcctaccttgagggccaggccgcaaaagaattcattgcttggcttgttagaggaagagga

SEQ ID NO: 12461 - DNA, 165 bp, synthetic construct
  misc_feature 1..165: note = source = /note="Description of Artificial Sequence: Synthetic coding sequence"
  source 1..165: mol_type = other DNA
atgccttcaagcgtttcttggggtattctactcctggccggtctgtgttgcctggttccagttagcctcgcacacgctgagggcacgttcacatctgacgtgtcctcgtacctggagggccaagcagcaaaggagttcatcgcctggcttgtcaggggtcggggg

SEQ ID NO: 12462 - DNA, 165 bp, synthetic construct
  misc_feature 1..165: note = source = /note="Description of Artificial Sequence: Synthetic coding sequence"
  source 1..165: mol_type = other DNA
atgccaagctcagtctcatggggaattctcttgctggccggtttgtgttgcctcgtccctgtgtcgcttgctcatgctgagggcacctttactagcgatgtttcctcgtacctcgaaggacaagcggcaaaggaattcatcgcatggcttgtgaggggccgaggt

SEQ ID NO: 12463 - DNA, 165 bp, synthetic construct
  misc_feature 1..165: note = source = /note="Description of Artificial Sequence: Synthetic coding sequence"
  source 1..165: mol_type = other DNA
atgccctcttccgtgagctggggcattctcttgcttgccggattgtgttgccttgttccagtttccctcgcacacgccgaaggaacattcacatccgatgtgtcttcttatctggagggtcaagccgccaaagaatttatagcctggcttgtccggggtcgcgga

SEQ ID NO: 12464 - DNA, 165 bp, synthetic construct
  misc_feature 1..165: note = source = /note="Description of Artificial Sequence: Synthetic coding sequence"
  source 1..165: mol_type = other DNA
atgccctcctcagtgtcttggggcatactcctcctcgcgggactgtgttgcctcgttcctgtgtctctcgcacatgcggaggggaccttcacctccgacgttagctcatacctcgaaggtcaggccgcaaaggagttcatagcctggctggtgcgaggcagaggg

SEQ ID NO: 12465 - DNA, 165 bp, synthetic construct
  misc_feature 1..165: note = source = /note="Description of Artificial Sequence: Synthetic coding sequence"
  source 1..165: mol_type = other DNA
atgccatcatcagtctcatggggtattcttctcctggctgggctctgctgtctggtgcctgtgagcttggcccatgcagagggtacctttacctcagacgttagctcctatctagaaggacaggccgctaaagaattcatcgcctggctcgtccgcgggaggggt

SEQ ID NO: 12466 - DNA, 165 bp, synthetic construct
  misc_feature 1..165: note = source = /note="Description of Artificial Sequence: Synthetic coding sequence"
  source 1..165: mol_type = other DNA
atgccaagctccgtcagctgggggatcctactcctggcaggtctatgttgtctggtgccggtgtcgctggcccacgctgagggcacctttactagtgacgtgtctagttatctggaggggcaggcagccaaggagtttattgcatggctcgtaagaggacggggg

SEQ ID NO: 12467 - DNA, 165 bp, synthetic construct
  misc_feature 1..165: note = source = /note="Description of Artificial Sequence: Synthetic coding sequence"
  source 1..165: mol_type = other DNA
atgccatcttcagtcagctggggtattctcttacttgctggtttgtgttgtcttgtccccgtaagtctagctcatgcagaaggaacttttacctcggatgtaagctcttatcttgagggacaagctgcgaaagagtttattgcctggctcgttcgaggacgagga

SEQ ID NO: 12468 - DNA, 165 bp, synthetic construct
  misc_feature 1..165: note = source = /note="Description of Artificial Sequence: Synthetic coding sequence"
  source 1..165: mol_type = other DNA
atgccgtcatcggtgtcctggggaatcctcttgctggcgggcctctgctgcttggtccctgtgtcactcgctcacgctgaaggaaccttcacgagtgacgtctcgtcataccttgaagggcaggcagcgaaggagtttattgcctggctggtgcgcggacggggt

SEQ ID NO: 12469 - DNA, 165 bp, synthetic construct
  misc_feature 1..165: note = source = /note="Description of Artificial Sequence: Synthetic coding sequence"
  source 1..165: mol_type = other DNA
atgccatcatccgtgagctgggggattcttctgctggcaggactctgctgtctggtcccagtctcccttgcccatgccgagggaaccttcacctcggacgtctcgagctacctcgaaggtcaagcagcgaaagaattcattgcctggcttgtgagaggtagagga

SEQ ID NO: 12470 - DNA, 165 bp, synthetic construct
  misc_feature 1..165: note = source = /note="Description of Artificial Sequence: Synthetic coding sequence"
  source 1..165: mol_type = other DNA
atgccgtcgtcagtctcctgggggatcctcctcctggccggactgtgctgcctggtgccggtgtccctcgcccacgccgaaggcaccttcacgtccgatgtctcatcgtacctggaaggccaggctgcaaaggaatttatcgcgtggctggtgcgaggtagggga

SEQ ID NO: 12471 - DNA, 165 bp, synthetic construct
  misc_feature 1..165: note = source = /note="Description of Artificial Sequence: Synthetic coding sequence"
  source 1..165: mol_type = other DNA
atgccctctagcgtgtcctggggaatcctgcttctggccggcttgtgctgtttagtgccagtatccttagcccacgccgagggcacctttactagcgacgtgagttcttatttggagggacaagccgccaaagagttcatcgcgtggctggtgcggggtcggggc

SEQ ID NO: 12472 - DNA, 165 bp, synthetic construct
  misc_feature 1..165: note = source = /note="Description of Artificial Sequence: Synthetic coding sequence"
  source 1..165: mol_type = other DNA
atgccatcctcagttagctggggcatcctattgctcgccggcctctgttgtctcgttccagtgtcgctggcccatgctgagggaactttcacctcagatgtgtcatcctatttagaaggacaggccgccaaggagttcatcgcttggctggtgcggggcaggggc

SEQ ID NO: 12473 - DNA, 165 bp, synthetic construct
  misc_feature 1..165: note = source = /note="Description of Artificial Sequence: Synthetic coding sequence"
  source 1..165: mol_type = other DNA
atgccgtcgagcgttagctggggaatcctgctgctcgccggactgtgctgtttggtgcctgtcagccttgcgcacgcagagggtaccttcacttcggacgtttcatcctatctggaaggccaggccgcgaaggagttcatcgcctggctcgtgagggggagagga

SEQ ID NO: 12474 - DNA, 165 bp, synthetic construct
  misc_feature 1..165: note = source = /note="Description of Artificial Sequence: Synthetic coding sequence"
  source 1..165: mol_type = other DNA
atgccaagttcagtgtcgtggggcatcctgttgcttgctggcttgtgttgccttgtgcctgtgtccctggctcacgcagaagggacctttacttcagatgtgtcgtcatacctcgaaggccaggcggcgaaagagttcatcgcgtggctcgtgcggggacgcggt

SEQ ID NO: 12475 - DNA, 165 bp, synthetic construct
  misc_feature 1..165: note = source = /note="Description of Artificial Sequence: Synthetic coding sequence"
  source 1..165: mol_type = other DNA
atgccctcttccgtttcctggggcatcttgttgcttgcgggactgtgctgtctggtcccagtgtccctcgcccatgctgaggggacctttactagcgatgtgtcatcctaccttgaggggcaggcggcaaaggaattcattgcgtggctggtcagaggacgagga

SEQ ID NO: 12476 - DNA, 165 bp, synthetic construct
  misc_feature 1..165: note = source = /note="Description of Artificial Sequence: Synthetic coding sequence"
  source 1..165: mol_type = other DNA
atgcctagttctgtaagctggggtatactgctgttggccggtctgtgttgcctggttcccgtgtcgctggctcacgctgaaggaacgttcacctccgacgtcagctcatacttggagggccaagcggccaaagaattcattgcctggctcgtacgcggcaggggt

SEQ ID NO: 12477 - DNA, 165 bp, synthetic construct
  misc_feature 1..165: note = source = /note="Description of Artificial Sequence: Synthetic coding sequence"
  source 1..165: mol_type = other DNA
atgccgtcttctgtgagttggggcatactgctcctcgcaggcctgtgttgtctggttcctgtgtcgctggcccatgcggagggtacctttacctccgacgtttcttcttatctggaaggtcaggccgccaaggaatttattgcctggctggtgcgcggtcgcggt

SEQ ID NO: 12478 - DNA, 165 bp, synthetic construct
  misc_feature 1..165: note = source = /note="Description of Artificial Sequence: Synthetic coding sequence"
  source 1..165: mol_type = other DNA
atgccctctagcgtctcctggggcattctgctgctcgcaggcctctgctgtctggtacccgttagccttgcacatgccgaggggacctttactagcgatgtttcatcctatctcgaaggacaggctgccaaggagtttatcgcttggctcgtgcgcgggcgagga

SEQ ID NO: 12479 - DNA, 165 bp, synthetic construct
  misc_feature 1..165: note = source = /note="Description of Artificial Sequence: Synthetic coding sequence"
  source 1..165: mol_type = other DNA
atgccctcctcagtgtcttggggtatcctgctcctggcaggactgtgttgcctcgtccctgtctctcttgcccatgctgagggaacctttacttcagatgtgtcgtcctacctcgaaggccaagcggccaaggaattcatagcatggcttgtgaggggtagaggc

SEQ ID NO: 12480 - DNA, 165 bp, synthetic construct
  misc_feature 1..165: note = source = /note="Description of Artificial Sequence: Synthetic coding sequence"
  source 1..165: mol_type = other DNA
atgccaagctcagtgtcctggggcatcttgctgctggcgggactgtgttgcctcgtgcccgtctcccttgcacacgcggaaggcaccttcacctcggatgtctcgtcatacctggaagggcaggccgcgaaagaattcattgcgtggctcgttcgcggacgcggg

SEQ ID NO: 12481 - DNA, 165 bp, synthetic construct
  misc_feature 1..165: note = source = /note="Description of Artificial Sequence: Synthetic coding sequence"
  source 1..165: mol_type = other DNA
atgcccagttccgtgtcatggggcatactgttgcttgccggcttgtgctgcctggtacccgtgtccctcgcccatgcggaaggaacattcacctctgacgtgtcatcatacctcgagggccaggcagccaaggagttcatagcgtggttggtacgcggccgggga

SEQ ID NO: 12482 - DNA, 165 bp, synthetic construct
  misc_feature 1..165: note = source = /note="Description of Artificial Sequence: Synthetic coding sequence"
  source 1..165: mol_type = other DNA
atgccctctagcgtctcatggggcatattattgctcgctgggctgtgttgtctggtccctgtgagcttggcccacgcagaaggaacattcacctctgatgtgtctagttacctcgaggggcaggctgccaaagagtttattgcctggctggtgcggggacggggg

SEQ ID NO: 12483 - DNA, 165 bp, synthetic construct
  misc_feature 1..165: note = source = /note="Description of Artificial Sequence: Synthetic coding sequence"
  source 1..165: mol_type = other DNA
atgccatcgtccgtcagctggggcatcttgctgcttgcgggactctgttgcctggtcccggtgagcctggcccacgcggaggggacttttacctcggacgtgtcatcctacctcgaaggacaggctgcaaaggaattcatcgcctggctggtgcgcggtcgggga

SEQ ID NO: 12484 - DNA, 165 bp, synthetic construct
  misc_feature 1..165: note = source = /note="Description of Artificial Sequence: Synthetic coding sequence"
  source 1..165: mol_type = other DNA
atgccctcgtccgtgagctggggaattctgctcttggctggtttgtgctgtcttgtgccggttagtctcgcgcacgccgagggtaccttcacttctgacgtctcatcgtacttggaagggcaggctgcaaaggagtttatcgcctggctcgtgcggggccgcgga

SEQ ID NO: 12485 - DNA, 165 bp, synthetic construct
  misc_feature 1..165: note = source = /note="Description of Artificial Sequence: Synthetic coding sequence"
  source 1..165: mol_type = other DNA
atgcccagttcagtgtcttggggcatccttctgctggctggtctctgctgtcttgtgccagtgagcctcgcccacgcagaggggacctttacttctgacgtctcctcttacttggagggccaagccgcaaaagaatttatagcctggctagtcagaggcaggggc

SEQ ID NO: 12486 - DNA, 165 bp, synthetic construct
  misc_feature 1..165: note = source = /note="Description of Artificial Sequence: Synthetic coding sequence"
  source 1..165: mol_type = other DNA
atgcccagctccgtctcttggggtatattgctgctagcgggtctgtgctgtttggtaccagtctcgctggcccatgccgagggtacgttcacctctgacgtgtcctcttacttggagggtcaggcagctaaggagtttatcgcatggttggttcgggggagggga

SEQ ID NO: 12487 - DNA, 165 bp, synthetic construct
  misc_feature 1..165: note = source = /note="Description of Artificial Sequence: Synthetic coding sequence"
  source 1..165: mol_type = other DNA
atgccatcatcagtgtcatggggaattctgcttttggccggcctctgctgtctcgttcctgtgagcctggcacatgctgaaggtacttttacctcggatgtcagctcctaccttgagggacaagcggcaaaggaattcatcgcatggctcgtaagaggacgcggg

SEQ ID NO: 12488 - DNA, 165 bp, synthetic construct
  misc_feature 1..165: note = source = /note="Description of Artificial Sequence: Synthetic coding sequence"
  source 1..165: mol_type = other DNA
atgccttcaagcgtctcatggggaattctcctcttggccggcctgtgctgtctcgtcccagtctccctggctcacgccgagggtacgttcacttccgatgtcagcagctatctagagggccaagcagctaaggagttcatagcctggctcgttcgcgggcggggg

SEQ ID NO: 12489 - DNA, 165 bp, synthetic construct
  misc_feature 1..165: note = source = /note="Description of Artificial Sequence: Synthetic coding sequence"
  source 1..165: mol_type = other DNA
atgccgtcatctgtgagctgggggattctgctgctggccggactctgttgcctggttccagtgtctctggctcatgctgagggcacgttcaccagcgatgtctccagctatctggagggacaggccgcaaaggaattcattgcatggttggtgagaggccgcgga

SEQ ID NO: 12490 - DNA, 165 bp, synthetic construct
  misc_feature 1..165: note = source = /note="Description of Artificial Sequence: Synthetic coding sequence"
  source 1..165: mol_type = other DNA
atgccctcatcagtgtcatggggtatcctcctgctggccggactgtgttgccttgtacccgtttcactggctcacgctgagggcaccttcacttccgacgtgtcctcttacctcgaaggccaagctgctaaggaattcattgcctggttggttcgcggtaggggc

SEQ ID NO: 12491 - DNA, 165 bp, synthetic construct
  misc_feature 1..165: note = source = /note="Description of Artificial Sequence: Synthetic coding sequence"
  source 1..165: mol_type = other DNA
atgccttcctctgtcagctggggaatcttacttcttgccggactttgctgtctggtgccggtgagcttagcgcacgctgagggaacatttactagcgatgtttcgagttacctggaaggacaggcggcgaaggagttcatcgcctggctggttagagggagaggt

SEQ ID NO: 12492 - DNA, 165 bp, synthetic construct
  misc_feature 1..165: note = source = /note="Description of Artificial Sequence: Synthetic coding sequence"
  source 1..165: mol_type = other DNA
atgccttcttcagtaagttgggggattttacttttagcaggtttatgttgtttagttccagtatctcttgcacatgctgaaggtacattcacttcagatgtatcaagttatttagaaggacaagctgcaaaagaatttattgcttggttagtaagaggaagagga

SEQ ID NO: 12493 - DNA, 165 bp, synthetic construct
  misc_feature 1..165: note = source = /note="Description of Artificial Sequence: Synthetic coding sequence"
  source 1..165: mol_type = other DNA
atgccgagctctgtctcctggggaatcctcctgcttgctggactgtgctgcctggtgccggtcagcttggcccacgccgaagggacgttcaccagcgacgtgtcgtcatacctggaaggtcaggccgccaaagaattcatcgcctggttggtgcgcggaagggga

SEQ ID NO: 12494 - DNA, 165 bp, synthetic construct
  misc_feature 1..165: note = source = /note="Description of Artificial Sequence: Synthetic coding sequence"
  source 1..165: mol_type = other DNA
atgccctcatcagtttcttggggtattctgctcctggcgggcctctgttgcttggtccccgtgtccttagctcacgctgagggcacctttacttcggatgtcagcagctacctggagggccaggcagccaaggagtttatcgcatggctagtgcgcggtcgaggc

SEQ ID NO: 12495 - DNA, 165 bp, synthetic construct
  misc_feature 1..165: note = source = /note="Description of Artificial Sequence: Synthetic coding sequence"
  source 1..165: mol_type = other DNA
atgccgtcaagtgtttcgtggggaattcttctcctcgcaggactctgttgcctcgtgcctgtatcgctagcccatgcggagggtacgttcacatctgatgtgtcgtcttaccttgaaggtcaagcagcgaaagagtttatcgcatggctcgttcgcggacggggg

SEQ ID NO: 12496 - DNA, 165 bp, synthetic construct
  misc_feature 1..165: note = source = /note="Description of Artificial Sequence: Synthetic coding sequence"
  source 1..165: mol_type = other DNA
atgccctcatcggtgtcatggggaattttattactagcagggctgtgttgccttgtacccgtttctcttgcacacgccgaagggacatttacttctgatgtgtcatcttacctggaagggcaagccgccaaagaatttatcgcctggctagtcagggggagaggg

SEQ ID NO: 12497 - DNA, 165 bp, synthetic construct
  misc_feature 1..165: note = source = /note="Description of Artificial Sequence: Synthetic coding sequence"
  source 1..165: mol_type = other DNA
atgccatcgtccgtgtcatggggaatcctgctcctggccggactgtgttgcctggtgccagtgtcacttgcccacgcggagggaacttttacctcggatgtgtcatcgtaccttgaaggacaagcagcgaaggaattcattgcttggctggtgagaggcaggggc

SEQ ID NO: 12498 - DNA, 165 bp, synthetic construct
  misc_feature 1..165: note = source = /note="Description of Artificial Sequence: Synthetic coding sequence"
  source 1..165: mol_type = other DNA
atgcctagcagcgtgagctgggggatcttgctcctggcagggctctgttgcctcgttccagtgagcctcgcccacgccgagggcacttttacttccgatgtgagcagctacctcgagggccaggcagccaaagagttcatcgcatggctggtccgagggcgcggc

SEQ ID NO: 12499 - DNA, 165 bp, synthetic construct
  misc_feature 1..165: note = source = /note="Description of Artificial Sequence: Synthetic coding sequence"
  source 1..165: mol_type = other DNA
atgcctagctccgtttcctggggaatactcctcttggcaggtctctgttgccttgttcctgtttctcttgcccatgccgagggcacgtttacttcggacgtctcttcatatctggaggggcaggctgcaaaggaattcattgcgtggcttgtaaggggaagggga

SEQ ID NO: 12500 - DNA, 165 bp, synthetic construct
  misc_feature 1..165: note = source = /note="Description of Artificial Sequence: Synthetic coding sequence"
  source 1..165: mol_type = other DNA
atgccctcctctgtctcatgggggatcttgctcctcgcaggactctgctgtctggtgcctgtgtccctcgcacacgcagaaggaacttttacttccgatgtgtcttcctatctcgaagggcaggcagctaaggaatttatagcatggctcgtccgaggaagagga

SEQ ID NO: 12501 - DNA, 165 bp, synthetic construct
  misc_feature 1..165: note = source = /note="Description of Artificial Sequence: Synthetic coding sequence"
  source 1..165: mol_type = other DNA
atgcctagctctgtctcctggggaatcctcctgcttgccggattgtgctgcttggttccggtgagcctggctcacgcagaaggcacctttacttcagacgtgtcgtcgtacctggagggccaggcggcaaaggaattcatcgcctggttggtgagaggacgcggg

SEQ ID NO: 12502 - DNA, 165 bp, synthetic construct
  misc_feature 1..165: note = source = /note="Description of Artificial Sequence: Synthetic coding sequence"
  source 1..165: mol_type = other DNA
atgccgtcatcggtcagctggggaatcctgctcctggccggactgtgctgcctcgtgccagtgtccctcgcacacgccgaaggaacctttactagcgatgtgagctcgtacctggagggccaagcagcaaaagagttcatcgcgtggttggtccgcggtagagga

SEQ ID NO: 12503 - DNA, 165 bp, synthetic construct
  misc_feature 1..165: note = source = /note="Description of Artificial Sequence: Synthetic coding sequence"
  source 1..165: mol_type = other DNA
atgccgtcctccgtcagctggggtatcctgctgctggcaggtctttgctgtcttgtgccagtgtcactggcacatgccgaaggtacctttacgagcgacgtgtcaagctacctggaaggtcaagcagcaaaggagttcattgcctggttggtgagaggacggggg

SEQ ID NO: 12504 - DNA, 165 bp, synthetic construct
  misc_feature 1..165: note = source = /note="Description of Artificial Sequence: Synthetic coding sequence"
  source 1..165: mol_type = other DNA
atgccatcgtcggtgtcctggggaattctgctgctggccggcctgtgctgtttggtcccagtgtcacttgcgcacgctgaaggaaccttcacttccgatgtttccagctacctcgagggacaagccgcaaaggagttcattgcctggttggtgagagggcgggga

SEQ ID NO: 12505 - DNA, 165 bp, synthetic construct
  misc_feature 1..165: note = source = /note="Description of Artificial Sequence: Synthetic coding sequence"
  source 1..165: mol_type = other DNA
atgccctcaagcgtctcatggggcatcctcctgctcgccggactgtgctgtttggtgccggtgagcctggctcatgccgagggaaccttcacttcggatgtgtcctcgtacctcgagggacaagccgctaaggagttcattgcatggcttgtgcgcggacgggga

SEQ ID NO: 12506 - DNA, 165 bp, synthetic construct
  misc_feature 1..165: note = source = /note="Description of Artificial Sequence: Synthetic coding sequence"
  source 1..165: mol_type = other DNA
atgccctccagtgtatcatggggtatcctgctcctggccggcctttgctgcttggtgcccgtgtccttggctcacgctgagggtacctttacgtcagatgtgagctcataccttgagggacaggcggcaaaagagtttatagcatggctggtgcggggcagaggg

SEQ ID NO: 12507 - DNA, 165 bp, synthetic construct
  misc_feature 1..165: note = source = /note="Description of Artificial Sequence: Synthetic coding sequence"
  source 1..165: mol_type = other DNA
atgccttcctccgtctcctggggtattctgcttctggcgggactgtgttgcctcgtgcccgtgagtctggctcatgccgaggggacgtttactagcgatgtgtcaagctaccttgaaggccaggcagcaaaggagtttatcgcttggctcgtgcgcggccgggga

SEQ ID NO: 12508 - DNA, 165 bp, synthetic construct
  misc_feature 1..165: note = source = /note="Description of Artificial Sequence: Synthetic coding sequence"
  source 1..165: mol_type = other DNA
atgccaagctcagtttcctggggaatcctcctgttggccggactgtgctgtttggtcccggtgtcgctggcgcacgcggagggcacctttacgagcgacgtgtccagttacctggagggccaggccgccaaggaattcattgcttggctggttagaggacgcggg

SEQ ID NO: 12509 - DNA, 165 bp, synthetic construct
  misc_feature 1..165: note = source = /note="Description of Artificial Sequence: Synthetic coding sequence"
  source 1..165: mol_type = other DNA
atgccttcgtccgtttcatggggtatcctccttctcgctggtttgtgctgtttggtgcctgtgtcacttgcacacgcggaaggaacgtttaccagcgacgtgtcgtcgtacctcgaaggccaggcagcaaaggagttcattgcctggctggtgagaggccgggga

SEQ ID NO: 12510 - DNA, 165 bp, synthetic construct
  misc_feature 1..165: note = source = /note="Description of Artificial Sequence: Synthetic coding sequence"
  source 1..165: mol_type = other DNA
atgccgtcatccgtctcgtgggggatactgttactcgctggcttgtgttgcctcgtccccgtttcactggcccacgccgagggaacctttacgagtgacgtgtcctcttacctggagggtcaagccgccaaggaatttattgcttggctcgtccgtggcagggga

SEQ ID NO: 12511 - DNA, 165 bp, synthetic construct
  misc_feature 1..165: note = source = /note="Description of Artificial Sequence: Synthetic coding sequence"
  source 1..165: mol_type = other DNA
atgccatcatccgtgtcttggggcatcctcttgttggctggtctctgctgcctcgtccccgtatctctcgcacatgctgaaggcacttttacaagcgacgtgtctagctatctcgagggacaggccgccaaagaatttatagcctggctggtgagaggaagggga

SEQ ID NO: 12512 - DNA, 165 bp, synthetic construct
  misc_feature 1..165: note = source = /note="Description of Artificial Sequence: Synthetic coding sequence"
  source 1..165: mol_type = other DNA
atgcctagctccgtgtcctggggcattctgcttctcgctgggctgtgctgtctggtgcctgtgtcgcttgcacacgcagaagggaccttcacttcggatgtgtcatcataccttgaaggtcaagcagcaaaggagttcatcgcttggctcgtgcgaggtcgtgga

SEQ ID NO: 12513 - DNA, 165 bp, synthetic construct
  misc_feature 1..165: note = source = /note="Description of Artificial Sequence: Synthetic coding sequence"
  source 1..165: mol_type = other DNA
atgccatcatccgtgtcctggggtatcttgcttctggccggcctttgttgtttggtgcccgtgagtctcgcccacgcggagggcactttcactagcgatgtatcatcatacttggagggacaggctgccaaggagttcatagcctggctggtgagaggtagaggc

SEQ ID NO: 12514 - DNA, 165 bp, synthetic construct
  misc_feature 1..165: note = source = /note="Description of Artificial Sequence: Synthetic coding sequence"
  source 1..165: mol_type = other DNA
atgcccagcagcgtgtcatggggaatattgcttcttgctggtctgtgctgtctggtgcccgtgagtctagcccacgcggagggaacgttcacatctgatgtctcaagctatcttgaggggcaggcagctaaggaattcatcgcctggctcgtccgcggcagaggt

SEQ ID NO: 12515 - DNA, 165 bp, synthetic construct
  misc_feature 1..165: note = source = /note="Description of Artificial Sequence: Synthetic coding sequence"
  source 1..165: mol_type = other DNA
atgccttcatctgtcagctggggaatcctcctgttggcaggcctctgctgtcttgtgccggttagccttgctcacgccgaggggacctttacttcagacgtgtccagctacctcgaaggacaggccgcaaaggaattcatcgcctggctggtccgcggacggggc

SEQ ID NO: 12516 - DNA, 165 bp, synthetic construct
  misc_feature 1..165: note = source = /note="Description of Artificial Sequence: Synthetic coding sequence"
  source 1..165: mol_type = other DNA
atgccttcgtcagttagttgggggatcctcttgctcgcaggcctgtgctgcctcgtgcctgtatccctggcccacgcagaaggtacttttacatccgatgtgagctcctatctcgagggccaagccgcaaaggagtttatcgcatggctggtgaggggacgcggg

SEQ ID NO: 12517 - DNA, 165 bp, synthetic construct
  misc_feature 1..165: note = source = /note="Description of Artificial Sequence: Synthetic coding sequence"
  source 1..165: mol_type = other DNA
atgccctcatccgtgagctgggggattctactcctagccggcctgtgttgccttgtacctgttagtctagcgcatgccgagggaactttcacctcggatgtgtccagctacctggagggccaagccgccaaggagtttatcgcttggctggtgcgcgggcgtgga

SEQ ID NO: 12518 - DNA, 165 bp, synthetic construct
  misc_feature 1..165: note = source = /note="Description of Artificial Sequence: Synthetic coding sequence"
  source 1..165: mol_type = other DNA
atgccttccagcgtgtcctgggggatactcttgctggccgggttgtgttgcttagttccggtctctctggctcacgcagagggaaccttcaccagtgatgtgtcatcgtacctcgaggggcaggcagccaaggaattcatcgcttggcttgttaggggacgcggc

SEQ ID NO: 12519 - DNA, 165 bp, synthetic construct
  misc_feature 1..165: note = source = /note="Description of Artificial Sequence: Synthetic coding sequence"
  source 1..165: mol_type = other DNA
atgccgagctcagttagctggggaatactgttgctggctggcctctgttgcctggtccctgtgtctttagcacatgcggaaggcaccttcacatctgatgtcagctcctacctcgagggccaagccgccaaggaattcattgcttggctcgtgagggggagaggg

SEQ ID NO: 12520 - DNA, 165 bp, synthetic construct
  misc_feature 1..165: note = source = /note="Description of Artificial Sequence: Synthetic coding sequence"
  source 1..165: mol_type = other DNA
atgccgtccagcgtatcttggggcatcctgctcttagcgggactgtgttgtcttgttccggtgtctcttgcacatgccgagggaacatttacttcggatgtgtcttcgtatttagagggacaggcagcaaaagagtttatcgcatggcttgtacggggacgaggt

SEQ ID NO: 12521 - DNA, 165 bp, synthetic construct
  misc_feature 1..165: note = source = /note="Description of Artificial Sequence: Synthetic coding sequence"
  source 1..165: mol_type = other DNA
atgcctagcagtgtgtcatgggggatactgctgcttgcaggtctctgctgcttggtgccggtgagccttgcgcatgccgaagggacttttacatctgacgtttcgtcttatctggaaggacaggccgctaaggaattcatagcttggctggtgcggggtaggggt

SEQ ID NO: 12522 - DNA, 165 bp, synthetic construct
  misc_feature 1..165: note = source = /note="Description of Artificial Sequence: Synthetic coding sequence"
  source 1..165: mol_type = other DNA
atgccgtcgtctgtgtcatggggaatcctcctgctggccgggctgtgttgcctggtgccggtcagcctggcccacgcagagggaactttcacttcagacgtgtcatcgtaccttgagggccaagcggccaaggagtttatcgcctggctggtgagaggacggggc

SEQ ID NO: 12523 - DNA, 165 bp, synthetic construct
  misc_feature 1..165: note = source = /note="Description of Artificial Sequence: Synthetic coding sequence"
  source 1..165: mol_type = other DNA
atgccaagctcagtgtcttgggggatactgctgctggccggactatgctgcttggtgccagtaagcctcgctcatgccgaggggacgtttactagtgacgtgagtagctacctggagggccaggctgccaaggagttcattgcctggctggtgagaggccgtggc

SEQ ID NO: 12524 - DNA, 165 bp, synthetic construct
  misc_feature 1..165: note = source = /note="Description of Artificial Sequence: Synthetic coding sequence"
  source 1..165: mol_type = other DNA
atgccatccagcgtgtcttggggcattttgttactcgctggtctctgttgtctggtgccggtttcgcttgcccatgccgagggcaccttcacctcggacgtgtcgagttatctggaggggcaggcagctaaagagtttattgcctggctggttagagggagggga

SEQ ID NO: 12525 - DNA, 165 bp, synthetic construct
  misc_feature 1..165: note = source = /note="Description of Artificial Sequence: Synthetic coding sequence"
  source 1..165: mol_type = other DNA
atgcctagctctgtgagctggggaatactgctactcgctggactgtgttgtctggttcccgtctcgctggcccacgccgagggaacgttcaccagcgacgtctcctcttacttggagggccaagctgctaaggagtttattgcttggctggttcgcgggagggga

SEQ ID NO: 12526 - DNA, 165 bp, synthetic construct; identical to SEQ ID NO: 12516
  misc_feature 1..165: note = source = /note="Description of Artificial Sequence: Synthetic coding sequence"
  source 1..165: mol_type = other DNA

SEQ ID NO: 12527 - DNA, 165 bp, synthetic construct
  misc_feature 1..165: note = source = /note="Description of Artificial Sequence: Synthetic coding sequence"
  source 1..165: mol_type = other DNA
atgccgtcgtcagtgtcctggggcattcttctgctggctggcctctgttgcctggttcctgtttcgctggctcacgcggagggaacctttacttcggacgtctcttcctaccttgaaggtcaggcagccaaggagttcatcgcgtggttggtgcggggacgcgga

SEQ ID NO: 12528 - DNA, 165 bp, synthetic construct
  misc_feature 1..165: note = source = /note="Description of Artificial Sequence: Synthetic coding sequence"
  source 1..165: mol_type = other DNA
atgccttcctcagtgtcttgggggatcttgctgctggcgggcttgtgttgtctggtgccggtaagtctcgcccacgcagagggaacattcacatctgatgtatcatcgtacctggagggccaggccgccaaggaatttatcgcctggttagtccgcggaagagga

SEQ ID NO: 12529 - DNA, 165 bp, synthetic construct
  misc_feature 1..165: note = source = /note="Description of Artificial Sequence: Synthetic coding sequence"
  source 1..165: mol_type = other DNA
atgccttcgtcagtgtcgtggggcattctcctcctggcaggactgtgttgccttgtgcccgtgtctctcgcgcacgctgaaggaaccttcacctctgatgtgtcctcgtacctggaggggcaagcagcaaaagagtttatcgcctggcttgtccgcggtcggggg

SEQ ID NO: 12530 - DNA, 165 bp, synthetic construct
  misc_feature 1..165: note = source = /note="Description of Artificial Sequence: Synthetic coding sequence"
  source 1..165: mol_type = other DNA
atgaaatgggtgtctttcatctctttgctctttctgttctccagtgcgtactcaggaagccttgacaaacgccatgctgaagggacctttacatctgatgtgtcctcctaccttgaagggcaggctgcaaaagaattcattgcgtggcttgtgaaagggcgcgga

SEQ ID NO: 12531 - DNA, 165 bp, synthetic construct
  misc_feature 1..165: note = source = /note="Description of Artificial Sequence: Synthetic coding sequence"
  source 1..165: mol_type = other DNA
atgaagtgggtctccttcatatctctgttattcctgttttcctcagcctacagtggtagcctggacaagagacacgcagaggggacatttacctcagacgtgtcttcttatctcgagggtcaggcggcgaaagaattcatcgcctggctcgtgaagggacgtggc

SEQ ID NO: 12532 - DNA, 165 bp, synthetic construct
  misc_feature 1..165: note = source = /note="Description of Artificial Sequence: Synthetic coding sequence"
  source 1..165: mol_type = other DNA
atgaaatgggtgtccttcattagccttctgttcctgttctctagcgcttatagtgggagcctggataagcgccacgccgaagggactttcacaagcgatgtgagctcatatctagagggtcaggcagccaaagagtttatcgcttggttggtaaaggggagaggg

SEQ ID NO: 12533 - DNA, 165 bp, synthetic construct
  misc_feature 1..165: note = source = /note="Description of Artificial Sequence: Synthetic coding sequence"
  source 1..165: mol_type = other DNA
atgaagtgggtgtcattcatctccctgctctttctgttttcgagcgcatacagcggatcacttgacaaaagacatgctgaagggaccttcacttcggatgtgtcctcgtatcttgaagggcaagcggccaaagagtttatagcatggttggtgaagggccggggc

SEQ ID NO: 12534 - DNA, 165 bp, synthetic construct
  misc_feature 1..165: note = source = /note="Description of Artificial Sequence: Synthetic coding sequence"
  source 1..165: mol_type = other DNA
atgaagtgggtgtcatttatctcccttctgtttctgttcagctccgcctatagcggttcccttgataagaggcacgcagaaggaacctttacctcagacgtgtccagctacctcgagggccaagcagcaaaggagtttattgcgtggctggtcaagggcagagga

SEQ ID NO: 12535 - DNA, 165 bp, synthetic construct
  misc_feature 1..165: note = source = /note="Description of Artificial Sequence: Synthetic coding sequence"
  source 1..165: mol_type = other DNA
atgaagtgggtcagcttcatctcgttgctctttctgttctccagcgcgtactccgggtcactggataagcggcacgcagaaggcactttcacctcagacgtgtcgtcgtacctcgaaggacaggccgccaaggagttcatcgcttggctggtgaaaggtcgcgga

SEQ ID NO: 12536 - DNA, 165 bp, synthetic construct
  misc_feature 1..165: note = source = /note="Description of Artificial Sequence: Synthetic coding sequence"
  source 1..165: mol_type = other DNA
atgaagtgggttagtttcatatcattattgttcctattcagtagcgcctatagtggttctctggacaaaagacatgccgaaggcactttcacaagcgacgtgagcagttatcttgaggggcaggccgctaaagaattcatcgcatggcttgtaaaggggagggga

SEQ ID NO: 12537 - DNA, 165 bp, synthetic construct
  misc_feature 1..165: note = source = /note="Description of Artificial Sequence: Synthetic coding sequence"
  source 1..165: mol_type = other DNA
atgaaatgggtctcattcatttccctgctgttcctgtttagctccgcctactctgggagtctggacaagcgacatgcagaaggaaccttcacatccgacgtgtcctcctaccttgagggacaagccgctaaagaattcattgcctggctggtgaaaggaagaggg

SEQ ID NO: 12538 - DNA, 165 bp, synthetic construct
  misc_feature 1..165: note = source = /note="Description of Artificial Sequence: Synthetic coding sequence"
  source 1..165: mol_type = other DNA
atgaaatgggtctcctttatcagtttgttatttctgttttccagtgcatatagtggatcactggacaaacgtcacgccgagggcacgttcacctctgatgtgtcctcctacctcgaaggccaggcggctaaggagttcatcgcgtggctggtcaaggggaggggg

SEQ ID NO: 12539 - DNA, 165 bp, synthetic construct
  misc_feature 1..165: note = source = /note="Description of Artificial Sequence: Synthetic coding sequence"
  source 1..165: mol_type = other DNA
atgaagtgggtgagcttcatatcccttttgtttcttttttcctcagcatactcgggctcactcgataagagacacgctgaaggtacgtttaccagcgacgtgtcatcatacctcgagggacaagccgccaaggagtttattgcgtggctggtgaagggccgagga

SEQ ID NO: 12540 - DNA, 165 bp, synthetic construct
  misc_feature 1..165: note = source = /note="Description of Artificial Sequence: Synthetic coding sequence"
  source 1..165: mol_type = other DNA
atgaagtgggtgtccttcatcagtctgctgttcctgtttagcagcgcatactcaggatccttggataagagacacgccgaagggacctttacctcagatgtctcatcgtacctcgaaggccaggcagcgaaagagtttattgcgtggcttgttaaaggtcgcgga

SEQ ID NO: 12541 - DNA, 165 bp, synthetic construct
  misc_feature 1..165: note = source = /note="Description of Artificial Sequence: Synthetic coding sequence"
  source 1..165: mol_type = other DNA
atgaaatgggtgtcgttcatctcgctccttttcctgttcagcagcgcttactcagggtcgcttgataagagacacgccgaaggtacctttacttcagacgtgtcctcatacctggagggacaggcggctaaggaattcatcgcctggctggtgaaagggagaggc

SEQ ID NO: 12542 - DNA, 165 bp, synthetic construct
  misc_feature 1..165: note = source = /note="Description of Artificial Sequence: Synthetic coding sequence"
  source 1..165: mol_type = other DNA
atgaaatgggtatcttttatttcacttttatttttattttcatcagcttattctggatcacttgataaaagacatgcagagggaacttttacttcagatgttagttcttatttagaaggtcaagctgcaaaggaatttatcgcttggttagttaaaggtagagga

SEQ ID NO: 12543 - DNA, 165 bp, synthetic construct
  misc_feature 1..165: note = source = /note="Description of Artificial Sequence: Synthetic coding sequence"
  source 1..165: mol_type = other DNA
atgaaatgggtctcattcatctctctgttgtttctgttcagttctgcctattccggctcactagacaagcgccacgctgaaggtacattcacctcagatgtttcctcatacttggagggtcaggccgcaaaggagtttattgcctggctggtaaagggacgcgga

SEQ ID NO: 12544 - DNA, 165 bp, synthetic construct
  misc_feature 1..165: note = source = /note="Description of Artificial Sequence: Synthetic coding sequence"
  source 1..165: mol_type = other DNA
atgaaatgggtttccttcatatctctgctgtttttgttctcgagcgcctacagtggtagcttggacaagcgtcacgctgagggtacgttcacctccgacgttagcagctacttggagggtcaggctgcaaaagagttcatcgcgtggctggtgaagggccgtggc

SEQ ID NO: 12545 - DNA, 165 bp, synthetic construct
  misc_feature 1..165: note = source = /note="Description of Artificial Sequence: Synthetic coding sequence"
  source 1..165: mol_type = other DNA
atgaagtgggtttcgttcatctctctcctgttcctctttagctcagcttacagcggatccttggacaagcgccacgcggaaggaactttcacctcagatgtgtccagctacttggagggccaggcagccaaggagtttatcgcatggctcgtgaaaggtagaggg

SEQ ID NO: 12546 - DNA, 165 bp, synthetic construct
  misc_feature 1..165: note = source = /note="Description of Artificial Sequence: Synthetic coding sequence"
  source 1..165: mol_type = other DNA
atgaaatgggtgagcttcatatcgctgctttttctgttttcaagcgcttattcgggtagcctggataagcggcatgcagagggaaccttcacttcagacgtgtcatcgtacctggaaggacaggccgcaaaggaattcattgcgtggcttgtgaaaggacgtggt

SEQ ID NO: 12547 - DNA, 165 bp, synthetic construct
  misc_feature 1..165: note = source = /note="Description of Artificial Sequence: Synthetic coding sequence"
  source 1..165: mol_type = other DNA
atgaaatgggtttcatttatttctctgttattcctcttctcttctgcctattccggatctctggacaagcgccacgctgagggaacattcacctccgatgtgtctagttacctcgaggggcaagccgctaaggagttcatcgcgtggcttgtgaagggccgggga

SEQ ID NO: 12548 - DNA, 165 bp, synthetic construct
  misc_feature 1..165: note = source = /note="Description of Artificial Sequence: Synthetic coding sequence"
  source 1..165: mol_type = other DNA
atgaagtgggtgtccttcatctcccttctgttcctcttttcctcggcgtactcgggatccctcgacaaacgccacgcggagggcactttcacctcggacgtgtcatcatacctcgagggtcaggcggcaaaggaattcatcgcgtggctggtgaagggacggggt

SEQ ID NO: 12549 - DNA, 165 bp, synthetic construct
  misc_feature 1..165: note = source = /note="Description of Artificial Sequence: Synthetic coding sequence"
  source 1..165: mol_type = other DNA
atgaaatgggtttcctttatttcacttctttttttgttttcgagtgcttattcaggttcactagataaaaggcatgccgaaggtacctttacatcggacgtatcatcttatctcgagggacaagcagcaaaagagtttatcgcctggctcgttaaaggtcgagga

SEQ ID NO: 12550 - DNA, 165 bp, synthetic construct
  misc_feature 1..165: note = source = /note="Description of Artificial Sequence: Synthetic coding sequence"
  source 1..165: mol_type = other DNA
atgaagtgggtctcgttcatcagcctgctgttcctcttttctagcgcatactctgggtcgttggataagcggcatgctgaagggacattcacatccgatgtgtcaagctacctggagggacaggcggctaaggaattcatcgcgtggctggtcaagggacggggc

SEQ ID NO: 12551 - DNA, 165 bp, synthetic construct
  misc_feature 1..165: note = source = /note="Description of Artificial Sequence: Synthetic coding sequence"
  source 1..165: mol_type = other DNA
atgaagtgggtgtcattcatttcactgttgtttctgttctcgtcggcgtattcaggatcgctggacaaacgccacgcggaagggactttcaccagcgacgtcagctcgtacctggaaggtcaggcagctaaggagtttatcgcttggctggtcaaaggccgggga

SEQ ID NO: 12552 - DNA, 165 bp, synthetic construct
  misc_feature 1..165: note = source = /note="Description of Artificial Sequence: Synthetic coding sequence"
  source 1..165: mol_type = other DNA
atgaagtgggtcagctttatctccctgcttttcctgttctcgtccgcctactccgggtccctcgacaagcgccacgccgaagggacgttcactagcgatgtgtcgtcgtaccttgagggacaagccgcgaaggaattcatcgcctggctggtcaagggacggggc

SEQ ID NO: 12553 - DNA, 165 bp, synthetic construct
  misc_feature 1..165: note = source = /note="Description of Artificial Sequence: Synthetic coding sequence"
  source 1..165: mol_type = other DNA
atgaagtgggtgtctttcatttcgctcctgttcctgttttcgtcggcttacagcgggtcccttgataaaagacatgcagaaggtacctttacttcagatgtgtcatcctaccttgaggggcaggcagcaaaggaattcatcgcgtggctggtcaagggccgcgga

SEQ ID NO: 12554 - DNA, 165 bp, synthetic construct
  misc_feature 1..165: note = source = /note="Description of Artificial Sequence: Synthetic coding sequence"
  source 1..165: mol_type = other DNA
atgaagtgggtgtcctttatctcgctcctgtttctgtttagctcggcgtacagcggtagcttggacaagagacatgctgaaggcacttttaccagcgatgtgtccagctacctggaaggtcaggcggcaaaggagtttattgcatggcttgtgaaaggtagagga

SEQ ID NO: 12555 - DNA, 165 bp, synthetic construct
  misc_feature 1..165: note = source = /note="Description of Artificial Sequence: Synthetic coding sequence"
  source 1..165: mol_type = other DNA
atgaagtgggtgtcattcatttccctgctgttcttgttttcctctgcctattcagggtcactggataaaaggcatgcggaaggaacctttactagtgacgtatcctcctacctggaaggtcaggccgccaaggaattcattgcctggctggttaagggacggggc

SEQ ID NO: 12556 - DNA, 165 bp, synthetic construct
  misc_feature 1..165: note = source = /note="Description of Artificial Sequence: Synthetic coding sequence"
  source 1..165: mol_type = other DNA
atgaaatgggtatcgtttatatcgttattatttttattttcgtcggcgtattcgggttcgttagataaacgtcatgcggaaggtacgtttacgtcggatgtatcgtcgtatttagaaggtcaagcggcgaaagaatttatagcgtggctagtaaaaggtcgtggt

SEQ ID NO: 12557 - DNA, 165 bp, synthetic construct
  misc_feature 1..165: note = source = /note="Description of Artificial Sequence: Synthetic coding sequence"
  source 1..165: mol_type = other DNA
atgaagtgggtgtccttcatctccctgctgttcctctttagcagcgcgtactctggatcgctggacaaacgccatgcagagggaactttcacgtcggacgtatcgtcgtacctggaaggacaggccgccaaggagtttatcgcgtggttggtgaagggccgcgga

SEQ ID NO: 12558 - DNA, 165 bp, synthetic construct
  misc_feature 1..165: note = source = /note="Description of Artificial Sequence: Synthetic coding sequence"
  source 1..165: mol_type = other DNA
atgaagtgggtaagctttatcagcctgctctttctgttcagcagcgcgtatagcggcagtttagataaaagacacgccgaaggaacgttcacgtccgacgtgagctcgtacctggaaggccaggccgccaaggagtttattgcttggctggtcaagggacggggg

SEQ ID NO: 12559 - DNA, 165 bp, synthetic construct
  misc_feature 1..165: note = source = /note="Description of Artificial Sequence: Synthetic coding sequence"
  source 1..165: mol_type = other DNA
atgaaatgggtcagcttcatttccctgctgtttttgttttcatccgcctacagcggctccttggataaacgtcacgccgaagggacgtttacctcagacgttagtagctatctcgaagggcaagctgcgaaagagtttatagcttggctggtcaaggggagaggc

SEQ ID NO: 12560 - DNA, 165 bp, synthetic construct
  misc_feature 1..165: note = source = /note="Description of Artificial Sequence: Synthetic coding sequence"
  source 1..165: mol_type = other DNA
atgaagtgggtctctttcatctcccttcttttccttttctcatcagcgtattctggcagcttggacaaaaggcatgcggaggggaccttcacgagcgacgtgtcctcatacctggagggccaggctgctaaagagttcattgcctggctggttaagggcagaggt

SEQ ID NO: 12561 - DNA, 165 bp, synthetic construct
  misc_feature 1..165: note = source = /note="Description of Artificial Sequence: Synthetic coding sequence"
  source 1..165: mol_type = other DNA
atgaagtgggtctcgtttatatcccttctcttccttttcagctccgcctactccgggtcactcgataagcggcacgctgaaggcacattcacctccgacgtaagctcgtatctcgaaggtcaagccgccaaggagttcatagcttggttagtcaaggggcgaggg

SEQ ID NO: 12562 - DNA, 165 bp, synthetic construct
  misc_feature 1..165: note = source = /note="Description of Artificial Sequence: Synthetic coding sequence"
  source 1..165: mol_type = other DNA
atgaagtgggtgtcttttatctccctgctgtttctcttctcgtcggcctatagcgggagcctcgacaaaaggcatgccgaaggaactttcacgtcggatgtgtcatcatacctggaaggacaagccgcgaaggagttcatcgcctggcttgtcaaggggcgcgga

SEQ ID NO: 12563 - DNA, 165 bp, synthetic construct
  misc_feature 1..165: note = source = /note="Description of Artificial Sequence: Synthetic coding sequence"
  source 1..165: mol_type = other DNA
atgaaatgggtctcattcatttccctactgttcctcttcagttctgcctactcgggatcactagacaaaaggcatgcggaaggcacgtttacgtcagacgttagttcatatttagagggccaggccgccaaagaattcatagcatggttggtaaaaggtcgcggc

SEQ ID NO: 12564 - DNA, 165 bp, synthetic construct
  misc_feature 1..165: note = source = /note="Description of Artificial Sequence: Synthetic coding sequence"
  source 1..165: mol_type = other DNA
atgaagtgggtttcctttattagcctgctgttcctcttctctagcgcctactccgggagcttagataaacggcatgccgagggaaccttcacttctgacgtctcatcgtatctggagggccaggccgccaaggagttcattgcctggttggtgaagggtcgcggg

SEQ ID NO: 12565 - DNA, 165 bp, synthetic construct
  misc_feature 1..165: note = source = /note="Description of Artificial Sequence: Synthetic coding sequence"
  source 1..165: mol_type = other DNA
atgaaatgggtgtcgttcatcagcctccttttcctcttttcatcagcctactcgggatccctggacaagagacatgccgagggtacctttacctccgacgtgtcatcgtacctcgaaggtcaagcagctaaggagtttatagcgtggcttgtgaaaggacgggga

SEQ ID NO: 12566 - DNA, 165 bp, synthetic construct
  misc_feature 1..165: note = source = /note="Description of Artificial Sequence: Synthetic coding sequence"
  source 1..165: mol_type = other DNA
atgaaatgggtgagtttcatctcccttctattcctgttttcaagcgcatattctggctccctagataagcgacatgccgaaggaacattcacaagtgatgtgagttcttacctggaagggcaggctgctaaagagttcatcgcttggctggtaaaagggaggggg

SEQ ID NO: 12567 - DNA, 165 bp, synthetic construct
  misc_feature 1..165: note = source = /note="Description of Artificial Sequence: Synthetic coding sequence"
  source 1..165: mol_type = other DNA
atgaaatgggtgtcctttatttctctgcttttcctcttctcttcagcctacagcggctctctggacaagaggcacgctgagggcacattcacatccgatgtctcttcctacctcgaaggacaggctgctaaggaattcatcgcttggcttgtgaagggtcgcggt

SEQ ID NO: 12568 - DNA, 165 bp, synthetic construct
  misc_feature 1..165: note = source = /note="Description of Artificial Sequence: Synthetic coding sequence"
  source 1..165: mol_type = other DNA
atgaagtgggttagcttcatcagcctgctctttctcttctcctccgcatactcaggcagtctcgataaacgccacgctgaagggacgttcacgagcgacgtgtcatcgtatcttgagggccaagcagccaaagaattcatcgcttggctggtcaagggacgggga

SEQ ID NO: 12569 - DNA, 165 bp, synthetic construct
  misc_feature 1..165: note = source = /note="Description of Artificial Sequence: Synthetic coding sequence"
  source 1..165: mol_type = other DNA
atgaagtgggtgtccttcatttccctgttgttcctattttcttctgcttactctggaagtctcgacaaaagacacgcagagggaacgtttacctcagatgtatcaagttacttagagggccaagcagccaaggagtttatcgcttggctcgtgaaaggtcggggg

SEQ ID NO: 12570 - DNA, 165 bp, synthetic construct
  misc_feature 1..165: note = source = /note="Description of Artificial Sequence: Synthetic coding sequence"
  source 1..165: mol_type = other DNA
atgaagtgggtgtccttcatctctctcttgttcctgttttctagcgcctactccggctcgctcgataagcgccacgcagagggcaccttcacctcggacgtctcgtcgtacctcgaaggacaggccgcgaaagagtttatcgcctggctggtgaagggaaggggt

SEQ ID NO: 12571 - DNA, 165 bp, synthetic construct
  misc_feature 1..165: note = source = /note="Description of Artificial Sequence: Synthetic coding sequence"
  source 1..165: mol_type = other DNA
atgaaatgggtttcattcatttcactcctgttccttttctcatcagcttactccggaagcctggacaagcgccatgcggaaggcacgttcacctccgacgtgtcctcctacctcgaaggacaggccgccaaggagtttatcgcatggctggtcaaaggcagaggc

SEQ ID NO: 12572 - DNA, 165 bp, synthetic construct
  misc_feature 1..165: note = source = /note="Description of Artificial Sequence: Synthetic coding sequence"
  source 1..165: mol_type = other DNA
atgaagtgggtgagcttcatttccctgctctttctgttctcgtccgcatactcaggaagcctggacaagcggcacgcggagggaaccttcaccagcgacgtgagctcctacctggaggggcaggctgcgaaagagttcatcgcatggcttgtgaagggccgcggc

SEQ ID NO: 12573 - DNA, 165 bp, synthetic construct; identical to SEQ ID NO: 12560
  misc_feature 1..165: note = source = /note="Description of Artificial Sequence: Synthetic coding sequence"
  source 1..165: mol_type = other DNA

SEQ ID NO: 12574 - DNA, 165 bp, synthetic construct
  misc_feature 1..165: note = source = /note="Description of Artificial Sequence: Synthetic coding sequence"
  source 1..165: mol_type = other DNA
atgaagtgggtgagcttcatctcactgctgtttcttttttccagcgcatattctggaagtttagacaagcgccacgcagaggggacttttacctcagacgtttcaagctatctggagggacaggctgccaaagagtttatcgcttggcttgtcaagggcaggggc

SEQ ID NO: 12575 - DNA, 165 bp, synthetic construct
  misc_feature 1..165: note = source = /note="Description of Artificial Sequence: Synthetic coding sequence"
  source 1..165: mol_type = other DNA
atgaagtgggtttctttcatttccttgctctttttattcagctccgcttattccggctctctggataaacggcatgctgagggcaccttcacatctgacgtgtcctcctacctcgagggacaggctgccaaagaattcattgcatggttagttaagggtaggggg

SEQ ID NO: 12576 - DNA, 165 bp, synthetic construct
  misc_feature 1..165: note = source = /note="Description of Artificial Sequence: Synthetic coding sequence"
  source 1..165: mol_type = other DNA
atgaagtgggtgtcgtttatctcactgctctttctttttagctcggcgtactcgggttcccttgataagcggcacgctgaagggactttcaccagcgacgtgagctcataccttgaaggacaggcagctaaggagtttatcgcatggctcgtgaagggaaggggt

SEQ ID NO: 12577 - DNA, 165 bp, synthetic construct
  misc_feature 1..165: note = source = /note="Description of Artificial Sequence: Synthetic coding sequence"
  source 1..165: mol_type = other DNA
atgaaatgggttagcttcatttcactcctctttctttttagtagcgcctacagcggttctcttgacaagcgccacgccgaaggcacgttcaccagtgacgtaagtagctatctcgaagggcaagccgccaaggagttcatcgcatggctggtcaaaggccgcggc

SEQ ID NO: 12578 - DNA, 165 bp, synthetic construct
  misc_feature 1..165: note = source = /note="Description of Artificial Sequence: Synthetic coding sequence"
  source 1..165: mol_type = other DNA
atgaaatgggtttctttcatctcgcttctgtttctgtttagctccgcctactccggctccttagacaagagacatgctgagggaaccttcactagcgacgtgtcttcgtaccttgaaggccaggcagccaaagaatttatcgcctggctagtgaagggacgcggc

SEQ ID NO: 12579 - DNA, 165 bp, synthetic construct
  misc_feature 1..165: note = source = /note="Description of Artificial Sequence: Synthetic coding sequence"
  source 1..165: mol_type = other DNA
atgaagtgggtaagctttataagtcttctgtttttgttttctagtgcctacagcggatctctggacaaacgccatgcggaaggcacgtttacgtcggatgtctcgagttatctcgagggacaggctgctaaagaattcatcgcttggttagttaaaggccgcggc

SEQ ID NO: 12580 - DNA, 165 bp, synthetic construct
  misc_feature 1..165: note = source = /note="Description of Artificial Sequence: Synthetic coding sequence"
  source 1..165: mol_type = other DNA
atgaagtgggtcagttttatctctcttcttttccttttctctagtgcctactcaggcagtctggataagcgccacgctgagggcacttttacctcggatgtgtccagctacctcgaagggcaagctgctaaggaattcattgcatggctcgtgaagggaagaggc

SEQ ID NO: 12581 - DNA, 165 bp, synthetic construct
  misc_feature 1..165: note = source = /note="Description of Artificial Sequence: Synthetic coding sequence"
  source 1..165: mol_type = other DNA
atgaaatgggtgtcctttatctcactgctgttccttttcagctcggcatactcgggatccttggacaagcgccacgcagagggtactttcacctcagacgtgagctcttatctggaagggcaggccgcaaaggagtttatcgcgtggctggtcaagggaagaggc

SEQ ID NO: 12582 - DNA, 165 bp, synthetic construct
  misc_feature 1..165: note = source = /note="Description of Artificial Sequence: Synthetic coding sequence"
  source 1..165: mol_type = other DNA
atgaagtgggtctcatttatctcgctgctgttcttgtttagctctgcatacagcggatcgctggacaagaggcacgctgaaggaaccttcacaagcgatgtcagctcatatctcgagggtcaagccgctaaagagtttatcgcatggcttgtaaagggtcgggga

SEQ ID NO: 12583 - DNA, 165 bp, synthetic construct
  misc_feature 1..165: note = source = /note="Description of Artificial Sequence: Synthetic coding sequence"
  source 1..165: mol_type = other DNA
atgaaatgggtgtcctttatcagtctgttattcctcttcagttccgcctacagtggaagtctcgataagcggcatgccgaaggcacgttcacttcagacgtcagttcgtacctggaaggccaggccgcgaaagagtttatcgcatggttggtgaaagggcgcgga

SEQ ID NO: 12584 - DNA, 165 bp, synthetic construct
  misc_feature 1..165: note = source = /note="Description of Artificial Sequence: Synthetic coding sequence"
  source 1..165: mol_type = other DNA
atgaaatgggtgagctttatctcgttgctcttccttttcagctccgcctattcaggatcgctggacaaacggcacgccgagggtacctttacttccgacgtctcatcttaccttgagggacaggctgccaaggagttcattgcgtggctcgtgaagggcagggga

SEQ ID NO: 12585 - DNA, 165 bp, synthetic construct
  misc_feature 1..165: note = source = /note="Description of Artificial Sequence: Synthetic coding sequence"
  source 1..165: mol_type = other DNA
atgaagtgggtgtcgttcatctcactgctgtttttgttcagcagcgcgtactcggggagccttgataagcggcatgctgaaggaacgtttacctccgacgtttcgagctacttggaaggccaagccgcaaaagagtttatcgcatggctcgtcaaaggtcgcgga

SEQ ID NO: 12586 - DNA, 165 bp, synthetic construct
  misc_feature 1..165: note = source = /note="Description of Artificial Sequence: Synthetic coding sequence"
  source 1..165: mol_type = other DNA
atgaaatgggtatccttcatatctctcctattcttattttcatccgcgtattccggaagtctagataaaaggcacgcggagggaacatttacatccgatgtctcttcttatctagaggggcaggccgccaaagaatttattgcatggctggtgaaaggacgcggg

SEQ ID NO: 12587 - DNA, 165 bp, synthetic construct
  misc_feature 1..165: note = source = /note="Description of Artificial Sequence: Synthetic coding sequence"
  source 1..165: mol_type = other DNA
atgaagtgggtgtcctttatcagcctcctcttcttgtttagctccgcctactcgggatcccttgataagagacatgctgagggcacttttaccagcgacgtctccagctaccttgaaggacaagcggcaaaagaattcatcgcatggctggtgaagggcagggga

SEQ ID NO: 12588 - DNA, 165 bp, synthetic construct
  misc_feature 1..165: note = source = /note="Description of Artificial Sequence: Synthetic coding sequence"
  source 1..165: mol_type = other DNA
atgaagtgggtgagcttcataagcttgctgtttctattttcttccgcgtactctggttctctggacaagagacatgctgaagggacatttacttccgatgtcagtagttatcttgaaggacaggccgctaaggaattcatcgcatggctcgtaaaaggaagaggt

SEQ ID NO: 12589 - DNA, 165 bp, synthetic construct
  misc_feature 1..165: note = source = /note="Description of Artificial Sequence: Synthetic coding sequence"
  source 1..165: mol_type = other DNA
atgaagtgggtgtcgttcatctcgctcctgttcctgttctcgtccgcgtacagcggatcgcttgacaagcggcacgccgaagggacttttacctcagacgtgtcatcttacctcgagggccaagcggcaaaggaattcatcgcttggctggtcaagggcagaggg

SEQ ID NO: 12590 - DNA, 165 bp, synthetic construct
  misc_feature 1..165: note = source = /note="Description of Artificial Sequence: Synthetic coding sequence"
  source 1..165: mol_type = other DNA
atgaaatgggtgtccttcatctcactgctgttcctcttcagctcagcttactccggatccctggataaacgccacgccgaaggaactttcacctcagatgtgagctcctacttggaagggcaggccgccaaggagttcatcgcgtggctcgtcaagggacgggga

SEQ ID NO: 12591 - DNA, 165 bp, synthetic construct
  misc_feature 1..165: note = source = /note="Description of Artificial Sequence: Synthetic coding sequence"
  source 1..165: mol_type = other DNA
atgaagtgggtctctttcatcagcctgttattcctgttttcatccgcgtattctggttccttggataagaggcacgctgaggggacctttacctctgatgtctcttcctatctggaaggccaagcagcaaaagagttcatcgcgtggctggtgaaaggtcgtggc

SEQ ID NO: 12592 - DNA, 165 bp, synthetic construct
  misc_feature 1..165: note = source = /note="Description of Artificial Sequence: Synthetic coding sequence"
  source 1..165: mol_type = other DNA
atgaagtgggtaagtttcatctccctcctgttcttgttttcaagcgcctacagcggtagcctggataagagacacgcagagggcacatttacctccgacgtgagttcttacttggaaggtcaggcagccaaggaattcatcgcctggctcgtaaaaggacgtggc

SEQ ID NO: 12593 - DNA, 165 bp, synthetic construct
  misc_feature 1..165: note = source = /note="Description of Artificial Sequence: Synthetic coding sequence"
  source 1..165: mol_type = other DNA
atgaagtgggtgtctttcatcagtctgctgtttctgttctcatcagcctactcaggaagcctagacaaacgtcacgccgagggaactttcacctctgacgtctcatcatatctagaaggacaggctgcaaaggaattcatcgcttggctcgtaaaaggccgcgga

SEQ ID NO: 12594 - DNA, 165 bp, synthetic construct
  misc_feature 1..165: note = source = /note="Description of Artificial Sequence: Synthetic coding sequence"
  source 1..165: mol_type = other DNA
atgaaatgggtatcttttatatctctactattcctcttctcttccgcttattctggatcactcgataagagacatgccgagggaactttcacaagtgatgtatcaagttatttggaagggcaggccgctaaagagtttatcgcttggcttgtgaaagggcgcggg

SEQ ID NO: 12595 - DNA, 165 bp, synthetic construct
  misc_feature 1..165: note = source = /note="Description of Artificial Sequence: Synthetic coding sequence"
  source 1..165: mol_type = other DNA
atgaagtgggtatcctttatctcgcttctctttcttttttcatccgcatacagtggttccctggacaaacgccatgctgaaggaactttcacctctgatgtgagctcatacctcgaaggacaagcagcaaaagagttcattgcctggctggtcaagggaagaggg

SEQ ID NO: 12596 - DNA, 165 bp, synthetic construct
  misc_feature 1..165: note = source = /note="Description of Artificial Sequence: Synthetic coding sequence"
  source 1..165: mol_type = other DNA
atgaaatgggtgagcttcatttctttgctcttcctatttagctctgcgtattctggatccctggacaagcggcatgcggaaggcacctttacaagcgatgtgtcctcttacctcgagggccaagccgccaaagaatttatcgcctggttggtcaaaggacgcggc

SEQ ID NO: 12597 - DNA, 165 bp, synthetic construct
  misc_feature 1..165: note = source = /note="Description of Artificial Sequence: Synthetic coding sequence"
  source 1..165: mol_type = other DNA
atgaaatgggttagctttatttcactcttatttctattttcctccgcatactctggaagcttagacaaacgacacgctgaaggtactttcacctcagatgtctctagctacttggagggccaggccgctaaagagttcatcgcgtggctggtgaaaggacgcgga

SEQ ID NO: 12598 - DNA, 165 bp, synthetic construct
  misc_feature 1..165: note = source = /note="Description of Artificial Sequence: Synthetic coding sequence"
  source 1..165: mol_type = other DNA
atgaagtgggtgtcgttcatctcgctccttttcctctttagcagcgcatactctgggtccctggataagcgtcatgccgaaggcacttttacctcagatgtgagctcatacctggaaggacaagcggcgaaagagttcattgcatggttggttaagggccgcgga

SEQ ID NO: 12599 - DNA, 165 bp, synthetic construct
  misc_feature 1..165: note = source = /note="Description of Artificial Sequence: Synthetic coding sequence"
  source 1..165: mol_type = other DNA
atgaagtgggtctcttttattagcctgttgttcttgttctcttctgcctactctggatccctggacaaacgacatgctgagggaactttcacttccgacgtgtcgagctatctcgaagggcaggctgctaaggaatttatcgcatggctggtgaagggaaggggt

SEQ ID NO: 12600 - DNA, 165 bp, synthetic construct
  misc_feature 1..165: note = source = /note="Description of Artificial Sequence: Synthetic coding sequence"
  source 1..165: mol_type = other DNA
atgaagtgggtgagttttatatctctgctgtttttgttctccagcgcttactccggcagtctggacaagcgccacgctgaaggcacattcacctctgacgtttcctcttacttggaaggccaggccgccaaggaattcatcgcctggctggtaaagggcaggggt

SEQ ID NO: 12601 - DNA, 165 bp, synthetic construct
  misc_feature 1..165: note = source = /note="Description of Artificial Sequence: Synthetic coding sequence"
  source 1..165: mol_type = other DNA
atgaagtgggtcagcttcatctctctcctctttctcttcagctccgcctattcgggttccctcgataagaggcatgctgaggggactttcaccagcgacgtctcctcctacctggaagggcaggccgcgaaggaattcatcgcatggctggtgaaaggacgggga

SEQ ID NO: 12602 - DNA, 165 bp, synthetic construct
  misc_feature 1..165: note = source = /note="Description of Artificial Sequence: Synthetic coding sequence"
  source 1..165: mol_type = other DNA
atgaagtgggtgtccttcatcagccttctgttcctgttttcgtcggcctatagcggatccttggataagcggcacgcggaaggtacttttacctctgacgtctcgagctacttggaggggcaggccgcgaaagaattcatcgcatggctcgtcaagggacgcgga

SEQ ID NO: 12603 - DNA, 165 bp, synthetic construct
  misc_feature 1..165: note = source = /note="Description of Artificial Sequence: Synthetic coding sequence"
  source 1..165: mol_type = other DNA
atgaagtgggtcagcttcatctctcttctgtttctttttagctcggcatactcgggttcacttgacaagcgacacgccgagggaacgtttacctcggatgtgtcctcatatcttgaaggacaagcagcaaaggaattcattgcttggttggtcaagggcaggggt

SEQ ID NO: 12604 - DNA, 165 bp, synthetic construct
  misc_feature 1..165: note = source = /note="Description of Artificial Sequence: Synthetic coding sequence"
  source 1..165: mol_type = other DNA
atgaagtgggtgtcatttatttcactcctgttcttattctcctctgcatatagtgggagtcttgataagcgccacgcagaaggcacttttacttccgacgtaagtagctatctggaggggcaggcggcaaaggagtttattgcctggctggtgaagggtaggggc

SEQ ID NO: 12605 - DNA, 165 bp, synthetic construct
  misc_feature 1..165: note = source = /note="Description of Artificial Sequence: Synthetic coding sequence"
  source 1..165: mol_type = other DNA
atgaaatgggtgagcttcatctccctcttgttcctcttcagctcagcttactccggttcattggacaaacgacatgccgaagggacatttacaagcgatgtttcttcatacttggagggccaggccgccaaggagttcatcgcctggttggttaaaggtaggggg

SEQ ID NO: 12606 - DNA, 165 bp, synthetic construct
  misc_feature 1..165: note = source = /note="Description of Artificial Sequence: Synthetic coding sequence"
  source 1..165: mol_type = other DNA
atgaaatgggtgtcctttatttctttactctttctgttcagctcagcgtattccgggtcactggacaagcgccacgcagagggcacttttacctcggacgtgagctcctatctggagggccaggctgccaaggagttcatcgcttggttggtcaaaggccgaggc

SEQ ID NO: 12607 - DNA, 165 bp, synthetic construct
  misc_feature 1..165: note = source = /note="Description of Artificial Sequence: Synthetic coding sequence"
  source 1..165: mol_type = other DNA
atgaaatgggtgtcatttatctccctcctgttccttttctcgtcggcgtactcaggctcgctggataagcgtcacgctgagggaacttttacctccgacgtgtccagctaccttgaagggcaagccgctaaagagtttattgcatggttggttaaggggcggggc

SEQ ID NO: 12608 - DNA, 165 bp, synthetic construct
  misc_feature 1..165: note = source = /note="Description of Artificial Sequence: Synthetic coding sequence"
  source 1..165: mol_type = other DNA
atgaaatgggtttccttcatatctctcctttttctgttttcgtcggcatactcaggctcgttggataagagacatgcagaagggacttttaccagtgatgtgagcagctacctggaagggcaggcagcgaaagaattcattgcctggctggtgaagggacgcggt

SEQ ID NO: 12609 - DNA, 165 bp, synthetic construct
  misc_feature 1..165: note = source = /note="Description of Artificial Sequence: Synthetic coding sequence"
  source 1..165: mol_type = other DNA
atgaagtgggtgtcatttatcagccttctgtttcttttctcgtccgcgtactcaggctcactggataagagacatgcagaagggactttcacgtcggacgtctcatcgtacttggaaggtcaagcagcaaaagaattcattgcgtggttggtgaaaggtcgggga

SEQ ID NO: 12610 - DNA, 165 bp, synthetic construct
  misc_feature 1..165: note = source = /note="Description of Artificial Sequence: Synthetic coding sequence"
  source 1..165: mol_type = other DNA
atgaagtgggtgagcttcattagtctcctgttcctcttctcttctgcctatagcggttcattggacaagcgccacgccgagggtacgttcaccagcgatgtgagttcatatctcgaggggcaagccgctaaggagtttatcgcctggctcgtaaaggggcgggga

SEQ ID NO: 12611 - DNA, 165 bp, synthetic construct
  misc_feature 1..165: note = source = /note="Description of Artificial Sequence: Synthetic coding sequence"
  source 1..165: mol_type = other DNA
atgaagtgggtgtccttcatctctctgttattcctgttttcatctgcatattcaggcagcctggacaagagacacgctgagggaactttcacctccgacgtgtcaagttatttggagggacaggccgcaaaggaattcattgcatggttggtgaaaggccggggc

SEQ ID NO: 12612 - DNA, 165 bp, synthetic construct
  misc_feature 1..165: note = source = /note="Description of Artificial Sequence: Synthetic coding sequence"
  source 1..165: mol_type = other DNA
atgaagtgggtgtctttcatcagtctattgtttctgtttagcagtgcctacagtggcagtttagacaagaggcacgccgagggcacctttacaagcgatgtcagttcatatctggaggggcaggccgcaaaagagtttattgcctggctcgtcaaaggaagagga

SEQ ID NO: 12613 - DNA, 165 bp, synthetic construct
  misc_feature 1..165: note = source = /note="Description of Artificial Sequence: Synthetic coding sequence"
  source 1..165: mol_type = other DNA
atgaagtgggtgtcattcatctctttactattcctgttctcatctgcctactcgggctcgctggataagcgacacgcggaaggcacctttaccagtgacgtcagttcatatctggagggccaggctgccaaggaatttattgcctggcttgtgaagggcagaggt

SEQ ID NO: 12614 - DNA, 165 bp, synthetic construct
  misc_feature 1..165: note = source = /note="Description of Artificial Sequence: Synthetic coding sequence"
  source 1..165: mol_type = other DNA
atgaaatgggtgagtttcatatctctgctttttttattttccagcgcatattcgggttcgctggacaagaggcacgcggagggcacctttacaagtgacgtcagcagctatctagaagggcaagcagcgaaagaattcattgcctggctggtgaaagggagaggc

SEQ ID NO: 12615 - DNA, 165 bp, synthetic construct
  misc_feature 1..165: note = source = /note="Description of Artificial Sequence: Synthetic coding sequence"
  source 1..165: mol_type = other DNA
atgaagtgggtatcattcatcagcctgctcttcttgttttcatcggcctactccggctctcttgacaagcgccacgctgaaggaacttttacttccgatgtgtcgagctacctggagggacaggccgcgaaggagttcatcgcgtggctggtgaagggacgaggg

SEQ ID NO: 12616 - DNA, 165 bp, synthetic construct
  misc_feature 1..165: note = source = /note="Description of Artificial Sequence: Synthetic coding sequence"
  source 1..165: mol_type = other DNA
atgaagtgggtgtcttttatcagtctgctcttcctcttctcctccgcgtactcaggcagcctcgataagcgccacgccgaaggaacctttactagcgacgtctcttcatacctggaaggacaggccgctaaggagttcatcgcgtggctggttaaaggccggggt

SEQ ID NO: 12617 - DNA, 165 bp, synthetic construct
  misc_feature 1..165: note = source = /note="Description of Artificial Sequence: Synthetic coding sequence"
  source 1..165: mol_type = other DNA
atgaagtgggtgagcttcatctcgctcctctttctgttttcatctgcatacagtggcagcctggacaagaggcatggcgaaggcactttcacatccgacgtgtctagttacctcgaagggcaggctgccaaggaatttatcgcctggctggtgaagggcaggggg

SEQ ID NO: 12618 - DNA, 165 bp, synthetic construct
  misc_feature 1..165: note = source = /note="Description of Artificial Sequence: Synthetic coding sequence"
  source 1..165: mol_type = other DNA
atgaaatgggtctcctttatcagtctcctgtttttgttcagctctgcctattcagggagcttggacaagcgtcacggcgagggcaccttcacaagcgacgtatcaagctatctcgagggacaggcggctaaagagttcatcgcatggctcgtgaagggcagggga

SEQ ID NO: 12619 - DNA, 165 bp, synthetic construct
  misc_feature 1..165: note = source = /note="Description of Artificial Sequence: Synthetic coding sequence"
  source 1..165: mol_type = other DNA
atgaagtgggttagcttcatttctttgctctttctgttctcgtccgcatacagcgggagccttgataagaggcatggagagggaacgtttacttcagacgtctcctcgtaccttgaaggtcaggcagcgaaagaattcattgcatggcttgtgaaagggcgggga

SEQ ID NO: 12620 - DNA, 165 bp, synthetic construct
  misc_feature 1..165: note = source = /note="Description of Artificial Sequence: Synthetic coding sequence"
  source 1..165: mol_type = other DNA
atgaagtgggtatctttcatctccttgcttttcctgttttcttctgcatactcaggcagcctcgataagcgccacggagagggaaccttcaccagcgatgtgagcagctacctggaaggtcaggcagccaaagaatttatcgcttggctggtcaagggccgtgga

SEQ ID NO: 12621 - DNA, 165 bp, synthetic construct
  misc_feature 1..165: note = source = /note="Description of Artificial Sequence: Synthetic coding sequence"
  source 1..165: mol_type = other DNA
atgaaatgggtatcttttattagtctcctgttcctcttcagtagcgcttattcaggcagcctcgataagagacatggcgagggaacctttactagcgacgtcagtagctatctggagggtcaggcagccaaagagtttatcgcgtggctggtcaaagggagaggc

SEQ ID NO: 12622 - DNA, 165 bp, synthetic construct
  misc_feature 1..165: note = source = /note="Description of Artificial Sequence: Synthetic coding sequence"
  source 1..165: mol_type = other DNA
atgaagtgggtgtcctttatctcactgcttttcctttttagctcggcatattccgggtcgctcgataagagacatggtgaaggcacttttacctccgacgtgtctagctacctcgagggacaagccgcaaaagaattcatagcctggcttgtcaaagggcgggga

SEQ ID NO: 12623 - DNA, 165 bp, synthetic construct
  misc_feature 1..165: note = source = /note="Description of Artificial Sequence: Synthetic coding sequence"
  source 1..165: mol_type = other DNA
atgaagtgggtgagcttcatctcccttctgtttcttttctcctcagcttattccggatcgctcgacaaacggcacggagaaggcacttttacctcagatgtgtcctcgtacctcgaaggtcaagcggccaaggagtttattgcctggctggtcaaggggagagga

SEQ ID NO: 12624 - DNA, 165 bp, synthetic construct
  misc_feature 1..165: note = source = /note="Description of Artificial Sequence: Synthetic coding sequence"
  source 1..165: mol_type = other DNA
atgaaatgggtgtcattcataagcctactgtttctgttctctagcgcctattccgggtcactggataagcgacatggcgagggcactttcacctctgacgtgagttcctatctggaaggacaggccgctaaggaatttatcgcctggctggtcaaggggaggggg

SEQ ID NO: 12625 - DNA, 165 bp, synthetic construct
  misc_feature 1..165: note = source = /note="Description of Artificial Sequence: Synthetic coding sequence"
  source 1..165: mol_type = other DNA
atgaaatgggtcagctttatcagcctgctgtttctgtttagctctgcttacagtggaagtctggataaacgccatggagaaggcacattcacttcagacgtgagcagttatttggagggtcaggccgccaaagaattcattgcctggcttgtgaagggacgcggc

SEQ ID NO: 12626 - DNA, 165 bp, synthetic construct
  misc_feature 1..165: note = source = /note="Description of Artificial Sequence: Synthetic coding sequence"
  source 1..165: mol_type = other DNA
atgaagtgggtgtcgtttatctcgttgctgttccttttcagctcagcgtactcgggttccctggataagagacacggcgaaggtactttcacttcagacgtcagctcatacctggaaggacaagccgcgaaggagttcatcgcctggctcgtgaagggcagagga

SEQ ID NO: 12627 - DNA, 165 bp, synthetic construct
  misc_feature 1..165: note = source = /note="Description of Artificial Sequence: Synthetic coding sequence"
  source 1..165: mol_type = other DNA
atgaagtgggtgtcctttatctcgctgctgttccttttttcgtcggcatacagcggatccttggacaagaggcatggtgaaggcactttcactagcgatgtcagctcataccttgaagggcaggctgcaaaagagttcattgcatggctcgtgaagggcagaggg

SEQ ID NO: 12628 - DNA, 165 bp, synthetic construct
  misc_feature 1..165: note = source = /note="Description of Artificial Sequence: Synthetic coding sequence"
  source 1..165: mol_type = other DNA
atgaaatgggtgtcgtttatctcactccttttcttgttttcctcggcgtattcgggctcgctcgataaacggcatggagagggtaccttcacttccgatgtcagctcgtacctggaaggccaagcagccaaggagtttatcgcatggcttgtgaagggacgcgga

SEQ ID NO: 12629 - DNA, 165 bp, synthetic construct
  misc_feature 1..165: note = source = /note="Description of Artificial Sequence: Synthetic coding sequence"
  source 1..165: mol_type = other DNA
atgaagtgggtcagctttatctcgctccttttcctgttttcctcggcttactcgggatcattggacaagagacatggagagggaacctttacctcggatgtgagttcctacctcgagggacaggcagccaaggagtttattgcgtggcttgtgaagggaaggggt

SEQ ID NO: 12630 - DNA, 165 bp, synthetic construct
  misc_feature 1..165: note = source = /note="Description of Artificial Sequence: Synthetic coding sequence"
  source 1..165: mol_type = other DNA
atgaaatgggtttctttcatctccttgctgtttctgttctctagcgcttatagcggctctctggacaaacggcacggcgaggggacttttacaagcgatgtgagctcttatctggaaggccaggcggctaaagagttcatcgcttggttggtcaaagggcgtggc

SEQ ID NO: 12631 - DNA, 165 bp, synthetic construct
  misc_feature 1..165: note = source = /note="Description of Artificial Sequence: Synthetic coding sequence"
  source 1..165: mol_type = other DNA
atgaaatgggtgtccttcatcagcctcctctttctgttttcatccgcttatagcggaagtcttgacaagaggcatggcgaagggacctttacttctgatgtgagcagctatctggaggggcaggccgcaaaagagtttatagcctggttagtgaaaggacggggc

SEQ ID NO: 12632 - DNA, 165 bp, synthetic construct
  misc_feature 1..165: note = source = /note="Description of Artificial Sequence: Synthetic coding sequence"
  source 1..165: mol_type = other DNA
atgaagtgggtcagctttatatctctgctgtttctgtttagtagtgcctatagtggaagcttggacaagaggcacggggaagggaccttcaccagcgatgtgagctcttacctggagggccaagctgctaaagagtttatagcttggctggtgaaaggcaggggt

SEQ ID NO: 12633 - DNA, 165 bp, synthetic construct
  misc_feature 1..165: note = source = /note="Description of Artificial Sequence: Synthetic coding sequence"
  source 1..165: mol_type = other DNA
atgaaatgggtctcattcatcagtctcctcttccttttttcgtccgcttattccggctctttggataaacgacatggcgaaggtactttcacatcagatgtttcttcgtatctggaaggtcaagctgcaaaagaattcatcgcttggctggttaaaggcagaggt

SEQ ID NO: 12634 - DNA, 165 bp, synthetic construct
  misc_feature 1..165: note = source = /note="Description of Artificial Sequence: Synthetic coding sequence"
  source 1..165: mol_type = other DNA
atgaagtgggtcagcttcatatcgctgctttttctgtttagcagcgcatactcaggctctcttgataagagacacggagagggcacctttacgtccgacgtgagctcctaccttgagggacaggcagcaaaagaattcattgcatggctggtgaagggacgcgga

SEQ ID NO: 12635 - DNA, 165 bp, synthetic construct
  misc_feature 1..165: note = source = /note="Description of Artificial Sequence: Synthetic coding sequence"
  source 1..165: mol_type = other DNA
atgaaatgggtttcctttatttcccttctatttctcttcagtagcgcttattctggaagcctggataaacgccatggcgagggaactttcacctcagacgtatcaagttaccttgaagggcaggccgcgaaggagtttatcgcctggctagttaagggcaggggc

SEQ ID NO: 12636 - DNA, 165 bp, synthetic construct
  misc_feature 1..165: note = source = /note="Description of Artificial Sequence: Synthetic coding sequence"
  source 1..165: mol_type = other DNA
atgaagtgggtttcatttatcagtctgctgtttttgttttcatcggcctactccgggtctttggacaagaggcacggtgagggcacctttactagtgatgtttcgtcctacttggagggccaagccgctaaggagttcatagcttggttggtcaaaggccgtggg

SEQ ID NO: 12637 - DNA, 165 bp, synthetic construct
  misc_feature 1..165: note = source = /note="Description of Artificial Sequence: Synthetic coding sequence"
  source 1..165: mol_type = other DNA
atgaagtgggtttcctttataagcctgctgttcctgtttagctccgcgtacagtggcagcctcgacaagcgacatggagagggcacattcacttccgacgtgtcaagctatctggaaggccaagcagccaaagagtttattgcttggctcgtcaaagggcgcggc

SEQ ID NO: 12638 - DNA, 165 bp, synthetic construct
  misc_feature 1..165: note = source = /note="Description of Artificial Sequence: Synthetic coding sequence"
  source 1..165: mol_type = other DNA
atgaagtgggtgagcttcatttctcttctgtttttgttttcttctgcatactctggctcattggacaaaagacatggcgaaggcacattcacgagtgatgtttctagttatcttgaaggtcaggctgctaaggagttcatagcctggttggttaagggcagagga

SEQ ID NO: 12639 - DNA, 165 bp, synthetic construct
  misc_feature 1..165: note = source = /note="Description of Artificial Sequence: Synthetic coding sequence"
  source 1..165: mol_type = other DNA
atgaagtgggtaagtttcatttcattattatttttgttttcaagtgcatattcaggtagtcttgataaaagacatggagaaggtactttcacatctgatgtttcatcttatcttgagggacaagccgcaaaggagtttattgcttggctagttaaaggacgtggt

SEQ ID NO: 12640 - DNA, 165 bp, synthetic construct
  misc_feature 1..165: note = source = /note="Description of Artificial Sequence: Synthetic coding sequence"
  source 1..165: mol_type = other DNA
atgaagtgggtcagtttcatctccctcctgttcctgtttagctcggcttattcaggctccctggataagagacacggagaaggaaccttcacttcggacgtgtcctcctacctcgaaggacaggcggcgaaggagttcattgcctggctggtcaagggacgggga

SEQ ID NO: 12641 - DNA, 165 bp, synthetic construct
  misc_feature 1..165: note = source = /note="Description of Artificial Sequence: Synthetic coding sequence"
  source 1..165: mol_type = other DNA
atgaagtgggtgtcattcatcagtctcctcttcctgttttctagcgcatacagcggatcgctggacaagagacacggagagggcacttttacctcagatgtctcctcctaccttgaagggcaggcggctaaagaattcatcgcgtggctggtaaagggtagggga

SEQ ID NO: 12642 - DNA, 165 bp, synthetic construct
  misc_feature 1..165: note = source = /note="Description of Artificial Sequence: Synthetic coding sequence"
  source 1..165: mol_type = other DNA
atgaagtgggtgtcattcatcagcctgctattcttgtttagttccgcttactcaggatcgctcgataagaggcacggagaaggcacattcacctcagatgtttcaagctaccttgagggccaggctgccaaagaattcatcgcctggttggttaaaggcagaggg

SEQ ID NO: 12643 - DNA, 165 bp, synthetic construct
  misc_feature 1..165: note = source = /note="Description of Artificial Sequence: Synthetic coding sequence"
  source 1..165: mol_type = other DNA
atgaagtgggtttctttcatctcactcctgtttctgttctcttccgcttactccggctcactagataagaggcatggcgagggcaccttcacatccgatgtaagcagctatctggagggccaggccgctaaagagtttatcgcatggttggtcaagggacggggc

SEQ ID NO: 12644 - DNA, 165 bp, synthetic construct
  misc_feature 1..165: note = source = /note="Description of Artificial Sequence: Synthetic coding sequence"
  source 1..165: mol_type = other DNA
atgaagtgggtgagcttcatatccttattgtttctgttttctagcgcttactccggctccttggataagaggcatggagaaggcacttttacttctgatgtttcttcttacctagaggggcaagcagccaaggaattcatcgcctggctggtgaaaggccgaggc

SEQ ID NO: 12645 - DNA, 165 bp, synthetic construct
  misc_feature 1..165: note = source = /note="Description of Artificial Sequence: Synthetic coding sequence"
  source 1..165: mol_type = other DNA
atgaaatgggtcagtttcatttcactgctgtttcttttctcgtcagcctactcaggatctctcgataagcgccatggagagggaacttttacctccgatgtctcgtcgtacctcgagggtcaagcagcaaaggagtttatcgcgtggcttgtgaagggacgggga

SEQ ID NO: 12646 - DNA, 165 bp, synthetic construct
  misc_feature 1..165: note = source = /note="Description of Artificial Sequence: Synthetic coding sequence"
  source 1..165: mol_type = other DNA
atgaagtgggtcagcttcatctcgctgctgtttctgttctcatcagcgtactccggatcgctcgataagcggcacggagaaggcactttcacttcggacgtgtcgagctatctggagggccaggccgcgaaggagttcatcgcctggcttgtgaagggacgcgga

SEQ ID NO: 12647 - DNA, 165 bp, synthetic construct
  misc_feature 1..165: note = source = /note="Description of Artificial Sequence: Synthetic coding sequence"
  source 1..165: mol_type = other DNA
atgaagtgggtcagctttatctcactgctgttcctgttctcctccgcgtacagcggatccttggacaagcgccacggggaaggaacgttcacctccgatgtctcttcgtatcttgaaggccaggccgccaaggagttcatcgcatggctggttaaaggaagaggc

SEQ ID NO: 12648 - DNA, 165 bp, synthetic construct
  misc_feature 1..165: note = source = /note="Description of Artificial Sequence: Synthetic coding sequence"
  source 1..165: mol_type = other DNA
atgaaatgggtgtcttttatcagcctgttgtttctgttctcttccgcttactcaggttcactggataagcgccacggcgagggcactttcacctccgacgtcagttcctacctcgagggacaggcagcgaaggaattcatcgcctggcttgtgaaaggaagagga

SEQ ID NO: 12649 - DNA, 165 bp, synthetic construct
  misc_feature 1..165: note = source = /note="Description of Artificial Sequence: Synthetic coding sequence"
  source 1..165: mol_type = other DNA
atgaagtgggtaagcttcatcagcctgctgtttttgttctcttccgcttacagcggttcattggacaagcgccacggagagggcacttttactagcgacgtgtccagctacttggagggccaggctgccaaagagttcattgcatggctggttaaggggcggggt

SEQ ID NO: 12650 - DNA, 165 bp, synthetic construct
  misc_feature 1..165: note = source = /note="Description of Artificial Sequence: Synthetic coding sequence"
  source 1..165: mol_type = other DNA
atgaaatgggtttcattcatctctctattattcttgttttcatcagcttacagtggctctcttgataagcggcacggagaaggtacttttacaagtgacgtatcaagctatcttgagggccaagcagcaaaggagtttattgcttggttagttaaaggacgggga

SEQ ID NO: 12651 - DNA, 165 bp, synthetic construct
  misc_feature 1..165: note = source = /note="Description of Artificial Sequence: Synthetic coding sequence"
  source 1..165: mol_type = other DNA
atgaaatgggtctcatttatctcgctactgttccttttcagttctgcatactctggatcactggacaagaggcacggggaaggcaccttcaccagcgacgtttccagctatttggaagggcaagccgccaaagagtttatagcctggcttgtaaaagggagaggc

SEQ ID NO: 12652 - DNA, 165 bp, synthetic construct
  misc_feature 1..165: note = source = /note="Description of Artificial Sequence: Synthetic coding sequence"
  source 1..165: mol_type = other DNA
atgaagtgggtgtcattcattagcctgctgtttctcttttcctccgcttatagcggtagcttggacaagagacacggcgagggaacattcacatccgatgttagctcttatctagagggacaggccgctaaggaatttatcgcttggttagtcaaaggcagaggc

SEQ ID NO: 12653 - DNA, 165 bp, synthetic construct
  misc_feature 1..165: note = source = /note="Description of Artificial Sequence: Synthetic coding sequence"
  source 1..165: mol_type = other DNA
atgaagtgggtgtcttttatctcccttttgttcctgttctcatcggcttactccggatctctcgataagcgccacggtgagggaactttcaccagtgacgtgagctcatatttggaggggcaggcggccaaagaattcatcgcgtggctggttaagggcaggggc

SEQ ID NO: 12654 - DNA, 165 bp, synthetic construct
  misc_feature 1..165: note = source = /note="Description of Artificial Sequence: Synthetic coding sequence"
  source 1..165: mol_type = other DNA
atgaaatgggtttcgtttatctctttgctgttcctgttttcctccgcttactccggaagcctggacaaacggcacggggagggcacctttacgtctgatgtgagctcctacctggagggtcaggcggctaaggaatttatcgcctggctcgtcaaagggcgggga

SEQ ID NO: 12655 - DNA, 165 bp, synthetic construct
  misc_feature 1..165: note = source = /note="Description of Artificial Sequence: Synthetic coding sequence"
  source 1..165: mol_type = other DNA
atgaagtgggtgagcttcatatccctccttttcctgttctcgtcggcctattccggtagtctcgataagcgtcatggcgaaggtaccttcacgtctgacgtgagctcttacctggagggtcaagcagccaaggaattcatcgcttggttggtgaaagggcgtggc

SEQ ID NO: 12656 - DNA, 165 bp, synthetic construct
  misc_feature 1..165: note = source = /note="Description of Artificial Sequence: Synthetic coding sequence"
  source 1..165: mol_type = other DNA
atgaaatgggtgtcattcatatcactccttttccttttctcctcggcatactcgggatcgctcgataaaaggcatggagaaggtacctttaccagcgacgtgagctcgtacctggaaggtcaggcggctaaagagtttatcgcctggctggtcaaaggcagaggc

SEQ ID NO: 12657 - DNA, 165 bp, synthetic construct
  misc_feature 1..165: note = source = /note="Description of Artificial Sequence: Synthetic coding sequence"
  source 1..165: mol_type = other DNA
atgaagtgggtcagtttcatttccctgctttttctgttcagctccgcctacagtggctccctagataagcgtcacggagagggcacattcacatctgacgtgtctagctacctcgaaggacaggcggcaaaggaatttattgcttggcttgtaaagggcagagga

SEQ ID NO: 12658 - DNA, 165 bp, synthetic construct
  misc_feature 1..165: note = source = /note="Description of Artificial Sequence: Synthetic coding sequence"
  source 1..165: mol_type = other DNA
atgaagtgggtttcattcataagcctgctttttctcttctcgtccgcttactcggggtcgctggataagcgccacggagaagggacgttcacctcagacgtgtcatcgtaccttgaaggtcaagcagccaaggagtttatcgcgtggctggtcaaaggaaggggc

SEQ ID NO: 12659 - DNA, 165 bp, synthetic construct
  misc_feature 1..165: note = source = /note="Description of Artificial Sequence: Synthetic coding sequence"
  source 1..165: mol_type = other DNA
atgaagtgggtcagtttcatctcccttctctttcttttttcttccgcatactccggatccctagataaacgccatggagaagggacgtttacatctgatgttagttcatacctcgaagggcaggctgctaaggaattcatagcttggctcgtcaaggggagggga

SEQ ID NO: 12660 - DNA, 165 bp, synthetic construct
  misc_feature 1..165: note = source = /note="Description of Artificial Sequence: Synthetic coding sequence"
  source 1..165: mol_type = other DNA
atgaaatgggtgtcatttatctcacttctgttcctgttttcgtccgcctactccggttccctggataaacgccacggcgaaggaacttttactagcgatgtgagctcgtacctggagggacaagccgccaaggaattcatcgcatggctcgtgaaggggagggga

SEQ ID NO: 12661 - DNA, 165 bp, synthetic construct
  misc_feature 1..165: note = source = /note="Description of Artificial Sequence: Synthetic coding sequence"
  source 1..165: mol_type = other DNA
atgaagtgggtgtcattcatctcgctcctgttcttgttctcgtcggcttactccggatccttggacaagcggcatggcgagggtactttcacctcggatgtgtcatcctacctcgaaggacaggccgcaaaggagtttatcgcctggctggtcaaaggacgaggc

SEQ ID NO: 12662 - DNA, 165 bp, synthetic construct
  misc_feature 1..165: note = source = /note="Description of Artificial Sequence: Synthetic coding sequence"
  source 1..165: mol_type = other DNA
atgaagtgggtatcattcatttccctgctgtttttgttctcctcggcatactcaggctcgcttgacaagcgacacggtgaggggacctttacgtccgatgtgagctcgtacctcgaaggccaagcagccaaagagtttatcgcctggctcgtgaaggggagagga

SEQ ID NO: 12663 - DNA, 165 bp, synthetic construct
  misc_feature 1..165: note = source = /note="Description of Artificial Sequence: Synthetic coding sequence"
  source 1..165: mol_type = other DNA
atgaagtgggtttcttttatctcgctcctgttccttttctccagtgcatacagcggttctttggataaaagacatggcgaaggcacctttacttccgacgtctccagctacctcgaaggacaagccgctaaggagtttattgcatggctggtgaaaggaaggggg

SEQ ID NO: 12664 - DNA, 165 bp, synthetic construct
  misc_feature 1..165: note = source = /note="Description of Artificial Sequence: Synthetic coding sequence"
  source 1..165: mol_type = other DNA
atgaagtgggtgtcgttcatctccttgctctttctgttctcaagcgcatactcgggctcccttgacaagcggcacggagaaggcaccttcacttcggatgtgtcgagctatctcgaaggacaagccgctaaagagtttatcgcgtggttggtgaagggcagaggc

SEQ ID NO: 12665 - DNA, 165 bp, synthetic construct
  misc_feature 1..165: note = source = /note="Description of Artificial Sequence: Synthetic coding sequence"
  source 1..165: mol_type = other DNA
atgaaatgggtatcttttatctcccttctttttttgttttcgtctgcgtactccggctcactcgacaaacgacatggtgaggggactttcacttctgacgtgagttcatatctggagggacaggccgccaaagagtttattgcatggctggttaaaggaagaggg

SEQ ID NO: 12666 - DNA, 165 bp, synthetic construct
  misc_feature 1..165: note = source = /note="Description of Artificial Sequence: Synthetic coding sequence"
  source 1..165: mol_type = other DNA
atgaaatgggtaagcttcatctccctcctttttttgttcagcagcgcctacagtggttccctggacaagcgccatggagaagggacctttacctccgatgtgtctagttacctggaggggcaggccgctaaggagttcatcgcatggctcgtaaagggcaggggc

SEQ ID NO: 12667 - DNA, 165 bp, synthetic construct
  misc_feature 1..165: note = source = /note="Description of Artificial Sequence: Synthetic coding sequence"
  source 1..165: mol_type = other DNA
atgaagtgggtgagcttcatctcgctgttgttcctgttttcaagcgcgtacagcggatcgcttgataagagacatggtgaaggcaccttcacttccgacgtctccagctatcttgagggccaggccgcgaaggaattcattgcctggctggtgaaagggcgggga

SEQ ID NO: 12668 - DNA, 165 bp, synthetic construct
  misc_feature 1..165: note = source = /note="Description of Artificial Sequence: Synthetic coding sequence"
  source 1..165: mol_type = other DNA
atgaagtgggtgtcattcatctcgctgctgttcctcttttcgagcgcctactccggtagccttgataagcgtcatggagaagggacctttacttcggacgtttcgtcgtacctcgaggggcaggccgcaaaagagttcatcgcatggctggtgaagggccggggc

SEQ ID NO: 12669 - DNA, 165 bp, synthetic construct
  misc_feature 1..165: note = source = /note="Description of Artificial Sequence: Synthetic coding sequence"
  source 1..165: mol_type = other DNA
atgaagtgggtcagcttcatcagcctcttgtttcttttttcctcggcctactctggatcactcgacaaacgccatggtgaaggtactttcacctcggatgtgtcctcgtaccttgaaggacaagccgcaaaagagtttattgcttggctggtgaagggcaggggc

SEQ ID NO: 12670 - DNA, 165 bp, synthetic construct
  misc_feature 1..165: note = source = /note="Description of Artificial Sequence: Synthetic coding sequence"
  source 1..165: mol_type = other DNA
atgaagtgggtgtcctttatttcccttctgttcctgttctctagcgcatactctggtagcttggataagagacacggggaaggcacgtttacaagtgatgtgagttcatacttagaaggtcaagcagccaaagaatttatcgcctggctcgttaaaggtagaggt

SEQ ID NO: 12671 - DNA, 165 bp, synthetic construct
  misc_feature 1..165: note = source = /note="Description of Artificial Sequence: Synthetic coding sequence"
  source 1..165: mol_type = other DNA
atgaaatgggtttcttttataagcctgctcttcctgttcagctctgcctacagcgggtccttggataaacgtcatggggaaggcaccttcacctccgacgtttcgtcataccttgaggggcaggcggccaaagagttcattgcctggttggtcaaagggaggggc

SEQ ID NO: 12672 - DNA, 165 bp, synthetic construct; identical to SEQ ID NO: 12624
  misc_feature 1..165: note = source = /note="Description of Artificial Sequence: Synthetic coding sequence"
  source 1..165: mol_type = other DNA

SEQ ID NO: 12673 - DNA, 165 bp, synthetic construct
  misc_feature 1..165: note = source = /note="Description of Artificial Sequence: Synthetic coding sequence"
  source 1..165: mol_type = other DNA
atgaaatgggtgtcattcatcagccttctgtttttgttttcaagcgcatactcaggttcgttggacaagcgccatggtgaaggcacctttaccagcgatgtgtcgtcatatctcgaaggccaagctgcaaaggagtttattgcctggcttgtgaagggaagagga

SEQ ID NO: 12674 - DNA, 165 bp, synthetic construct
  misc_feature 1..165: note = source = /note="Description of Artificial Sequence: Synthetic coding sequence"
  source 1..165: mol_type = other DNA
atgaagtgggtgtccttcatttccctgctgtttctgttcagctcagcgtactcaggatcgcttgataagagacacggagaaggcaccttcacttcggacgtcagcagctacctcgaaggtcaggcagcaaaggagtttatcgcttggttggtgaaagggcgaggc

SEQ ID NO: 12675 - DNA, 165 bp, synthetic construct
  misc_feature 1..165: note = source = /note="Description of Artificial Sequence: Synthetic coding sequence"
  source 1..165: mol_type = other DNA
atgaagtgggtctctttcatctctctgcttttccttttcagctccgcatattcgggttcactggacaaacgccacggggagggaaccttcacatctgacgtgtccagctatctggagggtcaagcagctaaggagttcatcgcttggctagtaaagggtcgcgga

SEQ ID NO: 12676 - DNA, 165 bp, synthetic construct
  misc_feature 1..165: note = source = /note="Description of Artificial Sequence: Synthetic coding sequence"
  source 1..165: mol_type = other DNA
atgaagtgggtttcctttatctcactcctgttccttttctcttctgcttacagtgggagtttagacaaacggcacggcgaaggtaccttcacaagtgacgtgagcagctatctcgaaggacaggcagccaaggagttcatcgcctggctggtcaagggccggggc

SEQ ID NO: 12677 - DNA, 165 bp, synthetic construct
  misc_feature 1..165: note = source = /note="Description of Artificial Sequence: Synthetic coding sequence"
  source 1..165: mol_type = other DNA
atgaagtgggtcagttttatctccctcctgtttttgttctcctccgcttactcgggttctctggacaaacgacacggggagggtactttcacctcggatgtgtcgagctacctggaagggcaggccgccaaggaattcatcgcgtggctcgtgaagggccgcgga

SEQ ID NO: 12678 - DNA, 165 bp, synthetic construct
  misc_feature 1..165: note = source = /note="Description of Artificial Sequence: Synthetic coding sequence"
  source 1..165: mol_type = other DNA
atgaagtgggtcagcttcatctcccttctgtttctcttctcgagcgcgtactcgggctctctggacaaacgccacggggagggtacctttacttccgacgtgtcctcgtacctcgaaggacaggccgccaaggaattcatcgcatggctggtgaagggaagaggg

SEQ ID NO: 12679 - DNA, 165 bp, synthetic construct
  misc_feature 1..165: note = source = /note="Description of Artificial Sequence: Synthetic coding sequence"
  source 1..165: mol_type = other DNA
atgaagtgggtctctttcatctccctcctatttttgttctcctcagcctactccgggtccttggataaacgccatggcgaagggacatttacatcggacgtctcatcttacctggagggtcaggcagcgaaagaatttatagcttggcttgtcaaagggagaggt

SEQ ID NO: 12680 - DNA, 165 bp, synthetic construct
  misc_feature 1..165: note = source = /note="Description of Artificial Sequence: Synthetic coding sequence"
  source 1..165: mol_type = other DNA
atgaaatgggtgtcttttatatcattattgttcttgttttcttctgcttacagcggatctctggacaaacgccacggtgagggcacttttacgtccgacgtgagtagttaccttgagggtcaggctgccaaagagttcattgcatggctcgtcaagggccgcggt

SEQ ID NO: 12681 - DNA, 165 bp, synthetic construct
  misc_feature 1..165: note = source = /note="Description of Artificial Sequence: Synthetic coding sequence"
  source 1..165: mol_type = other DNA
atgaaatgggtgtctttcatatctctccttttccttttctccagcgcctacagcggttctctggataaacggcacggcgaggggacattcacaagcgatgtctcgagttatctcgaaggacaggcggctaaagaatttattgcctggcttgtgaagggccgcggt

SEQ ID NO: 12682 - DNA, 165 bp, synthetic construct
  misc_feature 1..165: note = source = /note="Description of Artificial Sequence: Synthetic coding sequence"
  source 1..165: mol_type = other DNA
atgaagtgggtgtcgtttatctccctgctcttcctcttctcatccgcctactcgggatcactcgacaagcgccacggcgaaggaactttcacctcagatgtgtcgtcgtacctggagggacaggccgcaaaagaattcatagcgtggctggtcaagggacgggga

SEQ ID NO: 12683 - DNA, 165 bp, synthetic construct
  misc_feature 1..165: note = source = /note="Description of Artificial Sequence: Synthetic coding sequence"
  source 1..165: mol_type = other DNA
atgaaatgggtgtcgttcatcagccttctcttcctgttctcgagcgcctactcgggatcgttggacaagcggcacggtgagggaacctttacgagcgatgtgtcgtcctacctcgaaggccaggccgcgaaggaattcatcgcctggctggtcaaaggaagagga

SEQ ID NO: 12684 - DNA, 165 bp, synthetic construct
  misc_feature 1..165: note = source = /note="Description of Artificial Sequence: Synthetic coding sequence"
  source 1..165: mol_type = other DNA
atgaagtgggtcagttttatctcactcctgtttttgttctcgtcagcatactccggctcgctcgacaaacgccacggcgaaggaactttcacgagcgatgtgtcctcgtaccttgaggggcaagcggcaaaagaattcatcgcttggctggtgaagggtagggga

SEQ ID NO: 12685 - DNA, 165 bp, synthetic construct
  misc_feature 1..165: note = source = /note="Description of Artificial Sequence: Synthetic coding sequence"
  source 1..165: mol_type = other DNA
atgaaatgggtgagctttatcagcttgctcttcctgttcagctccgcttacagcgggagtctcgacaagaggcatggagaaggtacctttacttcggatgtgtcctcttacctggaaggccaagcggccaaggagtttattgcatggctggtcaagggaagaggt

SEQ ID NO: 12686 - DNA, 165 bp, synthetic construct
  misc_feature 1..165: note = source = /note="Description of Artificial Sequence: Synthetic coding sequence"
  source 1..165: mol_type = other DNA
atgaaatgggtctctttcatatcattgctgttcctcttctcctccgcctactctggcagcctggacaagcgccatggcgagggcacctttacaagtgacgtgtctagctacctagaggggcaggccgccaaggaattcatagcttggctggtaaaaggacggggg

SEQ ID NO: 12687 - DNA, 165 bp, synthetic construct
  misc_feature 1..165: note = source = /note="Description of Artificial Sequence: Synthetic coding sequence"
  source 1..165: mol_type = other DNA
atgaagtgggtgtcgttcatcagcttgctgttcctcttctcctcggcatactcggggtcactggacaagcgccacggagagggcactttcaccagcgatgtgtcctcatacctcgaaggtcaggcggccaaggaatttatcgcttggctggtcaaaggacgggga

SEQ ID NO: 12688 - DNA, 165 bp, synthetic construct
  misc_feature 1..165: note = source = /note="Description of Artificial Sequence: Synthetic coding sequence"
  source 1..165: mol_type = other DNA
atgaagtgggtgtcatttatctcccttctgtttctgttttccagcgcctactccggtagtttggataaacgccacggcgaggggacctttacgtccgatgtgtcatcttatctggagggtcaggccgcgaaagagtttatcgcatggctggtcaagggaagaggc

SEQ ID NO: 12689 - DNA, 165 bp, synthetic construct
  misc_feature 1..165: note = source = /note="Description of Artificial Sequence: Synthetic coding sequence"
  source 1..165: mol_type = other DNA
atgaaatgggtgagctttatcagtctcctatttctcttttcctctgcttactcaggatccttagacaagaggcatggggagggcacgtttacatccgacgtgagctcctatcttgagggacaggccgccaaggagttcatagcttggctcgtaaagggacgagga

SEQ ID NO: 12690 - DNA, 165 bp, synthetic construct
  misc_feature 1..165: note = source = /note="Description of Artificial Sequence: Synthetic coding sequence"
  source 1..165: mol_type = other DNA
atgaaatgggtatctttcatctcgctcctcttcctcttctcgtccgcatattctggcagcctcgacaaacggcacggtgagggcacgttcacctctgatgtctcctcttatttagagggccaggctgcgaaggagtttattgcatggctggtcaagggacgcggt

SEQ ID NO: 12691 - DNA, 165 bp, synthetic construct
  misc_feature 1..165: note = source = /note="Description of Artificial Sequence: Synthetic coding sequence"
  source 1..165: mol_type = other DNA
atgaagtgggtgagcttcatatcgcttctgtttctctttagcagcgcttactccggttctctggataagcggcatggagaggggaccttcacttcagacgtctcatcctatctggaaggccaagcagccaaggaattcatcgcatggctggttaagggaagagga

SEQ ID NO: 12692 - DNA, 165 bp, synthetic construct
  misc_feature 1..165: note = source = /note="Description of Artificial Sequence: Synthetic coding sequence"
  source 1..165: mol_type = other DNA
atgaaatgggtaagcttcatctccttgttgtttctgttttccagtgcctactctggaagtctcgacaaacggcatggtgaaggcacttttacatccgacgttagcagctacctcgagggacaggcggctaaagagttcatcgcatggctggtcaagggcagaggc

SEQ ID NO: 12693 - DNA, 165 bp, synthetic construct
  misc_feature 1..165: note = source = /note="Description of Artificial Sequence: Synthetic coding sequence"
  source 1..165: mol_type = other DNA
atgaaatgggtatcttttatctctctgctgtttcttttttcctccgcctacagcggaagcctggacaaaaggcatggcgagggaactttcacctctgatgtgtctagttatttggagggccaggccgcaaaggagttcattgcctggctggtgaaaggacggggc

SEQ ID NO: 12694 - DNA, 165 bp, synthetic construct
  misc_feature 1..165: note = source = /note="Description of Artificial Sequence: Synthetic coding sequence"
  source 1..165: mol_type = other DNA
atgaagtgggtgagtttcatttcccttctttttttattttcatccgcttatagtggctccctcgacaagagacatggtgaaggaacctttacctctgatgtgagttcatatctggagggtcaggctgccaaggagtttattgcgtggctggttaaagggaggggc

SEQ ID NO: 12695 - DNA, 165 bp, synthetic construct
  misc_feature 1..165: note = source = /note="Description of Artificial Sequence: Synthetic coding sequence"
  source 1..165: mol_type = other DNA
atgaaatgggtgagcttcatttcgcttttattcctgttctcctcagcctacagtggctccttggataaaaggcatggggagggcactttcacaagcgacgtgtcttcatatttggagggccaggcagcaaaagaatttatagcctggctggtgaaggggcgtggg

SEQ ID NO: 12696 - DNA, 165 bp, synthetic construct
  misc_feature 1..165: note = source = /note="Description of Artificial Sequence: Synthetic coding sequence"
  source 1..165: mol_type = other DNA
atgaagtgggtgtcattcatttcactgctgttcctgttttcatccgcctattcggggtctttggacaagaggcatggggaagggacattcacgagtgacgtcagttcgtatctggagggccaagctgctaaagaattcattgcctggctggttaaaggccgcggt

SEQ ID NO: 12697 - DNA, 165 bp, synthetic construct
  misc_feature 1..165: note = source = /note="Description of Artificial Sequence: Synthetic coding sequence"
  source 1..165: mol_type = other DNA
atgaagtgggttagtttcataagcttattgtttcttttttcatccgcttatagtggctccctggacaaaaggcatggagaaggaacattcacatcagacgtgagcagttatttggaaggccaagccgccaaagagttcattgcttggctggtgaagggtcgagga

SEQ ID NO: 12698 - DNA, 165 bp, synthetic construct
  misc_feature 1..165: note = source = /note="Description of Artificial Sequence: Synthetic coding sequence"
  source 1..165: mol_type = other DNA
atgaagtgggtgtcctttatctcgttgctttttctgttcagcagcgcctactccggatcactagacaagcgacacggcgaaggaactttcacttccgacgtttcttcatacctagagggacaggctgcgaaggagttcatagcctggttggtgaagggaagaggc

SEQ ID NO: 12699 - DNA, 165 bp, synthetic construct
  misc_feature 1..165: note = source = /note="Description of Artificial Sequence: Synthetic coding sequence"
  source 1..165: mol_type = other DNA
atgaagtgggtttccttcatatcgctgctgtttctgttctcgtctgcatattccggcagcctcgataagcggcacggagaaggaacttttaccagcgacgtctcttcatacctggaaggacaagccgcaaaagagtttatagcttggctggtgaaggggagggga

SEQ ID NO: 12700 - DNA, 165 bp, synthetic construct
  misc_feature 1..165: note = source = /note="Description of Artificial Sequence: Synthetic coding sequence"
  source 1..165: mol_type = other DNA
atgaagtgggtcagcttcatctcgctgctgtttctcttctcgtccgcatactccggatcactggacaagcggcacggtgaaggaacttttactagcgatgtctccagctacttggagggtcaggccgccaaggagttcatcgcgtggctggtcaagggaagggga

SEQ ID NO: 12701 - DNA, 165 bp, synthetic construct
  misc_feature 1..165: note = source = /note="Description of Artificial Sequence: Synthetic coding sequence"
  source 1..165: mol_type = other DNA
atgaaatgggtttcctttatatcattgttatttcttttctctagtgcttattctgggtcactcgataagagacatggggaagggacatttacaagtgatgtgtcttcttatttagaaggacaggccgccaaagaattcatcgcctggctggtgaaagggcgcgga

SEQ ID NO: 12702 - DNA, 165 bp, synthetic construct
  misc_feature 1..165: note = source = /note="Description of Artificial Sequence: Synthetic coding sequence"
  source 1..165: mol_type = other DNA
atgaaatgggtatcgtttatatcgctattatttttattttcgtcggcgtattcgggttcgctagataaacgtcatggtgaaggtacgtttacgtcggatgtttcgtcgtatctagaaggtcaagcggcgaaagaatttatagcgtggctagtaaaaggtcgaggt

SEQ ID NO: 12703 - DNA, 165 bp, synthetic construct
  misc_feature 1..165: note = source = /note="Description of Artificial Sequence: Synthetic coding sequence"
  source 1..165: mol_type = other DNA
atgaaatgggtgtccttcatctccctcctgttcctgttctcttcagcctactctgggtccctggacaaaaggcacggcgaagggacctttacctctgacgtgtccagctacttagaaggacaagcagccaaagaatttatcgcctggttagtgaaggggagggga

SEQ ID NO: 12704 - DNA, 2106 bp, synthetic construct
  misc_feature 1..2106: note = source = /note="Description of Artificial Sequence: Synthetic coding sequence"
  source 1..2106: mol_type = other DNA
atggccgccccaatgactcccgcagctagaccggaagattacgaagctgcacttaacgccgcgctggcagatgtgccggaactcgcgagactccttgaaatcgacccatacctcaagccttacgcggtagatttccagagacgctacaagcagttctcgcaaatcctgaagaatatcggtgagaacgaaggaggaatcgacaagttcagtcgcggctacgaatcgtttggggtgcatcggtgcgccgatggaggactctactgcaaggaatgggcacctggagccgagggagtctttttgaccggggatttcaacggatggaacccgttctcttacccgtacaaaaagttggactacggcaagtgggaactgtacatccccccgaagcagaacaaatcagtgcttgtgccacacggatcgaaactcaaggttgtgattacgtcgaagtcgggcgaaatcttgtaccgaatctccccatgggctaagtacgtggtcagagaaggcgacaatgtgaattacgactggatccactgggacccagagcactcctatgagtttaagcatagccgcccgaagaagccgcggtcattgcgcatatacgagagccacgtcggcatttcctcccatgagggtaaagtggcatcgtataagcactttacctgcaatgttctcccacggatcaaaggactggggtataactgcattcagctcatggccatcatggagcacgcctattacgcctccttcggatatcagatcacttccttcttcgcggcctcctccagatacggaactccggaagaactgcaggaactggtcgacactgcgcacagcatggggatcatcgtccttctggacgtggtccactcgcacgcgtccaagaatagcgccgatgggctgaacatgtttgacgggactgactcgtgttacttccattccggtccgagagggacccatgatctgtgggattcacggctcttcgcttacagctcttgggaaatcctgcgtttcctgctgtccaacattaggtggtggctggaagaataccggtttgacggattcagattcgatggcgtgacttcgatgctgtaccaccatcatggagtgggacaaggcttctcgggagattacagcgagtattttggactgcaagtggacgaggatgcgctgacgtacctcatgctggctaaccaccttgtgcacacgttgtgcccggactccatcaccatcgcggaggacgtttcaggtatgcctgccctctgctcgcccatcagtcagggaggtggagggttcgattatagactggcgatggcaatacctgataagtggattcagctgctcaaagagtttaaggacgaagattggaacatgggcgatatcgtatacacgctgactaacagacggtacctggagaagtgtattgcatatgccgagtcacacgaccaggcgctcgtcggagataagtcgcttgccttctggctgatggacgccgaaatgtacactaatatgtcagtgctgaccccgttcactccggtgatagatcgcggaatccagctgcacaaaatgattcgcttgattacccacggcctgggtggcgaggggtaccttaactttatgggaaacgaattcggccacccagagtggctggacttcccaagaaaaggaaataacgaatcctatcattacgcacgccggcaatttcacctgaccgacgacgacctgctccgctacaaatttctgaataacttcgatcgcgatatgaaccgcctggaagagaggtacgggtggttggccgctccccaggcatacgtgtccgaaaagcatgaaggaaacaagatcattgcgttcgaacgagctgggctcctgtttatcttcaatttccatccttcaaagtcctacactgattaccgggtgggaactgccctgccgggaaagttcaagatcgtcctcgattcagacgccgccgagtacggagggcatcaaaggcttgaccacagcacggacttcttcagcgaggcgttcgagcataacggacggccctactccctgctcgtgtatatcccttcccgcgtggccctcatcctccaaaacgtggacctgccaaat

SEQ ID NO: 12705 - DNA, 2106 bp, synthetic construct
  misc_feature 1..2106: note = source = /note="Description of Artificial Sequence: Synthetic coding sequence"
  source 1..2106: mol_type = other DNA
atggccgcccctatgactcctgccgctagaccagaagattacgaggcagcgctcaacgccgcccttgcagatgtgccggaactggcaagactgctggagatcgatccatacctgaaaccgtacgcggtggacttccagcgcaggtacaagcagttttcgcagatcctgaagaacatcggtgaaaacgagggcggcatcgacaagtttagccggggttacgagtcgttcggcgtgcacaggtgcgcggacggtggcctgtactgtaaggaatgggcgcctggagcagagggagtctttctcaccggggacttcaacggatggaaccctttttcgtacccgtacaagaaactggattacggaaagtgggaactgtacattccacctaagcagaataagtctgtgctcgtccctcacggatccaagctgaaagtggtgatcacctcaaagtcgggagaaattctttaccgcatcagcccctgggccaaatacgtcgtgcgggaaggggataacgtgaactacgactggatccattgggacccggagcactcttacgaattcaaacactcgcgtcctaagaagccccggtcgcttcgcatttacgaatcgcacgtgggcatcagctcccatgagggcaaagtggcatcgtacaaacactttacgtgcaacgtccttccgcgcatcaagggactcggttacaactgtatccagctgatggcgatcatggaacacgcgtactacgcttcatttggataccagatcacctcattcttcgcggcctctagtcggtacgggactccggaggagctccaggaactggtcgataccgcccacagcatgggaattatcgtcctgctggacgtggtccactcccacgcatccaaaaactcggccgacggcctgaacatgttcgatggaactgactcgtgctacttccattccggcccccgcggaacccacgacctgtgggactccaggctttttgcctactcaagctgggagatcctgaggttcctcctgtctaacattcgctggtggctggaggagtacagatttgatggcttccggtttgatggagtgacgtccatgctctaccatcatcacggagtgggacaaggattctcgggagactactcggaatactttggactgcaggtcgacgaagatgccctgacctacttgatgcttgcaaaccatcttgtgcacactctctgcccggattcaatcaccatcgcagaagatgtctccggtatgccggcactctgcagcccgatctcccaaggtggcggtggattcgactaccggttggcgatggcgatcccagacaagtggattcaacttctcaaagaattcaaggacgaagattggaatatgggagacatcgtgtacactctcaccaacagacggtacctggagaagtgcatcgcctacgccgaaagccacgatcaggcacttgtcggcgataagtcgctcgctttctggctgatggacgccgaaatgtacactaatatgtcggtcctgactccgttcacccccgtgatcgatcgcggcattcaactgcacaagatgatccggctgatcactcacggactgggaggagagggttatttgaacttcatgggtaacgaattcggacatccggagtggctcgattttccaagaaagggcaacaatgagtcctatcactacgcgcgcagacagtttcatcttactgatgacgatctcctgcgctacaagtttctgaacaacttcgatcgggacatgaatcgcctggaagagcgctatggatggctcgctgccccgcaggcctacgtgtccgagaaacatgaagggaacaaaatcatcgccttcgaacgcgccggcctcctgtttatcttcaactttcacccatctaagtcctacactgattaccgggtgggtactgcgctgcccggcaaattcaaaatcgtgctggatagcgatgccgccgagtacggggggcaccaacgcctcgaccattccaccgacttcttttccgaagcgttcgaacacaacggaaggccgtacagcctcctggtgtacatcccatccagagtcgctctgatcctgcagaatgtggacctccccaac

SEQ ID NO: 12706 - DNA, 2106 bp, synthetic construct
  misc_feature 1..2106: note = source = /note="Description of Artificial Sequence: Synthetic coding sequence"
  source 1..2106: mol_type = other DNA
atggcggcacccatgaccccagcagcacggccagaagactatgaagctgctctcaatgccgccctggctgacgtccccgagcttgcacggctgctggagatcgacccttacctgaaaccttacgctgtggactttcaacggcgctacaagcagttctcgcagatcctgaagaacattggcgaaaatgaagggggcattgataaattttctcgcggatatgagtcttttggtgttcaccggtgcgccgacggcggactctactgcaaggagtgggccccaggggcagaaggcgtattcctgaccggcgatttcaatgggtggaacccattttcttacccatataagaagctagactatggcaaatgggaattgtatattccccctaagcaaaataagagcgttttggtgcctcatggctcaaaattgaaggttgtaattacaagcaagtctggtgagatactgtaccggataagcccttgggccaagtatgtggttcgggaaggtgacaatgttaactatgattggattcattgggatcctgagcactcctatgaatttaaacactctcgacccaaaaaaccacggagtcttcgcatttacgaatcgcacgtggggattagctcccacgagggtaaagtggccagctacaagcatttcacttgtaacgtactgccacggatcaagggcttggggtacaattgcatccagctcatggcaattatggaacatgcatattacgcgagttttggttaccagatcacctcttttttcgccgccagctctcgctatggcacacccgaggagttgcaggaacttgtggatacagctcattctatgggtatcatcgtattacttgatgtggtgcatagccatgccagtaagaactccgccgatgggctcaacatgtttgacgggacagattcctgctatttccattctggccctcggggaacccacgatctgtgggacagcagactgtttgcctacagctcatgggagatcctgaggtttctgctctctaacattaggtggtggctagaagagtaccgcttcgatggctttcgattcgacggggtgacctctatgctgtatcatcatcacggggtcggacagggctttagtggcgactacagcgaatatttcggcctgcaggtggatgaagacgcactcacctacctgatgctcgccaatcaccttgtgcacaccttgtgtcccgacagcataaccatcgccgaagatgtaagcggtatgcctgctttatgctctcccatctcccaaggcggaggcggtttcgattatcggctcgcgatggcgatacctgacaaatggatccagctcctgaaggaatttaaggatgaagattggaacatgggagacattgtgtataccctgactaaccggcgctatctggagaagtgtattgcatatgcagagtcgcatgaccaggccctggttggcgataaaagcttggccttctggttaatggacgctgagatgtataccaacatgtctgtcctgacacccttcacccctgtgatcgaccgaggaattcaacttcacaagatgattaggctgattacccatgggctgggcggcgaaggctatctgaattttatgggaaatgagtttggtcatcctgaatggctcgattttccgaggaagggcaacaacgagtcctaccactatgctcgcagacagttccatctgactgacgacgatctacttcgctataaattcctgaataattttgatcgcgatatgaatcggctcgaggagaggtatggttggctggctgcccctcaggcatatgtctccgagaaacatgagggcaacaagattattgcttttgagcgcgccggacttctgtttatctttaatttccatccctccaaaagctacactgattacagggtcggaactgccttgcccgggaagtttaagatcgtcctcgatagtgatgccgcggaatatggtggccatcagcggcttgaccattccacggactttttttccgaggcctttgaacacaatggccggccctacagcttgcttgtatacataccttcaagagtggctcttatactccagaatgtggatctgcctaac

SEQ ID NO: 12707 - DNA, 2106 bp, synthetic construct
  misc_feature 1..2106: note = source = /note="Description of Artificial Sequence: Synthetic coding sequence"
  source 1..2106: mol_type = other DNA
atggcagcacctatgacgcctgcggccagacctgaagattacgaggcagcactcaatgccgcccttgccgatgtccccgaactggctcggcttttggaaattgatccatacctcaagccatacgccgtcgatttccagcgcagatacaagcagttcagccagatccttaagaacattggtgagaacgaaggcgggattgataagttctcgaggggctacgaatcctttggggtgcatcggtgtgcagacggcggtttgtactgtaaggaatgggcaccgggtgcagaaggggtgttccttaccggagatttcaatggatggaacccattttcctatccatacaagaagctcgattacggcaagtgggaattgtacatcccgccaaagcaaaacaagtcggtccttgtgcctcatggatcgaagctgaaggtcgtcatcactagcaaatccggtgaaatactctaccgcatctctccgtgggcaaaatacgttgtgcgggaaggtgacaacgtgaactacgactggatacattgggatccagaacattcctatgagttcaagcactcacggccaaaaaagcctcggtcactcagaatttacgagagccacgtgggcatatcgtcgcatgaaggtaaggtggcaagctacaagcattttacgtgtaacgtgctgcccagaattaagggacttggttataactgcattcagctcatggcaatcatggagcatgcatactacgccagctttggataccaaatcacctcgttttttgcagcttcgtcacgatacggtacccctgaagaactccaagaactggtggacaccgcccattcaatgggtattatcgtgctgctggatgtggtgcattcgcatgcatcaaagaacagcgccgacgggctgaacatgtttgatggcaccgatagctgttactttcatagcggccctaggggtactcacgacctctgggactcaaggctgtttgcctactcctcctgggagatactgcggtttctgcttagcaacattcggtggtggcttgaggaataccggtttgatggattccgtttcgatggagtgacgtcgatgctttaccaccaccatggagtcggtcagggattttcgggggactactccgagtattttggactccaggtggacgaagatgcactcacttacctcatgctcgcaaatcatctcgtgcatactctttgtcccgactctattactattgccgaagatgtttcagggatgccggcgctgtgttcgccgatctcgcaaggaggtgggggttttgactacagactggcaatggcaatccctgataagtggattcagctgttgaaggagtttaaggatgaagattggaacatgggagacatcgtgtacacgcttactaataggcgttaccttgagaagtgcattgcctacgcagaatcccatgatcaggcgctggtaggcgacaagtccttggcattttggttgatggatgcagaaatgtacaccaacatgtcggtccttactcccttcactcccgtcattgatcggggcattcaactgcataagatgattcgacttatcacccacgggctcggaggtgagggatacctgaacttcatgggcaacgagtttggccatccagagtggctggattttccaagaaaaggcaataacgagagctaccactacgcacgtaggcaattccatttgacggacgatgatttgcttcgttacaaatttctgaacaactttgacagagacatgaataggctcgaagaacgctacggttggctggccgcaccacaggcttacgtgtcggaaaagcatgaaggaaacaagatcattgcatttgaaagagcaggtctgctcttcatattcaattttcatcctagcaagtcgtacaccgactaccgtgtgggtactgcgcttcctggcaagttcaaaatagtgcttgatagcgacgccgctgagtacggtggtcaccaaagactcgaccattccaccgactttttctcggaggcatttgaacacaacggacggccctactcactgcttgtgtacataccttcgagggtggcactgattctgcaaaatgtggatcttccaaac

SEQ ID NO: 12708 - DNA, 2106 bp, synthetic construct
  misc_feature 1..2106: note = source = /note="Description of Artificial Sequence: Synthetic coding sequence"
  source 1..2106: mol_type = other DNA
atggccgcccccatgacacccgccgctcgcccggaggactatgaggccgctcttaatgcagcactcgcggatgtgccagaacttgctaggctgttggaaatcgatccttacctgaagccttacgcagttgattttcagcgccgatataagcagttcagccagattttgaagaacatcggtgagaacgagggggggatcgacaagttttctcggggttatgaaagcttcggcgtgcataggtgtgcagatggtggcctgtactgtaaggagtgggcccctggcgcggaaggggtttttctgactggggatttcaacggctggaacccgttctcctacccttataaaaagctggattatgggaagtgggagctgtatatccccccgaagcagaacaagagcgtgctggtccctcatgggtcaaagctgaaagtggttatcacatctaagagtggcgagatcctgtaccgcatatctccatgggcaaaatatgtggtccgcgaaggagataacgtgaactatgactggatccattgggaccccgagcactcttacgagttcaagcactcacggcctaaaaagcctcgttctttgcgcatctatgaaagccacgtcggcatctcctcccacgagggaaaggtggcatcttacaagcatttcacatgtaacgtgcttccacgcatcaaaggcctcggctacaattgcatccagctgatggccattatggagcacgcatactacgcgagttttggttatcaaatcacctctttttttgcagcaagcagtcgttacgggacccctgaagagctccaggagctagtggatacagcacacagcatgggcatcattgtcttgttggatgtagtgcactcccatgcgagcaagaatagtgcagacgggctgaacatgttcgatggcacagatagctgctacttccacagcggcccaagaggtacacacgatctctgggattcaaggctttttgcatactccagttgggagattttacgttttttgctttcaaacatacgctggtggctggaagagtaccgtttcgatgggttccgcttcgacggcgtgacatctatgttgtaccatcaccacggcgtaggccaggggttctctggggattatagcgaatatttcggtctgcaggttgacgaggatgctctcacttatctgatgctggcaaaccacctggtccacacattatgtcccgatagcataacaatcgcagaggatgtgagtgggatgcctgccctgtgcagccccatcagccaagggggtggcggttttgactatcggttggctatggcgatccccgacaagtggattcagctcctgaaagagtttaaagatgaggactggaacatgggggacatcgtgtataccctgactaacagacgctacctggaaaagtgcatcgcgtacgcagaaagccatgatcaagcacttgtgggggataaaagcctcgccttttggcttatggatgctgaaatgtatacaaacatgtcggtgctgactccttttacacccgtgattgacaggggtatccaactgcacaagatgatccggttgattacacatgggctggggggtgaggggtatctgaatttcatgggaaatgaattcggtcatcccgaatggcttgattttccacggaaaggaaataacgagtcttaccactatgcacgaagacagttccacctcaccgacgatgacctgctgaggtataaattcctcaacaactttgacagggatatgaaccggcttgaagaacgttatggttggcttgccgctccacaggcttacgtgtcagagaagcacgaaggaaacaagatcattgcattcgagcgagctggattactcttcattttcaatttccatccctcaaagtcatacacagattatagagtcgggaccgccctccctggtaagttcaaaatagttctggatagtgacgctgctgaatacggcggacaccaacgccttgatcattctactgatttcttcagcgaggcctttgaacacaatggacggccttacagtctcttagtctacattccgagtagggtggctttgatacttcagaacgtggacctgcccaac

SEQ ID NO: 12709 - DNA, 2106 bp, synthetic construct
  misc_feature 1..2106: note = source = /note="Description of Artificial Sequence: Synthetic coding sequence"
  source 1..2106: mol_type = other DNA
atggcagctccaatgacaccagccgctaggccagaggattacgaagccgctttgaacgctgctctcgccgacgtgcctgaattggcaaggttgctcgaaatcgatccttacctgaagccctatgctgttgattttcagaggaggtacaagcagtttagccagattctgaagaatattggcgagaatgagggcggcatcgacaagttcagcaggggttacgagtcattcggtgtccacaggtgcgccgatggcggcttgtattgcaaggaatgggccccaggtgccgagggagtgttcttgactggcgacttcaacggttggaaccctttctcttacccctataagaaacttgactacggaaagtgggaactttacattcccccaaagcagaacaagtcagtactcgtcccgcatggatccaagctgaaagtggtgattacttctaaatctggagagatcctgtatcgcatctccccttgggcaaaatatgttgtgcgcgaaggagacaacgtgaactacgactggatccattgggacccggagcacagttatgagtttaagcatagcagacccaagaagccccgcagcctgaggatttatgaatctcatgtgggaatctcctcccacgaaggtaaagtagcaagctacaaacactttacatgtaacgttctgccccgcattaagggactgggctacaattgcattcagctgatggcgattatggagcatgcttattacgcatcctttggatatcaaatcacgagcttctttgccgcttcctccagatatggcacgcccgaggagttgcaggaactcgtcgacacggcacactccatgggcatcattgtgctgttggacgtggtgcacagccacgcgtctaagaattccgctgacggtctcaacatgtttgacggaactgactcctgttattttcatagcggcccaaggggtacacatgatctgtgggatagccgcctttttgcgtactcctcttgggaaatccttaggttcctgttgtctaatatccgctggtggttggaggagtatcgcttcgacggcttcagattcgacggagtgacatctatgctttatcaccaccacggtgttggacagggtttcagcggcgactacagcgagtacttcggcttgcaagtagatgaagatgccttgacttatctgatgctcgccaaccacctggtgcacactctgtgtcctgactctattacaatagcagaagacgtttcaggcatgccggccttgtgtagcccaatctcccaaggaggaggaggttttgactaccgccttgccatggctattcccgataaatggattcaacttctcaaagagttcaaggacgaggattggaacatgggagacattgtttatacactgactaatcgccgctatctggagaagtgcattgcctacgctgagtctcacgatcaggctttggtcggcgacaagtcacttgctttctggcttatggacgccgagatgtacacaaacatgtccgtgctgacccctttcaccccagtaattgacaggggcattcagctgcataaaatgatcagactcatcacccatggtctgggaggcgagggatatctcaatttcatgggaaacgagttcggacatcccgaatggttggatttcccgagaaaaggtaacaacgaatcataccactacgctaggagacaattccacctcacagacgatgatctgcttagatataagttcctgaacaacttcgacagagatatgaaccgcttggaggaaagatacggatggcttgcggctccccaggcttacgtttccgaaaaacacgaaggaaataagataatcgctttcgagagagcaggtctgctctttatattcaactttcaccctagcaaaagctacacggactatagggtgggtactgcgctgcctggcaagttcaagattgtgctggacagcgacgcggccgagtacggcggtcaccagaggttggaccatagcactgattttttctccgaagccttcgagcacaatggcaggccctatagtttgttggtatacatcccgtctcgcgtggcccttatcctgcagaacgttgacctcccgaat

SEQ ID NO: 12710 - DNA, 2106 bp, synthetic construct
  misc_feature 1..2106: note = source = /note="Description of Artificial Sequence: Synthetic coding sequence"
  source 1..2106: mol_type = other DNA
atggccgcaccaatgaccccagcagcacgccctgaagattacgaagccgcacttaacgccgctttggcggatgtgccagaactggcgagactgcttgaaattgatccatacctcaagccatacgcagtcgattttcaacgaagatacaaacagtttagtcagattctgaagaacatcggggaaaatgagggaggtattgataagttttcgcgcggttacgaatccttcggtgtgcatcggtgtgcagacggcggcctgtactgcaaggagtgggcccccggagcggaaggagtgtttctcaccggcgatttcaacggatggaatccattctcgtatccttacaagaaactggattacggcaaatgggaactgtatattccacccaagcagaacaaatccgtcctggttccgcatggatctaaacttaaagtggtcatcacttcgaagtccggggagatcctctatcgcatttcgccatgggccaaatacgtggtgcgggagggagataacgtgaattacgactggatccattgggatcctgaacactcctacgaattcaagcactccaggcctaagaagccaagatcactccgcatttatgaatcgcacgtgggaatttcctcgcacgaagggaaagtggccagctacaagcattttacctgcaatgtgctgcctaggattaagggacttggttacaattgtattcagcttatggcaatcatggaacatgcttactacgcttcatttggctaccaaattaccagcttttttgcagcatcgtcacggtatggaacgcctgaagagctgcaggaattggttgataccgcacactccatgggcataattgtgctgcttgatgtggtgcacagccacgcttccaagaactcagcggatggactgaatatgtttgacggcactgacagctgctactttcactcagggccgagagggactcatgatctttgggattcacgtttgttcgcctacagctcctgggaaattctccgcttcctgctgtccaatattcgttggtggctggaagaataccggtttgacgggtttcggtttgatggtgtcacttcgatgctttaccatcatcatggtgtggggcaagggttctcgggtgattactcggaatacttcggcctccaagtggatgaggatgcccttacctacctcatgctggcaaatcatctggtgcacactttgtgtcctgactcgatcacgatagcagaggacgtgtcgggtatgcctgcgctctgttccccaatttcgcaaggcggaggcggctttgactaccggctcgcaatggcaattccagataagtggatccagcttcttaaggaattcaaggacgaggactggaacatgggagacatcgtttacacgcttaccaacagacggtaccttgagaagtgcattgcttacgcagagagccacgatcaggcacttgtcggagataagagcctggcattctggcttatggatgccgagatgtacaccaacatgtcggtccttactccctttactcccgtgattgatcgggggattcagcttcataagatgatccggcttattactcatggactcgggggtgaaggatacctgaatttcatgggcaatgagttcggccatcctgagtggcttgattttcccagaaagggcaataatgaatcctaccattacgcgcgaaggcaatttcatctcactgacgacgaccttctcaggtacaagtttttgaataactttgacagagatatgaatcgcctggaagaacgttatggttggctggcggctccacaggcatacgtcagcgagaaacacgaaggtaacaagatcatcgccttcgaacgagcagggctccttttcattttcaattttcatccatcaaaatcgtacactgattacagagtgggtaccgcgctgccaggaaagtttaagatcgtgctggattctgatgcagcagaatacggcggacatcagcgcctcgatcatagcactgatttcttctcggaagcgtttgaacataacggacggccctactcactgcttgtttacatcccttcgagggttgcgctcatcttgcagaacgtcgatctcccgaat

SEQ ID NO: 12711 - DNA, 2106 bp, synthetic construct
  misc_feature 1..2106: note = source = /note="Description of Artificial Sequence: Synthetic coding sequence"
  source 1..2106: mol_type = other DNA
atggcggcaccaatgacccccgcggctcggccagaagattacgaggcagcacttaacgccgcacttgcagacgtgcccgaacttgcgcgccttcttgaaatcgacccttacctcaagccttacgccgtcgattttcaaagacggtataagcaattctcacagattctgaagaacatcggtgaaaacgagggagggattgataagttttcccggggttacgaatccttcggagtgcaccgttgtgcagacggcggcctttactgtaaggaatgggcaccaggagcagaaggtgtctttctcaccggtgacttcaatggatggaaccccttctcctacccctacaagaagctcgactacgggaagtgggagctctacattcctccaaagcaaaacaagagcgttctcgtccctcacggatcgaaattgaaagtcgtcattacttcgaagtcaggtgaaatcctttaccgtatttcgccttgggccaagtacgtcgtgcgtgaaggagataacgtcaactacgattggattcactgggatcccgagcattcctatgagtttaagcattcgcgccctaagaaaccacggtccctccgtatctacgaatctcatgttggtatttcctcccatgaaggaaaagtggcaagctacaagcactttacttgtaacgtgctgccacggattaaaggactgggatacaactgcattcagcttatggcaatcatggaacatgcatactacgcatcattcggttaccaaattacgtcattctttgcagccagctcacggtacggaacccctgaagaactccaggagctggtggataccgcacattccatgggcattattgtgctgcttgatgtggtgcatagccacgcatcgaagaattcggcagatggactcaacatgtttgacggcacggactcctgctactttcattcaggcccgagaggaacccatgacctctgggactcgagactgttcgcatactcctcgtgggagattttgagatttctgctttccaacatccgatggtggctggaagagtacagatttgatggttttcgatttgatggagtgacttcgatgctttaccatcatcacggcgtcggtcaaggattttccggagattacagcgaatactttgggctccaagtggatgaagatgcccttacctaccttatgcttgccaatcacctggtccatactttgtgcccagactccattaccatagcagaggatgtgagcggtatgccagcactgtgttcgcctatctcccaaggtggtggtggttttgattacagattggccatggcaatcccggataagtggatccaattgctgaaggagtttaaggatgaggattggaacatgggcgatatcgtgtacactctgactaaccgacggtaccttgaaaaatgcattgcgtacgcggaatcacatgaccaggcactcgtcggggataagtcgcttgccttttggcttatggatgctgaaatgtacactaatatgtcagtgctgaccccttttacgccagtcattgaccgcggaattcagctgcacaagatgattcggctgatcacccatggattgggcggtgaaggttaccttaactttatgggaaacgaatttggacatcccgaatggctcgattttccacggaagggtaataacgaatcataccactacgcgcgacgccagtttcacttgacggatgatgatctgctccggtacaagttcctgaataacttcgatagagatatgaatcgactggaagagcgatacggttggcttgccgcaccgcaggcatacgtctccgaaaagcatgaaggaaacaagattatagctttcgaacgtgccggtctgttgttcattttcaacttccatccatcgaaatcctacaccgactatagagtgggaactgccctgcctggaaagtttaagatcgtcctggattccgatgcagcagaatatgggggacatcagcgtctggatcatagcaccgacttcttttcggaagcctttgaacacaatgggcggccatactcgcttttggtgtatataccgtcaagggtcgcccttatcctgcaaaacgtggatctcccgaat

SEQ ID NO: 12712 - DNA, 2106 bp, synthetic construct
  misc_feature 1..2106: note = source = /note="Description of Artificial Sequence: Synthetic coding sequence"
  source 1..2106: mol_type = other DNA
atggccgctccgatgaccccggctgcccgccctgaagattacgaagccgcgcttaacgccgccttggccgacgtgccggaactggcccggctgcttgagatcgacccgtatctcaagccctacgccgtggacttccagcgcagatacaaacaattctcgcagatcctgaaaaacatcggcgaaaacgaaggaggaatcgataagttcagccgaggatacgaatcatttggtgtccacagatgtgcggacggcgggctgtactgcaaggaatgggctccgggcgcagaaggagtgtttctcacgggggatttcaatggatggaatcctttctcctacccttacaagaagctcgactacggaaagtgggaactctacatcccgcctaagcaaaacaagtccgtgctggtgcctcatggaagcaagttgaaggtcgtgattacgtcaaagtcgggcgagattctctatagaatctccccgtgggccaaatacgtggttagggaaggggacaacgtgaactacgactggatccactgggacccggagcatagctacgagttcaaacactcccggccgaagaaaccaagaagtctgcgcatctacgagtcgcatgtgggaatttcatcccacgagggtaaagtggccagctacaagcacttcacctgtaacgtcctcccgcgtatcaaggggctcggatacaattgcatccaactcatggcgatcatggaacatgcctactacgcgtccttcgggtaccagatcacgtccttctttgctgcctcgagcagatacggaactccggaagagctgcaggaactggtcgacactgcccattcgatgggaatcatcgtcctgctcgacgtggtgcattctcatgcatccaagaactcggccgacggactcaatatgtttgatggcaccgattcatgctactttcactcaggcccccggggtactcatgacttgtgggacagcagactgttcgcctactcctcatgggagattctgagattcctgctgtccaatatccgctggtggctggaagaatacaggttcgacgggttccggttcgatggcgtcacctcgatgctgtaccaccaccacggcgtgggccagggattttcgggagactactcagagtacttcggacttcaggtggacgaggatgctctcacttacctcatgctggctaaccacctcgtgcataccttgtgtccggattcaataaccatcgcagaggatgtttcaggtatgccggctctctgctcaccgatttcacaaggagggggaggcttcgattaccggctggcgatggccatcccggacaagtggatccaattgctgaaagaattcaaggacgaggactggaacatgggggacatcgtgtacaccttgactaaccggcggtacctcgagaaatgtatcgcatacgcagagtcccacgaccaagcgctggtgggagataaatcgctggcattctggctgatggatgcagaaatgtacactaacatgtcagtcctgaccccgtttaccccggttattgatcgcggaatccagctgcacaagatgatcagactcatcactcacgggttggggggcgagggatacctgaatttcatggggaacgaatttggccatcctgagtggttggattttccaagaaagggcaataatgaatcgtaccattacgcacggcggcagtttcacctgactgatgacgatttgctgaggtacaagttcctgaacaattttgacagggatatgaaccggctggaggagcgctacggctggttggcggccccacaggcgtacgtgtcagagaagcatgaaggtaacaagatcatcgcatttgagcgggccggtctgcttttcatcttcaatttccacccgagcaaaagctacaccgactaccgcgttggtacggccctgccgggtaagttcaaaattgtcctggactccgacgccgcggagtacggaggccaccagaggctggatcattcgactgacttctttagcgaggctttcgaacataatggcagaccttactccctgctggtgtacatccctagcagggtggccttgatcctccagaatgtcgaccttccgaat

SEQ ID NO: 12713 - DNA, 2106 bp, synthetic construct
  misc_feature 1..2106: note = source = /note="Description of Artificial Sequence: Synthetic coding sequence"
  source 1..2106: mol_type = other DNA
atggccgctcctatgacaccagccgccaggcctgaagactacgaagcggcgttgaatgctgctctggctgacgttcctgaactggccagactgcttgagattgacccttacctgaaaccctacgccgtcgattttcagcgcaggtataaacagtttagccagatactgaagaacattggtgaaaatgagggtggcatagataagttctcccgcggttacgaatcatttggcgtacatcgctgtgcggacgggggactgtactgcaaggaatgggcacccggcgccgagggggtgttcctaaccggggactttaacggatggaatccttttagctatccttacaaaaagctcgattacgggaagtgggagttatatatcccccccaaacaaaataagtccgtcctggttcctcatggcagcaagcttaaagtggtcattacgtcaaaaagcggggaaattctttacaggatttccccatgggctaagtacgttgtgagggaaggtgacaacgttaactacgactggatacattgggacccagaacactcttacgaatttaagcactcgcgtccgaaaaaaccgaggtcactgagaatttacgagtcgcacgtgggtatttcttcgcatgaagggaaagttgcttcttataaacattttacatgcaacgtccttcctcggatcaagggcctgggatataactgcatccagttgatggctatcatggaacacgcttactatgcgtccttcggctaccagataacatcatttttcgcggcttcctcccgctatggcactcccgaggagctgcaggaattggtcgacacggcccactccatgggcatcattgtccttcttgatgtggttcacagccacgcttccaaaaattctgccgatgggctcaacatgttcgatggtactgactcgtgttactttcattcaggccctcgcggcacccacgacctctgggattctcgtctgttcgcttattcttcatgggaaattttgaggttcctgttgagtaacatacgctggtggctggaagagtaccggtttgatggtttccgcttcgacggagtaacaagtatgctgtaccaccaccacggcgtgggccagggattttctggcgactactctgagtattttggacttcaggtcgacgaggatgccctgacatatctcatgctggccaaccaccttgtgcacactctgtgccctgactctatcacaatcgccgaggacgttagcggaatgcctgccctgtgcagcccaatcagccaggggggaggtggttttgattatagactggcaatggcaatccccgacaaatggatccagctgctgaaagagtttaaggacgaggattggaacatgggcgacattgtttacacactgaccaaccggcgttatctagagaagtgcatagcctatgcggaatcgcatgaccaggcgttagtgggcgataagagtctggcattctggctcatggacgcggagatgtacacgaatatgtctgtgctaacaccgtttacccccgtgatcgatagaggcattcagctacataagatgatacgcttgattactcatggcctcgggggcgaagggtatctgaatttcatgggcaatgaattcgggcacccggagtggttggattttcccaggaaaggaaacaatgagagctaccactatgcccggaggcaattccatctgacagacgatgacctgcttcggtacaagttcctcaacaactttgaccgggacatgaatagattggaagaacgctacgggtggctggcggcgcctcaggcttacgtttccgagaagcacgaaggaaacaagattattgcgtttgagagggcagggctgctgttcatcttcaatttccacccatcaaaatcctatacggattaccgggtggggaccgcactgcccggcaagttcaaaatagtgctggactcagacgccgcagagtacggaggccaccagagattggaccatagcacggactttttctctgaagcctttgaacataacggtagaccttactctctgctagtctacatcccgtcccgcgtcgctctgatcttgcagaacgtcgacctccctaat

SEQ ID NO: 12714 - DNA, 2106 bp, synthetic construct
  misc_feature 1..2106: note = source = /note="Description of Artificial Sequence: Synthetic coding sequence"
  source 1..2106: mol_type = other DNA
atggccgcgcccatgacaccggccgctagaccggaagactatgaagctgccctgaacgcagccctggcggatgttcctgagctggctaggctgttagaaatcgatccatatctcaaaccttacgcagttgacttccagagacggtataaacagttttctcaaattctaaaaaatatcggagaaaacgagggggggatcgacaagttctctcgtggctacgagagcttcggagtgcacagatgtgctgacgggggtctgtactgtaaagaatgggccccaggagcagaaggcgttttcctgactggcgattttaacggctggaatccattttcctacccttacaaaaagctggattatgggaagtgggagctgtatattccgcccaagcaaaataaatcagttctggttccccatggaagtaagctgaaggttgttataacctctaaatcaggtgaaattctgtatcggatcagcccctgggctaagtacgtagtcagagagggtgacaatgttaactatgactggatccactgggacccagaacattcatacgaatttaagcacagtcgacccaagaaaccccgaagtttgcgaatctacgagagccatgtgggaatctctagtcatgaggggaaagttgcctcctataaacattttacctgcaatgtcttgccacgcataaagggacttgggtataattgcatccagcttatggcgattatggagcatgcttactatgcttcctttggttatcagatcaccagcttctttgccgcctcaagtaggtacggaaccccagaagagctccaggaattagtggatacggcacattctatggggatcattgtgcttctggacgtggttcatagtcatgcttccaagaattccgcagacggtctgaatatgttcgatggcaccgattcttgttattttcattcaggccctaggggcactcacgacctgtgggattctcgactgttcgcctactcatcatgggagattttacgatttcttctgtcaaacattcgttggtggctagaggaatacagattcgacggatttaggtttgatggcgtgacctcaatgctgtatcaccatcacggtgttggtcaggggttttccggagactactcggaatattttggactgcaggttgatgaagatgccttgacctacctaatgttggcaaaccaccttgtgcatacgctgtgtcctgattccattacgatagccgaagatgttagcgggatgccagcgctgtgtagtcccatctcccagggaggcggtgggtttgactatcggctcgccatggctataccggataagtggattcagctgctcaaggagttcaaagacgaagactggaacatgggcgacatcgtctatacattaacgaatagaaggtacttagaaaaatgtatcgcatacgcggagtcccacgatcaagccctggtcggagacaagtcattggcattctggcttatggacgctgaaatgtatactaatatgtcggtcctgactccttttacccctgtcatcgatcgaggcatccagctacacaaaatgatccggctaattactcatggactaggaggagaagggtatctgaattttatgggtaatgagttcgggcacccagaatggcttgacttcccacgaaagggcaacaatgagagttaccattatgccagaaggcagtttcacctgacggatgacgacttgctgcgatataaatttctgaacaattttgaccgggatatgaataggctcgaggaaaggtacggatggctagcagcaccccaagcgtatgtcagcgaaaaacatgagggcaataagatcatagcgttcgagagagctggcttgctcttcatcttcaactttcacccgtccaaaagctacaccgactaccgagtgggcacagctctaccagggaaatttaagatagttctggacagcgacgcggccgaatacggtggccaccagcgactcgatcactctactgacttcttctctgaagcgttcgagcacaatggccgaccctatagtctactggtatatatccctagtcgagtggccctgatcctacaaaacgtggatttacctaac

SEQ ID NO: 12715 - DNA, 2106 bp, synthetic construct
  misc_feature 1..2106: note = source = /note="Description of Artificial Sequence: Synthetic coding sequence"
  source 1..2106: mol_type = other DNA
atggccgctcccatgacccccgccgcaagacccgaagattatgaggccgccctgaatgccgctctggccgacgtgccggaactggctaggttgcttgagattgatccctatctcaagccttatgctgtggactttcagcggagatacaaacagtttagccagatccttaagaatatcggagaaaacgaaggcggaattgacaaattttctaggggatacgagagcttcggtgtgcataggtgcgccgacgggggcctgtattgcaaagaatgggcgcctggtgcggagggcgtttttctgaccggcgatttcaatggctggaaccctttttcttacccgtacaagaagttggactatggaaagtgggagctgtacatcccccccaagcaaaataagtcggtgcttgttccgcacggaagtaagctaaaggtagtgatcacatcaaagtcaggcgaaatattgtatcgcatctctccttgggctaaatatgtggtgagagaaggcgataatgtgaactacgactggattcactgggaccctgagcacagttatgaatttaaacattctagaccaaaaaagcctagatccctccgaatctacgagtcccacgtgggtatcagttctcatgaggggaaggtggcttcctacaaacatttcacttgtaacgtcctgccacgaatcaagggcctgggatacaattgtatccagttaatggctattatggaacacgcatactatgcctccttcggttaccagatcacgagctttttcgcagcctcaagcaggtatggcacacctgaggaacttcaggagcttgttgatactgcccactctatggggatcatcgttctcttggatgttgtgcactctcacgcaagtaagaactcagctgatggattaaacatgttcgatggtacagatagttgttatttccattccggcccacgagggactcacgatctgtgggacagcagactatttgcgtactcttcttgggagatactgaggttcttgctgtcaaacattaggtggtggctggaagaatatagattcgacggttttcgattcgatggagtgacgtccatgctgtaccaccatcacggcgttggccagggcttttcaggggattacagcgaatacttcggactccaggtagatgaagacgccctcacatacctgatgctggccaaccatctggtgcacaccctctgcccggattcaatcactatcgctgaggacgtcagtgggatgcctgcactctgctcccccatctcacaggggggaggagggttcgactaccgacttgccatggccatcccagataagtggatccagctcctcaaggaatttaaagacgaagactggaacatgggcgatattgtgtacactctgacaaatcggaggtacctggaaaaatgtatagcttatgcggaatcccatgatcaggcgctggtgggagataaaagcctggcgttctggttaatggacgcagaaatgtataccaacatgtcggtcctcacacctttcactccagtaatagataggggaatacagttgcacaagatgattagactaatcacacatggcctggggggagaagggtatctcaatttcatgggcaatgaatttggccaccccgaatggctagacttcccacgtaagggcaacaacgaatcataccactatgcacgtcgtcagttccatctgactgatgacgaccttctgcgatacaaatttctcaataatttcgatcgagacatgaaccgattagaagagaggtatggctggttggccgccccgcaagcctatgtttctgaaaaacacgagggaaacaaaataatagcgttcgagagggccggcctattgtttatattcaatttccacccctctaaatcctatacagattacagagtcggtaccgcattaccggggaagtttaaaattgtgcttgactcagacgcagccgaatatgggggccaccagcgactggatcacagcactgacttctttagtgaagcatttgaacataacgggcgaccgtatagcctgttggtgtatattccatctagagtcgctctcatactgcagaatgtggacctgcctaac

SEQ ID NO: 12716 - DNA, 2106 bp, synthetic construct
  misc_feature 1..2106: note = source = /note="Description of Artificial Sequence: Synthetic coding sequence"
  source 1..2106: mol_type = other DNA
atggctgccccaatgacccccgcggcacggccggaggactatgaagctgcactcaacgcagctcttgctgacgtaccggaactcgccaggctgctggaaatcgacccatacctcaagccatacgcggtagatttccagcgtagatataaacagttttcccagattttgaagaacatcggggagaacgagggagggatagataaattcagtagggggtatgaatctttcggcgtgcatagatgcgctgatggaggcctctattgcaaagagtgggcacccggggccgagggagtgttcctgaccggcgacttcaacggttggaatcctttcagttatccctacaagaagctggactacggcaagtgggaactttatataccccccaaacagaataaaagtgtgttagtcccccacgggagtaagctgaaagtggtcattaccagtaagtctggcgaaattctgtacagaatttctccctgggctaagtacgtggttcgagaaggagacaacgttaattatgattggatccactgggatccggagcactcatacgagttcaagcatagcaggcctaaaaaacctcggtctttacgcatctatgaatctcatgtggggatatctagtcatgagggcaaggtggcaagttacaaacactttacatgcaacgtgttaccacgcatcaagggactgggatataactgtatccagcttatggccataatggagcacgcatattatgcttcctttggataccagattacatctttttttgctgctagttctaggtacgggacccccgaggaactgcaggagttggtcgacaccgcgcattcaatggggatcatcgtgctgctggacgtggtacactcgcatgcatcgaagaacagtgccgacggcctaaatatgttcgatggcacagactcatgttactttcattcaggacctagggggactcacgacctttgggattccaggctctttgcttactcgagctgggaaatcctgcggtttctgctttctaacattcgctggtggctggaggaataccgttttgacgggtttcggtttgatggagtgaccagcatgctataccaccaccatggcgttggccaaggttttagtggcgattacagcgagtacttcggtctccaggttgatgaagatgcactaacctatctcatgctggctaatcatctggtacatacactctgcccggattcaatcactattgccgaggatgtcagcggcatgcctgcactgtgttcccctatctcacagggggggggaggtttcgactacaggctcgctatggccatcccagataaatggatccaacttctgaaggaatttaaagatgaggattggaacatgggggacatcgtctacacactgacaaatcgccggtatctggaaaagtgtattgcctacgcagagtctcacgaccaagccctggtcggagataaaagccttgctttctggttgatggatgccgagatgtacaccaacatgagcgtgctcaccccgttcacgcctgtcatcgaccgcggaatccagctccacaaaatgattcggcttattacacatgggctaggtggcgaaggatacttgaactttatgggcaacgagttcggccacccggaatggctcgactttccccggaagggaaataacgaaagctatcattacgcccgccgccagttccacctcacagacgacgatctattgcgttataaattcttgaacaattttgatcgtgacatgaaccgactggaggaaaggtacggctggctcgccgcaccacaggcatatgtgtctgagaagcacgagggcaacaaaattatagccttcgaaagagccggcttgttattcatatttaactttcacccttcgaagtcctacaccgactaccgagtcggcactgccttgcccggcaaattcaagattgtgctggacagtgatgccgctgagtacggcggccatcaaaggctcgatcattcgacggacttttttagcgaagccttcgaacataatggtagaccctatagcttattggtgtatattccaagcagagttgccctgatccttcaaaacgtggatttgcccaat

SEQ ID NO: 12717 - DNA, 2106 bp, synthetic construct
  misc_feature 1..2106: note = source = /note="Description of Artificial Sequence: Synthetic coding sequence"
  source 1..2106: mol_type = other DNA
atggctgcaccaatgacacccgctgcgaggccggaggactatgaggcagccctaaatgctgccctggctgatgtgcctgagttagcccggttactggagattgacccctacctgaagccatatgcggtcgacttccaacgcagatacaagcagttttcacaaattctgaaaaatatcggggagaatgaggggggaattgataagttttccagagggtatgagagtttcggcgtgcatcgatgtgcggatggtggtctgtattgtaaggagtgggcacctggcgctgaaggggtttttctgaccggcgacttcaatggctggaatccattcagttatccgtataaaaagttggattacggaaaatgggaactgtacataccccctaagcagaataagagcgtattggtaccccatgggtctaagctgaaggttgtgatcacttccaagagcggcgagattctatatcggatcagcccctgggctaaatatgtggtgcgtgagggagacaatgtaaattatgactggatccactgggatcctgagcactcgtacgagttcaagcacagccgccccaagaaaccacgctcactgcgcatatacgagtcacacgtcggaatatcgagtcatgaaggaaaagtggcaagttacaaacactttacttgcaacgttcttcctcgaattaagggacttggatacaattgtatccagctcatggcgatcatggagcacgcatactacgcctcatttggctaccagataacatctttctttgcggccagttcccgatacggcactcctgaggaattgcaggaacttgtcgataccgcacacagtatggggatcatagtgctgttggacgttgtgcatagccatgccagtaaaaacagcgcagacgggctcaatatgtttgatggcacagactcttgttatttccattccggccctcgaggaacacacgatctgtgggacagtaggctttttgcctattcttcatgggaaatcctgagattcctcctgtctaacattcgctggtggttagaggaatatagattcgatggcttcaggtttgacggcgtgactagcatgctatatcatcatcacggcgtcggtcaagggttttcaggcgattattccgaatacttcggcctgcaggttgacgaggatgctctgacttacctgatgctggccaaccacctggtacacacgctttgtcctgattccatcacaatagcggaagatgtcagcgggatgcccgcgctgtgctcccctatatctcagggaggaggtggatttgattacaggctcgctatggccattcctgacaagtggattcagctgctgaaagagtttaaggacgaagactggaacatgggcgatatcgtctacacactgaccaatcgccggtatctcgagaaatgcatagcctatgccgaatcccacgaccaggccctggtgggggataagtctttagccttctggctcatggatgccgaaatgtataccaacatgtccgtcctgactcccttcacacccgtcattgatcgtgggatccagctccacaagatgattagacttattacgcacgggcttgggggggaggggtacctgaattttatgggaaatgagtttggacatcctgagtggctcgacttcccccgtaaaggtaataacgagtcataccactacgcacggcgccagtttcacctgaccgatgacgacctgcttcgctacaaatttcttaataattttgatagggatatgaatcgattggaggaaaggtacggatggctggcggccccccaagcatacgtgtctgagaagcacgagggcaacaaaattatcgctttcgaacgagccggcctgctgtttattttcaactttcaccccagcaaatcgtacacggactacagggtcgggactgcactcccggggaaattcaaaatcgtcttggattccgatgccgccgaatacgggggacatcaaaggttggaccattccactgactttttctccgaagcttttgagcacaatgggcgcccatactctctcttggtgtatatccctagtagggtggcgctgatactccagaacgtggatctacccaac

SEQ ID NO: 12718 - DNA, 2106 bp, synthetic construct
  misc_feature 1..2106: note = source = /note="Description of Artificial Sequence: Synthetic coding sequence"
  source 1..2106: mol_type = other DNA
atggcggccccaatgacgccggccgcaaggccagaagattacgaagctgcactgaacgccgctcttgcagatgtgcctgaactcgcaagacttctggagatcgacccttacttgaaaccttacgcagtggattttcaacgaagatacaagcagttttcgcaaatcttgaagaatattggagaaaatgaaggtggaattgataagttttccagaggctacgagtcgttcggggtgcataggtgtgcagacggcggactgtattgcaaggagtgggcgcctggtgccgaaggggtgtttttgactggtgacttcaacggttggaacccattctcctacccttacaagaagctcgattacggaaagtgggagctttacatacctcctaaacaaaacaagtccgtcctggtgccccacggttcgaaactcaaagtggtgatcacttcgaagtccggagagatactttataggatatcaccatgggcaaaatacgtggtcagagaaggggataacgtgaactacgactggattcactgggatcccgaacacagctatgaattcaaacacagccgccccaaaaagcccaggtcccttcggatctacgaatctcatgtcggtatatcctcgcatgaaggtaaggtggcctcatacaagcattttacttgcaacgtgctgccacgaattaaggggctgggctacaactgtattcagctcatggcgattatggagcatgcatactacgcatcattcggataccaaataacctcgttttttgcggcctcgtcgaggtacggtactcccgaggaactgcaagaactcgtcgacactgcccattccatgggaatcatcgtacttcttgacgtcgtccattcacatgcgtcgaaaaactcggcagatggactcaatatgtttgacggcacggattcctgttacttccattccggacctcgaggaactcatgacctgtgggactccagactgtttgcatactcctcgtgggaaattcttcgttttctcctttcgaacattagatggtggctggaggaatacagatttgatggattccggtttgatggcgtgacttcgatgctgtaccaccatcacggtgtcggacagggcttcagcggagattactccgagtactttggacttcaagtcgacgaagatgcactgacctaccttatgctcgccaaccaccttgtgcataccctgtgtccggattcaatcactatcgcagaagatgtgagcggaatgccggcactgtgttccccgatctcccagggagggggtggattcgactacagactggcaatggcgattccggataaatggatccaactgcttaaggaattcaaagatgaagattggaacatgggagatatcgtctacactttgactaacaggcgttaccttgaaaagtgtattgcttacgctgagtcgcatgatcaggcacttgtgggtgataagtcgcttgctttttggcttatggatgcagaaatgtacaccaacatgtcagtgctcaccccgttcactccggtcatagatagaggtattcagctgcataagatgatccggctgattacccatggacttgggggagagggatacctcaactttatgggtaatgaatttgggcatcctgaatggcttgacttcccgcgaaaaggtaacaatgaatcctaccattacgcacgtagacagttccacctgactgacgacgacttgcttagatacaagtttttgaataacttcgaccgggatatgaacagactggaagagagatacggatggctggcagcacctcaagcatatgtcagcgaaaagcatgaagggaataagatcattgcctttgaacgagcaggactgctctttatcttcaactttcacccaagtaagtcatacaccgattaccgtgtcggcacggcactgccagggaagtttaagatagttctcgattccgatgctgcagaatacggaggacatcaacgtctggatcattcgaccgacttctttagtgaagcattcgaacataacggtcgcccatactcgttgctggtctacattccttcacgcgtggcacttattctccaaaacgtggatctcccaaac

SEQ ID NO: 12719 - DNA, 2106 bp, synthetic construct
  misc_feature 1..2106: note = source = /note="Description of Artificial Sequence: Synthetic coding sequence"
  source 1..2106: mol_type = other DNA
atggcggcaccgatgacgccggcggctagaccggaagactacgaggctgccttgaatgcagccctagcggacgtaccggagcttgctaggttacttgaaattgacccgtatctcaaaccgtatgccgttgacttccagcgacgctataaacagttttctcagatattgaaaaacatcggagagaatgagggaggaatagataaattttctcgtggctatgagtctttcggggtacatcggtgcgcagacggagggttatattgtaaagaatgggcaccgggcgccgaaggggtatttctcacgggcgattttaacgggtggaatccgttttcctacccttacaaaaaactggactacggaaagtgggagctttacatccctccgaaacagaataagtctgtgttagtaccacatggatctaaattgaaagtcgtcattacgagcaaatccggggagattttatatagaataagcccatgggcgaagtacgtcgtcagagagggtgataatgtaaattacgactggattcattgggacccagaacactcctatgagttcaagcacagtcgcccgaagaagccgagatcattgcgaatatatgaatcgcatgtagggatctcatcacatgaaggtaaagttgcatcatataagcattttacatgcaacgtgttacccagaattaaaggcctgggatataattgtatccaattaatggccataatggagcacgcttattacgcttcttttggatatcagataacgagtttttttgcagcatcaagtcggtacggcacaccagaagaattacaggaactggtagatacagcccactctatgggaataatcgtcctgttagacgtagttcattctcatgctagtaaaaatagcgccgacggcttaaatatgttcgatggaacagattcgtgttatttccatagtggaccgagaggaacacatgatctgtgggattcgcgcctgttcgcatatagctcgtgggaaatcctccgtttcttactgagcaatatccggtggtggttggaggaataccgttttgacggctttcgttttgatggagtgactagtatgctttatcatcatcacggtgtcggacaggggttttcgggagattatagtgaatattttgggcttcaggttgacgaagacgctcttacttatttaatgctggctaatcatttggttcatacgttgtgcccggattctataacaatagcagaagacgtatcaggaatgccggctttatgttccccgatttctcaagggggaggagggtttgattatagacttgccatggctatccctgataaatggattcaacttctaaaagagttcaaggacgaggattggaacatgggtgatattgtttatacattgacaaatcgccgctatcttgaaaagtgcatagcctacgcagaaagccatgatcaagctcttgtgggcgataaaagcttagcattctggctgatggatgctgaaatgtacacaaatatgtctgttctcacgccatttactccggtcattgatcgaggtatccaactgcacaaaatgattaggctgattacacacggactaggcggcgagggatatctgaatttcatgggaaatgaattcgggcatcctgagtggttagattttccgagaaagggaaacaacgagtcataccattacgcaagaagacaatttcatctgactgacgatgaccttttgagatataaatttctgaacaactttgatcgagatatgaatcgattagaagaacgttatggctggctggctgcacctcaagcatacgttagtgaaaagcatgagggcaataaaatcatagccttcgaacgggctggcctgttgtttattttcaattttcacccttcaaagagctacacagactatcgggtgggcacggcattaccgggaaaatttaaaatagttttggattccgatgcagctgagtacggaggccatcaaagattagatcattcaacagattttttttccgaagcttttgaacacaacggcagaccttattctcttcttgtttatatccctagcagagtcgcactcattttacaaaatgttgatctccctaat

SEQ ID NO: 12720 - DNA, 2106 bp, synthetic construct
  misc_feature 1..2106: note = source = /note="Description of Artificial Sequence: Synthetic coding sequence"
  source 1..2106: mol_type = other DNA
atggcggcaccgatgacccctgcggccagaccggaagattatgaggctgcactgaatgcggctttggcagacgtgcctgagctcgctcggctgctggaaatcgacccgtacctgaagccatacgccgtggactttcagcgcagatacaagcagttctcccagatcctcaagaacatcggagaaaatgagggcggtatcgacaagttctcaaggggttacgaatcattcggtgtgcaccgctgcgcagatgggggcctgtactgcaaggagtgggccccaggagccgaaggcgtgttcctgactggggatttcaacggatggaatcccttttcctacccgtacaagaagctcgactacggtaagtgggaactttacatcccaccgaaacaaaacaagtcagtgctggtgccgcacggaagcaagctgaaggtcgtgatcacttcaaagtcgggcgaaattctgtaccgcatctccccgtgggccaaatacgtggtccgggaaggggacaacgtcaattacgactggatccactgggatccggagcattcttacgagttcaagcattcgcggccgaagaaaccacgctctctgaggatctacgagtcgcatgtgggcatctcctcgcacgagggaaaggtcgcttcatacaagcactttacctgtaacgtgctgccgcgcatcaagggactgggatacaactgcatccaactgatggcaattatggaacacgcctactacgcatcctttgggtaccagatcaccagcttcttcgccgcctcgtcgcgctacggtacgcctgaggaactgcaagagctcgtggataccgcgcactcaatgggcatcatcgtcctgctcgacgtggtgcattcccacgcgtcaaagaattccgccgacggactcaatatgtttgacggtactgatagttgttacttccattcaggaccgcgcggaacccacgatctctgggattcacggctcttcgcgtactcctcctgggaaattctgcgcttcctgctgtcgaacatccgctggtggctcgaagaatacagatttgatggattccgcttcgacggagtgacctccatgctgtatcaccaccatggcgttgggcagggcttctccggcgactactcggaatacttcggacttcaggttgatgaggatgctctgacttacctcatgttggccaaccatcttgtgcacactctgtgtccagactcgatcaccatcgctgaggatgtgagcggaatgccggcgctctgttcgccgattagccaaggaggagggggattcgactaccggcttgctatggccatacccgataagtggatccaactgctgaaggaattcaaggacgaggactggaatatgggggacattgtgtacactctgaccaaccgccggtacctcgagaaatgcatcgcctacgcggagtcccatgatcaagcactggtgggagataagtcgctcgcgttctggctgatggacgccgaaatgtacactaacatgagcgtcctgactccgttcacccccgttatcgatcggggaatccagctccataagatgatccggctcatcactcacggacttggaggggaaggatacctgaacttcatgggaaacgagttcggacaccccgagtggctggacttcccgcgcaagggaaacaatgagagttaccactacgcccgacggcaattccacctcaccgatgacgatctgcttcggtacaagtttctgaataactttgatcgcgacatgaacaggctggaagagcggtacgggtggctggcggcaccgcaggcttacgtgtctgagaaacatgagggaaacaaaatcatagccttcgagcgcgccggacttctctttatcttcaactttcacccgtcaaagtcgtacactgattaccgggtgggcacggccctgccaggaaagttcaagatcgtcctggactcggacgcagccgaatacggaggccaccagcggttggaccattccaccgatttcttctcggaagcgtttgagcataatggacgtccgtactcgctccttgtgtacatccccagcagggtggccctgatcctgcaaaacgtggacctgccgaac

SEQ ID NO: 12721 - DNA, 2106 bp, synthetic construct
  misc_feature 1..2106: note = source = /note="Description of Artificial Sequence: Synthetic coding sequence"
  source 1..2106: mol_type = other DNA
atggcagctcctatgacccctgcagcccgtcccgaggattatgaggctgccctcaatgcagcgttggcagatgtgccagaattggcacggctgctggaaattgacccgtaccttaaaccatacgccgtggactttcaaagacgatacaagcaattttcccaaatcttgaagaatattggagagaacgaaggggggatagacaagttttcacggggttacgagtcctttggagtgcatcgctgcgcagacggaggcctgtactgtaaggaatgggcgcccggagcggaaggagtgttccttaccggtgatttcaacggctggaaccctttctcatacccgtacaaaaaactggattacgggaaatgggagttgtacattccacctaaacagaacaagtccgtgctggtgcctcatggatcgaaacttaaggtggttatcacctccaagtccggtgagatcctttacagaatctccccatgggcaaaatacgtggtcagagaaggagacaacgtcaactatgattggattcactgggatcctgaacatagctacgagtttaagcatagcagaccgaaaaaaccgcgaagcctgagaatttacgaaagccacgtggggatttcgagccatgaaggcaaagtggcatcgtacaaacatttcacctgtaatgtcttgccacggattaagggacttggttacaactgtattcagcttatggcaattatggagcacgcatactacgcgtcctttgggtatcagattacctcgttctttgcggcgtcgtcccgctacggaaccccagaagagctccaagagcttgtggataccgcgcattccatggggatcatcgttctgctcgatgtcgtccatagccatgcctccaaaaacagcgccgatggtctgaatatgtttgatggcacggacagctgctactttcatagcggaccccggggtacccacgatctttgggattcgagactctttgcctactcaagctgggaaatactccggtttctcctctccaacattaggtggtggctggaagagtaccgtttcgatggctttcgttttgatggagtgacttcgatgctttatcaccatcatggggtgggtcagggatttagcggcgactactcggagtacttcggacttcaggtcgatgaagatgccctgacgtaccttatgcttgcaaaccatctggtgcataccctctgcccggatagcattactattgccgaggatgtcagcggaatgcccgcactgtgctctcctatttcacaaggaggcggaggctttgattaccggcttgctatggcaattccggataagtggattcaactgcttaaggagtttaaggatgaagattggaacatgggggatattgtctacactcttactaatcggaggtacctggaaaaatgcatcgcttacgccgagtcgcatgatcaggcattggtgggtgacaagagccttgccttttggctgatggatgcagaaatgtacaccaacatgtcggtgttgaccccctttacccccgtgattgataggggcatacaactgcataagatgatcagactcatcacccacggactggggggcgagggttacctcaatttcatgggcaacgaattcggtcatcctgaatggctggattttccgagaaagggtaacaatgaatcctaccattacgccagacgccagtttcatctgactgacgatgatcttctgagatacaagtttttgaacaattttgacagagacatgaatcgcctcgaagaacgctacgggtggctggcagccccacaggcatacgtgtccgaaaagcacgagggcaacaagatcatcgccttcgaacgggctggactgcttttcatctttaactttcatcctagcaagagttacaccgactacagagtgggtaccgcactgcctggaaaattcaagattgtgctggactcggacgctgccgaatacggaggtcatcagagactggaccactcgacggactttttcagcgaagcattcgaacataatggaaggccttacagcctgctcgtgtacataccttcacgtgtggcactgattcttcaaaatgtggacctgcctaac

SEQ ID NO: 12722 - DNA, 2106 bp, synthetic construct
  misc_feature 1..2106: note = source = /note="Description of Artificial Sequence: Synthetic coding sequence"
  source 1..2106: mol_type = other DNA
atggccgcccctatgacacctgcggctagacctgaggattacgaggccgcattaaatgccgcccttgcagatgtgcccgaacttgcccgcttgctcgaaattgatccatatttgaagccttacgcggttgattttcaaaggcgttataagcagtttagccagattctgaaaaacataggagaaaatgagggtggaatcgataagttttctcgtggctatgaaagtttcggggttcatcgttgtgccgatggtgggctttattgcaaggaatgggctcccggtgctgaaggggttttcctaaccggagacttcaacggatggaacccattcagctacccgtataaaaaactggattatgggaaatgggaactttacatccctccaaagcaaaacaagtcggtacttgttcctcatggatccaagctaaaggtagtaattacgtctaagtccggcgagatactataccgtatatcaccatgggcgaaatatgtagttagggagggagataatgtgaactatgattggattcattgggatcctgaacatagttacgagttcaaacatagcagaccaaagaagcctaggtcacttcgcatatacgaatctcacgttggtatctcctcccacgagggaaaagttgcttcctataagcacttcacctgtaatgttcttcctcgtataaaagggttaggatataattgtatccagctgatggcgatcatggagcacgcatactacgccagcttcggctatcagattacgtcattcttcgcagcttccagccgttatggaactcccgaggagctacaagaacttgttgacaccgcccactcaatgggtatcatcgtgctgttggacgttgttcattcacatgcatcaaagaactccgcagacgggctcaacatgtttgatggtacagattcctgttacttccatagcggtcctcgtgggacccatgatttatgggacagcagattatttgcttactcaagttgggaaatattgagatttctcctttcgaatatcagatggtggttggaagagtacagatttgatggcttcaggtttgatggggtgacctccatgctctatcaccatcatggcgtgggtcaggggttctcgggggattattcagagtatttcgggttacaagtggatgaggacgcccttacgtacttgatgctggccaaccatttagttcacactctatgcccagactctattacaatcgctgaggatgtgtcaggtatgccagcgctatgttccccgatttcacagggaggaggggggttcgactacaggctcgcgatggcaattccggataaatggattcaacttctgaaggaattcaaggacgaggactggaacatgggggatatagtttatactcttaccaatagacgatatcttgagaagtgtatcgcatacgctgagtcccatgaccaggcattggttggggacaagtcattggctttttggttgatggacgcagaaatgtacactaatatgagcgtgttgacaccttttacgcctgttatcgacagggggatccagctccataaaatgattaggcttataacacatggcttgggtggtgagggatacctgaatttcatgggtaacgagttcggtcaccctgaatggcttgatttcccgaggaagggtaacaacgaatcttaccattacgctaggagacagttccatctaaccgacgacgatctattgcgatacaagtttttgaacaactttgatcgtgatatgaacaggttagaggagaggtacggatggttagccgctccacaagcttacgtcagtgaaaagcacgaagggaacaaaattattgccttcgagcgtgccggccttttgtttattttcaacttccaccctagtaagtcgtatacggattacagagtcggaacagcactgccaggaaagttcaagatcgtattagactcagatgccgcagagtacggtggtcatcaaagactcgatcattccacggatttcttctccgaggcttttgagcataacggtagaccctactctttgctcgtttatatcccttccagggtggctttgattcttcagaatgttgacctgcctaat

SEQ ID NO: 12723 - DNA, 2106 bp, synthetic construct
  misc_feature 1..2106: note = source = /note="Description of Artificial Sequence: Synthetic coding sequence"
  source 1..2106: mol_type = other DNA
atggcagcacctatgaccccagccgcacgtccagaagactacgaagctgcattgaatgctgccctggccgacgtgccggaactcgctagattgctggagatcgatccctatctaaagccttacgccgttgacttccagcggcgctacaagcagttttctcaaatactgaagaatatcggggaaaatgaggggggcatagacaaattcagtaggggttacgagtcctttggggtgcacaggtgtgcagacggtggcttgtactgtaaggaatgggccccgggcgcagagggagtgttccttacaggcgatttcaatggctggaacccgtttagttatccttacaagaaactggactacgggaagtgggagctctatatccctcccaagcagaataaaagcgtcctggttccccacggtagcaagctgaaggtcgtcattacttccaaaagtggggaaattctgtaccgtattagtccttgggccaaatacgtagtccgcgaaggggataacgttaattacgattggattcactgggatccagaacacagctatgagttcaagcacagtaggcctaagaagcctaggagtctgcggatctacgagtctcacgtcggcatatctagtcatgagggtaaagttgcatcatacaaacatttcacatgcaatgttttacccaggattaaaggtctcggctacaattgcatccagcttatggccataatggagcacgcctactatgcttccttcggctatcagattaccagctttttcgctgcttctagtcggtacggcactccagaggagttgcaagagttagtggacactgcacattctatgggcatcatcgtgctgttagacgtagtgcacagtcacgcatcgaagaattctgccgatggcctgaacatgttcgatggcacagatagctgttattttcactcgggaccccgcggcacccatgacctgtgggatagccgactttttgcgtacagtagctgggaaatactgagatttctcctatcaaacattcgatggtggctcgaggaataccgatttgacggtttcagatttgatggtgtcactagcatgctctatcaccaccatggagtcgggcagggcttctccggggattactccgaatactttgggctccaggtggatgaggacgcactaacttacctgatgctggctaaccatcttgtgcatacactgtgcccagactcaataactatcgccgaagacgttagtggcatgcccgctctgtgctcccccataagccagggaggtggagggtttgactacaggctggcgatggcaattcccgacaaatggattcagctgcttaaagagtttaaagacgaggattggaacatgggtgacatcgtgtatacactgaccaatcgaaggtacctggagaagtgtatcgcttacgcagaatctcatgaccaggccctagttggagataaatctctggctttctggctgatggacgccgaaatgtacacaaatatgagcgtgttaactccattcaccccagtgatagacagagggattcagcttcataaaatgatccgcttgattacacacggactgggcggcgagggctatctgaacttcatgggcaacgagtttgggcatcctgaatggctggacttccctcgtaaggggaataacgaatcctatcactacgctcgccggcagtttcacttgacagacgacgacttgctgcgttataagttccttaacaactttgatcgtgacatgaaccgtctggaagagcgctatggctggctggccgcgccacaagcttatgtgtcagaaaagcatgagggcaacaaaattatcgcgttcgaaagagccggcttactcttcattttcaactttcatccatcgaagagttatactgattatagagtgggaacagcattgccagggaaatttaagattgtactcgacagcgatgctgcagagtatggcggtcaccagcggctggaccattctacagatttcttttctgaagcttttgaacacaatggccgcccatactcactcctggtttatattccctcaagagttgccctcatactgcaaaatgtcgacctccctaat

SEQ ID NO: 12724 - DNA, 2106 bp, synthetic construct
  misc_feature 1..2106: note = source = /note="Description of Artificial Sequence: Synthetic coding sequence"
  source 1..2106: mol_type = other DNA
atggcagccccgatgactccggccgcccgcccggaggactacgaggctgctcttaacgccgcactggcagatgtgcctgagctggcgaggctgctggagattgatccttacctgaaaccgtacgccgtcgacttccagagacgttacaagcagttttcccaaatcttgaagaatatcggagaaaatgagggtggaatcgacaagttctcgagaggatacgaatcatttggcgtgcaccgctgcgcagacggaggtctgtattgcaaagagtgggctccgggagcggagggggtgtttctcactggggacttcaacggttggaacccgttcagctacccgtataagaagctggactacggaaagtgggagctttacatccctccaaagcaaaacaagtcggtcctggtgccgcatgggtcaaagctcaaggtggtgatcacttcgaagtccggagaaatcctgtacagaatctccccctgggccaagtacgtggtccgggagggagataatgtgaactacgactggattcactgggatccggaacattcatatgagtttaaacactcacgcccgaagaaaccgcggtccctcaggatctacgaatcccacgtcgggatttctagccatgaagggaaggtcgcgtcgtacaagcattttacttgcaatgtgctgccgcgcatcaagggcctcggctataactgtatccagctgatggctatcatggagcacgcttactacgcctcgtttggataccagatcacttcgtttttcgcggcatccagcaggtacggaaccccggaggaacttcaggagcttgtggacactgctcattccatgggtatcatcgtcctcttggatgtggtccactcacacgcttcgaagaactcggcggacggcctgaacatgttcgacgggaccgactcatgttacttccattcgggcccgaggggcacccatgacttgtgggatagccgcctgttcgcctactcatcctgggaaattctgcgcttcctgttgtcgaacatcaggtggtggctcgaggagtacagatttgatggatttcggtttgacggcgtgacctctatgctgtaccaccaccatggcgtggggcagggtttcagcggtgattactccgagtacttcgggctccaagtggatgaggacgccctgacttacctcatgctggccaaccacctggtgcacactctgtgcccggactcaatcaccatcgccgaagatgtgtcgggcatgcctgccctgtgctcgccaatctcgcagggaggcggcggatttgattacagactcgcgatggcgatcccagacaagtggatccagctgctgaaggaattcaaggacgaggactggaatatgggagacattgtatacaccctgaccaacagaaggtacctggagaaatgcatcgcgtacgccgagtctcatgatcaggccctggtcggagacaaatcactcgccttttggctcatggatgccgagatgtataccaacatgtccgtgctcactcctttcacgccggttatcgacaggggaatccaactgcataagatgatcaggctgattacccatggactggggggcgagggttacctgaacttcatggggaacgaatttggacatccagaatggcttgatttcccccggaagggaaataacgagtcataccactacgcacggagacagttccacctcaccgacgacgatctcctgcgctacaaatttcttaacaatttcgacagggacatgaaccgcctcgaagagagatacggatggctcgcagcgccgcaagcgtacgtctccgaaaagcacgaagggaacaaaatcattgcttttgagcgggccggattgctgttcatcttcaacttccacccgtcaaaatcctacactgattaccgggtgggaactgcactgccgggcaaattcaagatcgttctggattcagatgcggctgagtacggaggacaccagcgcctcgaccactcaaccgatttcttctcagaagcgttcgagcataatggacgaccttattcattgcttgtgtacatccctagccgggtggcgctcatcctgcaaaacgtggacctgccgaat

SEQ ID NO: 12725 - DNA, 2106 bp, synthetic construct
  misc_feature 1..2106: note = source = /note="Description of Artificial Sequence: Synthetic coding sequence"
  source 1..2106: mol_type = other DNA
atggccgcaccaatgacgcccgccgcacggcccgaagactacgaggctgccttgaacgcggcactggccgatgtgccagaacttgcccggcttttggagattgacccttacctcaagccgtatgccgtcgatttccagaggcggtacaaacagttttcacagattttgaagaatatcggagagaatgagggaggaattgacaagtttagccgcgggtacgaatcctttggcgtgcaccgctgcgccgacggcgggctatactgcaaggagtgggcgcctggagccgaaggagtgtttttaaccggcgactttaatggctggaatcccttctcatatccatataagaaactcgattatggtaagtgggaactgtacatcccccccaagcaaaataaaagtgtgctagtgccacacggctctaaactcaaggtggtgattacaagcaagtcaggcgaaatcctttacagaatcagcccatgggctaaatatgtggtaagggagggggacaacgtgaactatgactggatacattgggaccctgaacacagttatgaatttaagcattcgcggcctaaaaaaccccggtctttacggatttacgagtcgcacgtggggatcagctcccatgagggcaaagtggcctcgtataagcacttcacttgtaatgtcctgcctaggataaagggcctgggatacaattgtatccaactgatggctatcatggaacacgcctattatgcttccttcggctatcagatcacctcttttttcgctgccagctctcggtatggcacacctgaggaacttcaagaattggttgacactgcccatagcatggggattatcgtcctactcgacgtggtgcattcccatgcgtctaaaaactccgccgacgggctgaacatgttcgatggaaccgattcgtgttacttccatagcgggcctaggggaactcacgacctctgggactctaggctgttcgcgtattcttcttgggagatcctccgcttcttgctctcgaatatccggtggtggttagaggagtaccggttcgatggttttcggttcgacggggtcacttccatgctataccaccaccacggcgtcggccaagggttcagtggcgattactccgaatacttcgggcttcaagtcgatgaggatgccctgacgtatcttatgctggccaatcatcttgtgcatactctgtgccccgattccattactattgcagaagacgtctctggaatgcctgcactgtgttctcccatttcccagggcggaggtggtttcgactatcgactcgcaatggctatcccggacaagtggatacagctgctgaaagagtttaaggatgaggattggaacatgggagatatagtttacacactgactaatagaagatatctcgagaagtgtattgcgtacgccgaaagtcacgaccaggctctggtaggcgacaaatctctcgctttctggctcatggatgctgagatgtacacaaatatgtccgtactgactcctttcacaccagtgatcgacaggggcatccagttgcataagatgataagacttatcacgcatggtctaggcggcgaaggctatctgaacttcatggggaatgagtttggccaccccgagtggcttgacttcccaagaaaaggcaataacgaatcctaccattacgctcggcgacagttccacttaacggatgacgatctacttcgctacaaattcctgaataatttcgaccgcgacatgaataggctcgaggagcgatacggctggttagctgctcctcaagcttatgtgtctgagaaacacgagggaaacaaaatcatcgcgtttgagcgagccgggctcttgtttatctttaactttcatcccagtaagtcctacaccgattatcgcgttggaaccgccctgcctggcaaattcaaaattgtgctcgacagtgacgccgcggaatatggcgggcaccagaggctggaccactctaccgactttttctccgaggctttcgagcataacgggcggccatatagcctgctggtgtacataccaagcagagtagctctgatcctgcaaaatgtggacctccccaat

SEQ ID NO: 12726 - DNA, 2106 bp, synthetic construct
  misc_feature 1..2106: note = source = /note="Description of Artificial Sequence: Synthetic coding sequence"
  source 1..2106: mol_type = other DNA
atggctgccccaatgacccccgcggctagacctgaggactatgaagccgctctcaacgccgctcttgccgacgtgccggagctggcgcgcctacttgagattgacccttacttgaagccttacgcggtggactttcagaggcgctacaagcagtttagccaaatcctcaaaaacattggcgaaaacgaaggcggcattgataagttctcccggggatatgagtccttcggagttcatcggtgtgccgatgggggcttatattgcaaagagtgggcaccaggagccgagggggttttcctcacgggagacttcaatggttggaacccttttagttatccatacaagaaattagattatggtaagtgggaactgtacataccacccaaacagaataagtcagtccttgtgccgcacgggagcaagctgaaagtcgtgattacttctaagagtggcgagattctgtatagaatttccccatgggcgaagtatgttgtgagggagggggataacgtgaattatgactggatacattgggaccctgagcattcctacgagttcaaacacagcagaccaaagaagccccgctcgctgaggatctacgaaagccatgtagggatcagtagccacgaggggaaagtggcctcctacaagcacttcacctgtaatgtgctgccccggataaagggactcggatacaactgtatccaactgatggcaataatggaacatgcctactacgccagcttcggttatcagattactagtttttttgctgcctcttcacgctacggaacgcctgaagaactgcaggagctcgtagacactgcacactctatgggcatcatcgtgctgctggacgtagtacatagtcacgcttccaagaacagcgccgatggactgaacatgtttgatggcacggattcctgctacttccactccggtcctcggggcacacacgacctgtgggattcaagactgttcgcatacagttcgtgggagatactgagatttctgctgagcaatatccgttggtggcttgaggagtaccgtttcgatgggtttaggttcgacggggtcaccagtatgctttatcatcatcacggggtgggtcagggcttttccggcgattactctgagtacttcggactgcaggttgacgaggatgctctgacttatctcatgctggctaatcatcttgtgcacaccctgtgccccgattccatcacgatagcagaggatgtgtctggaatgccagcactttgtagcccaatctcgcaaggaggtggcgggttcgattaccggctggctatggctataccggataagtggattcaacttctcaaagagtttaaagatgaggactggaacatgggagacattgtgtataccctgactaatcggagatatttagagaagtgtatcgcatatgccgagtcgcatgaccaggctcttgtgggggacaaatcgctggccttttggctaatggatgctgagatgtacactaacatgtccgtgctcaccccgtttaccccagtgatagatcgaggtatacagctgcacaagatgatcagactaatcacccatggcttagggggagaaggatacctcaacttcatgggaaacgagttcgggcatcccgaatggctcgacttccccaggaaaggaaataatgaaagctaccactatgctagacgacagttccacctcaccgatgatgaccttcttcgctacaaattcctgaacaactttgaccgtgacatgaaccgcctcgaagagcgctatgggtggctcgcggctcctcaggcatatgtttctgagaagcatgagggcaacaaaattattgctttcgagcgtgcaggacttctgtttatttttaatttccatccttcaaagtcttacaccgactatcgggttggaaccgctctcccaggaaagtttaagatagtccttgactctgacgctgctgaatacggaggtcatcagaggctggaccactctactgactttttttccgaagccttcgagcacaacggtcgaccgtactcactcttagtgtacatccctagtagagttgccctgatattgcaaaacgttgatctgccgaac

SEQ ID NO: 12727 - DNA, 2106 bp, synthetic construct
  misc_feature 1..2106: note = source = /note="Description of Artificial Sequence: Synthetic coding sequence"
  source 1..2106: mol_type = other DNA
atggcagcgcctatgacgccagcagcaaggcctgaagattacgaagcagcactgaacgcggcgctggctgacgtgcccgagctggcacggcttttggaaatcgatccttacctgaaaccctacgctgtggattttcagagaagatacaagcagttctcccaaatcctgaagaacataggagaaaatgaaggcggcattgataagttctcaagaggatacgaatcgtttggagtgcatcgctgtgcagacggtgggctttactgtaaggaatgggcaccaggcgcagaaggtgtgttcctcaccggagatttcaatgggtggaaccccttctcctacccctacaagaaacttgactacggcaaatgggaactctacatcccaccaaagcagaataagtcagtgcttgtgccacacgggagcaagttgaaggtggtcattactagcaagtctggcgaaatcttgtaccgcatctccccttgggcaaagtacgtggtgagagaaggtgataacgtgaactacgattggattcattgggaccccgaacattcctacgaattcaaacatagcaggcctaagaagccacgatcactgcggatatacgaaagccacgtgggcatttcctcccacgaaggaaaggtcgcatcatacaagcatttcacctgtaatgtccttcctagaattaagggactcggatacaactgtattcagctgatggccattatggaacacgcatattacgctagctttggataccaaattacctccttcttcgccgcttcctcccgctacgggacccccgaagaactgcaagagctggtggacaccgcccactcgatgggtattatcgttcttttggacgtggtgcacagccatgcatccaagaactctgcagatggactgaacatgtttgatggaaccgactcctgttacttccattcgggtccaagggggacccacgatctgtgggactcgcgtctttttgcgtactcgtcgtgggaaatcctgcgattcctcctgtccaacatcaggtggtggctcgaggagtacaggtttgatggcttcaggttcgatggtgtcacctcgatgctctaccatcaccacggagtgggacagggattcagcggagattactcggagtactttggattgcaagtggatgaggacgcccttacctacctgatgcttgctaaccatcttgtgcataccctttgcccagattccatcaccattgcagaggacgtctcaggaatgcctgcactttgttcgccaatcagccaaggtggagggggttttgactaccggctcgcaatggctatacccgataaatggattcaactgctcaaagagtttaaggatgaggattggaacatgggagatattgtgtacaccctgaccaacaggcggtatcttgagaagtgtattgcatacgcagaatcccacgatcaagcgctcgtgggtgataagtcgcttgcattttggcttatggatgcagaaatgtacactaacatgtcggtgcttactccttttaccccggtcattgacaggggcatacagctgcacaagatgattcgccttattactcatgggctcgggggtgagggctaccttaactttatgggaaacgaatttggccatccagagtggctcgacttccctagaaagggcaataatgaatcctaccactatgcaaggcgacagttccatcttactgatgatgatttgcttcggtacaagttcctcaataactttgatcgtgatatgaataggttggaagaacgatatggttggctggcagcaccgcaagcatacgtgagcgagaaacatgaggggaacaagattattgccttcgaaagggcaggtctgctgtttatcttcaattttcacccttcgaaatcttacaccgactacagagtcggaactgcactgcccggaaagttcaagattgtcctcgattccgatgccgcagaatacgggggacatcagcggctggaccattccactgacttcttttcagaggcatttgaacataacggacgtccttactccctgcttgtctacatccctagcagagtggcccttatactgcagaatgtggacctgcctaac

SEQ ID NO: 12728 - DNA, 2106 bp, synthetic construct
  misc_feature 1..2106: note = source = /note="Description of Artificial Sequence: Synthetic coding sequence"
  source 1..2106: mol_type = other DNA
atggcggctcctatgacacccgcagctcggccagaggattacgaggccgcactgaatgccgcccttgccgatgtgccagaactggctcggctgctggagatagacccctacctgaagccttacgccgtggattttcagaggaggtacaagcagttcagccagattctaaaaaacatcggcgagaatgagggcggcattgataaatttagcagaggctacgaaagctttggtgtgcatcgctgcgccgatgggggtctgtactgtaaagagtgggcaccgggggctgagggcgtttttctgaccggcgattttaatggatggaacccctttagttacccttacaaaaagttggattatggaaagtgggagctgtacatcccacccaagcagaataagtccgtactagtcccccacggatccaagctgaaggttgtgatcacaagtaaaagtggagagatcctttacaggattagtccgtgggctaaatatgtggtacgtgaaggggacaatgtgaactacgattggatccactgggacccagagcactcatatgagtttaagcattcccgtcccaagaagccccgaagcttgagaatctacgagagccacgttgggatttcttcgcatgaaggcaaggttgcaagttacaagcactttacctgcaacgtgttaccccggattaaaggtctgggatacaactgcatacagctcatggctatcatggagcacgcgtactacgcgtcatttggctaccaaataacttctttctttgcagcatcctcgcggtatggcacacccgaggagctgcaggaactagtggacactgcccatagcatgggcatcatagtccttctggatgtggttcactcacacgcatcgaagaatagcgcagatgggctgaatatgttcgatgggacagactcatgttacttccattccggcccccgcggaactcacgatctgtgggattccaggctgttcgcctactcttcttgggagatcttacgattcctgctgtctaatatccgctggtggctggaagagtaccggttcgatggcttcaggtttgacggcgtcaccagcatgctgtaccatcatcacggggtaggccaggggttctccggggattattcagaatattttggacttcaggtcgacgaagatgccctgacttatctgatgcttgcaaatcaccttgtgcacacattgtgccccgatagcatcaccatcgctgaggatgtgtccggaatgcccgcgttgtgcagccccatctcacaggggggaggcggctttgattatagactggcaatggcgatccctgacaagtggatccagttgctgaaggagtttaaagacgaggattggaacatgggggatatcgtatataccctgaccaaccggagatacctggagaagtgcattgcatatgctgaaagccatgaccaagcactcgtgggggacaagtcacttgctttctggctgatggacgctgagatgtacactaacatgtctgttctgacccctttcactcctgtgatcgacagaggcatacagctgcataagatgatccggttaattactcacggcctcggaggcgagggctatttgaactttatgggcaatgagttcggacacccggagtggctcgactttccaaggaaaggaaataacgaatcataccactatgctcgtaggcaatttcatctgacggacgatgatctcctgagatacaaatttctcaacaatttcgatcgggacatgaacagactcgaagagcggtacggctggctggccgcaccacaggcgtatgtcagcgagaaacatgaaggcaacaaaattatcgcatttgagcgagctggtctcctgtttatatttaatttccatccgtctaaatcttacactgactaccgtgtgggtactgccctgcccggcaagtttaagatcgtgttggatagcgatgccgccgaatatggcggtcatcaaaggttagatcatagcactgatttcttctctgaggcatttgagcacaacggccgcccctatagcctcttggtatacatcccgtctcgcgttgcattgatcctgcagaacgtcgatctgcctaat

SEQ ID NO: 12729 - DNA, 2106 bp, synthetic construct
  misc_feature 1..2106: note = source = /note="Description of Artificial Sequence: Synthetic coding sequence"
  source 1..2106: mol_type = other DNA
atggcggcacccatgaccccggccgcccggcctgaggattatgaggctgcgttgaacgctgctctggccgatgtgccagaattggccagactcctggagattgatccatatctaaagccctatgccgtcgactttcaacgcagatacaagcagttttcgcagattctcaaaaatatcggggagaatgaaggcggtattgacaaattctcaagaggctacgagagctttggcgtgcatcgttgtgccgacggcggcttgtactgcaaagagtgggcgcccggcgctgagggcgtatttctgactggggatttcaatggttggaacccatttagttacccctataaaaaactcgattacggcaaatgggagctatacattcctcctaagcaaaacaaaagtgtcctggtgccccacggatctaagttgaaagtggtgattacgtctaagtctggagaaatcctatacagaattagcccttgggctaaatacgttgtgcgggaaggagacaacgtcaattacgactggatccactgggatccagaacatagttacgagttcaaacactcccgcccaaagaagccgcgttctctaagaatctatgagtcccacgtcgggatttcctctcatgaagggaaggtcgctagttacaaacattttacctgtaacgtgctcccccggatcaagggacttggatacaattgcattcagctgatggccattatggagcacgcctattacgcatcattcggttaccagatcactagtttcttcgccgcttccagcaggtacggcacgccagaggagctccaagaactcgttgacacggcccattctatgggcatcattgtactgctcgacgtggtgcatagtcacgctagtaagaattccgcagacggcctgaatatgtttgacgggaccgattcctgttactttcattcgggaccccgcggaacccatgatctgtgggactctcgcctctttgcatatagctcatgggagatattgagatttctcttatctaatatccggtggtggctagaagaatatagattcgacggtttcaggttcgacggggttacctctatgctttaccaccatcatggcgtgggacaaggcttctccggtgattactctgagtacttcgggttgcaggtggacgaagatgccctgacctacctgatgctcgcgaatcacctagtgcacacactatgccctgactcaatcacaatcgctgaggacgtctctggaatgcctgccctgtgctcacctatcagccaagggggagggggctttgattatcgcttggctatggctattcctgacaaatggattcagctgctgaaagagtttaaagacgaagattggaatatgggggacatcgtgtatacgctaacaaatagacgatatctggagaagtgtattgcgtacgcagagtcacatgatcaggcactcgtaggggataagtcactagcattctggctgatggacgcagagatgtatacaaatatgagcgtactgaccccttttactcccgtaatagatcggggcattcagctacacaagatgatacggctgataactcacggtttgggcggcgagggctatctcaatttcatgggaaatgaattcgggcaccccgaatggcttgatttcccaaggaagggaaacaacgaatcatatcactacgcacgccggcaattccacctcaccgatgatgatttgctgcgctacaagttcttgaacaatttcgacagggatatgaatcggcttgaggagagatatggctggctcgcagcacctcaagcctacgtctctgagaaacatgaggggaacaagattatcgcgttcgagagggccgggctcttgttcatttttaacttccacccttctaaatcttatacagattacagggtggggacagctctgcccggcaagttcaagattgtgttggacagtgatgctgctgagtatggaggtcatcagcgcctggaccattccacagacttcttttccgaggcctttgagcataacggccgcccttactcattacttgtgtatattccatccagggttgccttgatactgcagaatgtggaccttcccaac

SEQ ID NO: 12730 - DNA, 2106 bp, synthetic construct
  misc_feature 1..2106: note = source = /note="Description of Artificial Sequence: Synthetic coding sequence"
  source 1..2106: mol_type = other DNA
atggcagctccaatgactcctgctgcacgaccagaagattacgaggctgccctgaacgctgcactggccgatgtcccagaacttgcccggctcctggagatcgacccataccttaagccctacgcggttgactttcagaggcgctacaagcaattttctcagatcctgaaaaatattggtgaaaacgaaggaggaatcgacaaattctcccgggggtacgagagcttcggtgtgcatcgatgtgccgatggaggtctgtattgtaaggaatgggcgcctggggctgagggtgtcttcctgacgggggattttaacggttggaacccgttctcctatccatataagaaactggactatggaaaatgggagctctacataccaccgaagcagaacaaatctgtgcttgtccctcatggtagcaagcttaaggtggtaattactagtaagtccggggaaatactgtaccgcatctccccttgggccaaatatgtcgtcagagagggagacaacgtgaattacgattggattcactgggacccagaacactcatacgagtttaagcatagtcggccgaaaaagcccagatcactgaggatctacgaatcccacgtggggatcagttcacacgagggcaaggtggcatcatacaagcatttcacctgcaatgtactgccccggatcaagggtctggggtacaactgcattcagctgatggcaattatggagcacgcgtattacgcttctttcggataccagatcacctctttttttgccgcctcctctaggtacgggactcccgaggaactgcaagagctcgtggacactgcacactcaatgggaatcatagtattgctggacgtagtgcatagtcatgcttcaaaaaactcagcggatggactcaacatgttcgacggaaccgattcatgttactttcacagcggcccccgcggcacacacgatttgtgggattcccggctcttcgcctacagcagctgggagatcctgcgctttctgctgtccaatattaggtggtggctggaggagtataggtttgatgggttccggttcgacggtgtaacttccatgctgtaccaccatcatggggtcggacaagggttctcaggggattactctgaatattttggactccaagttgatgaagatgccctgacctatctgatgctggctaatcatctggtgcacacactgtgtccagacagcatcacgatagctgaggacgtctctgggatgcctgcgctctgctccccaatctcacagggcggagggggcttcgattaccggctggccatggcaatacccgacaaatggattcagctcctgaaagagttcaaagacgaggactggaacatgggcgatatcgtatacacactgaccaaccgccggtatcttgagaagtgtattgcgtacgctgagagtcacgatcaggccctggtgggggacaagagcctggcattttggctcatggacgctgagatgtacaccaatatgtccgtactgaccccttttacacccgttatagatcgcggtattcagctgcacaaaatgataaggctgatcacgcacggcctggggggggagggctacttgaacttcatgggcaacgagttcggccaccctgaatggctggatttccctcggaagggaaacaatgagagctaccactacgcaagacgccagttccatctcaccgatgacgacctgctgaggtataaattcctcaacaatttcgatcgcgatatgaacaggctcgaggagaggtacgggtggctcgctgctccccaagcttatgttagtgagaaacacgagggaaataagattattgcatttgaacgggctggcttgctgttcattttcaattttcaccctagtaagtcttacaccgactaccgcgtgggaactgcccttccgggcaagttcaaaattgttctcgattcagacgctgccgaatacggcggacatcagcggctggatcattctaccgattttttcagcgaggcttttgaacacaacggacgcccctatagcctgctcgtctacatcccgtcccgagtggctttgattttgcaaaacgtggatctgcctaac

SEQ ID NO: 12731 - DNA, 2106 bp, synthetic construct
  misc_feature 1..2106: note = source = /note="Description of Artificial Sequence: Synthetic coding sequence"
  source 1..2106: mol_type = other DNA
atggccgcacccatgaccccagcagctcgtccagaggattacgaggcagccttgaacgcagcattggctgatgtgcctgaactggccaggcttctggaaatcgacccctatctcaagccatatgccgttgattttcaacgcagatataagcaattttctcagatcctgaagaacatcggcgagaatgaaggaggtatcgataagttttcacgcggatacgagagcttcggcgtccataggtgtgctgacggcggcctgtactgtaaagaatgggcccctggagcagagggtgtgttcttgaccggtgacttcaacggttggaatcctttttcatacccatacaagaagctcgattacggtaaatgggagctgtacatcccccctaagcagaataagagtgtgctggtgcctcacggatctaagcttaaggtcgtgatcaccagtaaatccggcgagattctctatcgcatttccccctgggccaagtacgtcgttagagagggagataacgtaaattacgattggattcactgggatcccgaacattcttatgaattcaagcactcaagaccaaagaagccccgctctctccgtatttacgaaagtcatgtaggtataagtagtcacgagggaaaggtggcctcctacaagcatttcacctgtaatgtccttcctaggatcaagggtctgggatacaactgtattcagttgatggctatcatggaacacgcatattacgcctctttcggctaccagatcacaagcttttttgccgcctcctccaggtacggcacccctgaagagttgcaggagcttgtcgacactgcacacagtatgggcattattgtcttgctcgacgttgtgcatagccacgcatctaaaaactcagccgacggacttaacatgtttgacggtaccgactcttgctatttccacagtggtccccgtggtacccacgacctgtgggactcacgtctctttgcttattccagttgggagatcctcaggttcctgttgtcaaatataagatggtggctcgaagaatatagatttgatggtttcaggttcgacggcgttactagtatgttgtatcatcaccatggagtcggacagggattctccggtgactatagcgaatattttggtttgcaggtcgacgaagatgctctgacttacttgatgctcgctaatcaccttgttcacaccctctgtcccgactcaatcacaattgcagaagatgtttccggtatgcctgcactctgtagtcccatctctcagggcggaggcggattcgactacaggttggccatggcaatccccgataagtggattcagctcctcaaggaattcaaggacgaggactggaatatgggcgacatagtatacactctgacaaaccgcaggtatctggagaagtgtatagcatatgcagagtcacatgaccaggcactggtgggcgacaaatccctggccttttggctgatggacgctgagatgtacacaaatatgtccgtgctgaccccatttacaccagtcattgacaggggtattcagctgcataaaatgattcgtttgattactcacggcttgggaggtgagggttaccttaacttcatgggtaacgaattcggacatccagaatggctggacttcccccgtaaaggcaataacgagagctaccattatgccaggcgtcaatttcacctgaccgatgacgatttgctgcgttataagttcctgaacaactttgatcgcgatatgaacaggttggaagaaaggtatggttggttggcagctccacaggcttacgtctctgaaaagcacgaaggcaataaaatcatcgcattcgagagggcaggactcttgttcatcttcaatttccacccaagtaagtcatataccgactatcgtgttggaactgcattgcctggcaaattcaaaatcgtgctggatagcgatgctgccgaatacggaggccatcaacgtttggatcacagtacagatttcttctctgaagcctttgaacataacggcaggccatacagtttgcttgtgtacatccccagtagggtggctctgatcctgcagaacgtggacctgccaaat

SEQ ID NO: 12732 - DNA, 2106 bp, synthetic construct
  misc_feature 1..2106: note = source = /note="Description of Artificial Sequence: Synthetic coding sequence"
  source 1..2106: mol_type = other DNA
atggcagcccccatgacgccagccgcccgcccggaggattacgaggccgctttaaacgcggctcttgctgatgtcccagagctggccagactgctcgaaatagatccatatcttaagccatacgcagttgacttccagaggagatacaagcagttcagtcagatcttgaaaaatattggggagaacgagggcggcatcgataagttttcccgaggatatgagagctttggcgtccaccgttgtgctgacggcgggctgtactgcaaggaatgggcaccgggagccgaaggggtgtttctgaccggagatttcaacggctggaacccgttctcatacccctacaaaaagttagactacgggaagtgggagctatatattccgcctaagcaaaacaagagcgtgttagtgccccacggcagcaaattgaaagtggtgatcacatcaaagagcggagagatcctttacagaatctcaccgtgggccaagtatgtcgtgcgggagggcgataacgtaaattatgactggattcactgggaccccgaacacagctacgagttcaaacatagccgtcctaagaaacccaggtctctgcggatttacgagagtcatgtgggaatttcttctcacgaaggcaaagtggcttcctacaagcatttcacgtgcaatgttctgccacgaattaagggcttgggctacaattgtatccagttaatggccatcatggagcatgcgtattatgcttctttcggctaccagattacctctttctttgcggcatcctccaggtatgggactcctgaggagctacaagagctcgtagataccgcccactccatgggcattatagtgctgctggacgttgtgcattcacatgcatccaaaaatagcgcagatggactaaacatgtttgacggaaccgacagttgctactttcactctggcccaaggggaacccatgatctctgggattcccgactgtttgcttatagtagttgggaaatcctgaggttcctattgagtaatatcagatggtggcttgaggagtatcgctttgatgggtttcggtttgacggagttacttctatgctctaccatcaccacggcgtgggccaaggattctccggtgattactccgagtacttcggcctacaggtggacgaggacgctctgacatacctcatgttagctaaccatttggtccacacactctgtcctgattctatcaccatagcagaggacgtctctggtatgccagctctgtgtagccccatcagccagggaggcggtggcttcgactacaggctggccatggccataccagacaaatggattcaactgctgaaggaattcaaggatgaagactggaacatgggagatatcgtgtatacactgaccaataggcgttatctcgagaaatgcatagcatatgcggagtctcacgaccaggcgctagtgggggacaagtcccttgcattctggctgatggacgcagagatgtatactaacatgagcgtactgacaccttttaccccagtcatcgacagggggattcagctgcataagatgatcagattaatcactcacggcttaggaggagaaggatatctcaatttcatgggcaatgaatttggacaccccgagtggcttgacttccctcggaagggaaataacgagtcttaccattatgccaggaggcaattccacctcacagatgatgatctgttgcgttacaagttcctgaataatttcgaccgagatatgaaccgcctggaagagagatatggctggctggcggctccccaggcatacgtctccgagaagcacgagggtaataaaataattgcatttgagcgcgccggcctactgtttatcttcaacttccacccatctaaatcatataccgattatcgggtcggaacagccctccctggcaaattcaagatagtcctggactcggacgcagcggagtatggcggtcaccagagactggaccactcgacagatttcttctccgaagcctttgagcataacggtcgcccctattctctgttggtgtacattccaagtcgagtcgccctaattttacaaaatgtggatctacccaat

SEQ ID NO: 12733 - DNA, 2106 bp, synthetic construct
  misc_feature 1..2106: note = source = /note="Description of Artificial Sequence: Synthetic coding sequence"
  source 1..2106: mol_type = other DNA
atggccgccccaatgacacccgctgcccggcctgaggattatgaggcagctctgaacgctgccctggccgatgtgcctgaacttgcccgcctactggaaatcgatccttatctgaaaccttatgccgtggatttccagcgtagatacaagcaattctcccagattctgaagaatataggcgagaacgagggcggcatcgacaagttctccagaggatacgaaagtttcggggtccatagatgtgccgatggcggcctgtactgtaaggaatgggcacctggcgcagaaggggtgttcctgactggcgactttaatggatggaaccccttctcttatccctacaagaaactcgactatgggaagtgggagctgtacatccccccaaagcaaaacaagagtgtcctggttccacatggaagcaaactgaaggtcgtgataacatcaaaatcaggcgaaattctttaccgaatcagcccctgggccaaatatgtcgtccgcgaaggggacaacgtcaactacgattggattcattgggaccctgagcacagctacgaattcaagcatagcaggcctaaaaagccacggagtctgaggatctacgaatctcacgttggcatctcaagccacgagggcaaggtcgcctcctacaaacattttacttgcaatgtccttcctcgaataaaaggtctcggctataactgcattcagttaatggcaatcatggagcatgcatactacgcctcattcgggtaccaaataaccagcttcttcgcagctagtagccgatatggaacacccgaggaattacaggaactggtcgacactgcccattcaatgggcatcatagtgctgctggatgttgtccattcccacgccagtaagaacagtgctgatggcctgaacatgtttgacggcaccgattcttgttactttcactccgggccacggggcacacatgacttgtgggattctcgcctttttgcttattcctcttgggagatcctgcggtttctgttatccaatattaggtggtggttagaggagtaccgctttgacggcttccggtttgatggcgtgacttccatgctgtatcaccaccacggggtgggccagggctttagcggggactacagtgagtatttcggcctgcaagtggacgaagatgctctgacctacctgatgctggctaaccatctggtgcacaccctctgcccagactctataactattgctgaggacgtttctgggatgcctgccctctgctccccaatctcccaaggtggcggtggctttgattatcggcttgccatggcaataccagataagtggattcagctgttaaaagaattcaaagatgaggactggaacatgggcgatattgtgtacacactgaccaacagacgctacctggaaaaatgtatcgcttacgccgagtcccacgaccaggctctggtgggtgacaagtccctcgcattctggttaatggacgctgaaatgtatactaacatgtctgtgctcaccccctttacccccgttatagacagaggcatccagctgcacaagatgatcagactgattacacatgggctggggggtgagggctatctcaattttatgggcaatgagttcggacacccagagtggttagacttccctcggaaagggaacaacgagtcctaccattatgcccgccgccagttccacctgacagacgatgatctattacgctataaatttctaaataactttgatcgggacatgaaccggctcgaggagcggtacggctggctcgccgcccctcaggcctacgtttccgaaaagcacgaagggaataaaattattgccttcgagagggcaggcctgcttttcattttcaatttccacccctccaagagctacacagactatcgggttgggactgccctgccaggcaagttcaagatcgtcctagatagcgacgctgccgagtacggggggcatcaacggctggaccacagcaccgactttttcagcgaagcctttgagcacaacggcaggccttattccctcctggtgtatattccctcccgggtggcactcatcctgcagaatgtcgatctgcccaac

SEQ ID NO: 12734 - DNA, 2106 bp, synthetic construct
  misc_feature 1..2106: note = source = /note="Description of Artificial Sequence: Synthetic coding sequence"
  source 1..2106: mol_type = other DNA
atggcagcgccgatgacccctgcagccaggccagaggactatgaggccgcactgaatgccgccctggccgacgtgcctgaacttgcccggttgctggaaatcgacccctatctcaagccgtacgccgtggattttcaacggcgctacaagcaattcagccagatcctcaagaatatcggagagaacgagggagggatcgacaagttttcacgcggttacgagtcgttcggcgtccacagatgcgcggacggcggactgtactgcaaagaatgggctcctggagcagaaggggtctttctgactggggacttcaacgggtggaatccgttctcatacccatacaagaagctggattacggaaaatgggaactctacatcccacccaagcaaaacaaatcagtgctcgtgccacacggatccaagctcaaagtcgtgattacctctaaatcgggagagatcctgtaccgcatctccccgtgggcgaagtacgtggtgagggaaggcgacaatgtcaactatgactggattcactgggacccagagcactcgtatgagtttaagcactcgcgcccgaagaagcccaggtcattgagaatctatgagtcacacgtgggtatctcctcgcatgaaggcaaggtcgcatcttacaagcatttcacttgcaatgtgttgccccggattaagggactggggtacaattgcatccagcttatggcgatcatggaacatgcttactacgcctcattcggttaccagattacctcgttcttcgcggcaagcagcaggtacggaactccggaagaactgcaggaacttgtggacaccgcccactcaatgggaatcatagtgctgctggacgtggtgcactcgcacgcgtccaagaattcggctgatggattgaatatgtttgacggaactgatagctgctacttccactcaggcccgcggggaacccacgatctgtgggactcgcggttgttcgcctactcatcttgggagattctccggtttctgttgtcgaacattcggtggtggctggaggagtaccggttcgacggatttcggtttgacggggtgactagcatgctctaccatcaccacggcgtcggacagggcttctccggagattattccgaatacttcggattgcaagttgacgaagatgccctgacctacctgatgctggctaaccatctggtgcacaccctgtgtccagatagcatcaccatcgccgaagatgtgtccggaatgccggccctctgctccccaatctcacaaggtgggggcggattcgattaccgcctggcaatggcgatcccggataagtggatccagcttttgaaggagttcaaagacgaagattggaatatgggagacatcgtgtacaccctcactaacagaaggtaccttgagaagtgtatcgcttacgccgagtcacacgatcaagcccttgtgggtgacaaatccctggcgttctggttgatggacgcggagatgtacaccaacatgtccgtgctcaccccgttcactcccgtgatcgaccgcggtattcagctccacaagatgattaggctgatcactcatggacttgggggagaaggatacctgaatttcatgggcaacgaattcggccacccagagtggctggacttcccgcggaagggaaacaacgaatcttatcactacgccagacgccagttccacctcactgacgacgatttgctgagatacaagtttctgaacaactttgatcgggatatgaaccgcctcgaagagcggtacggatggctggcggcgccacaggcttacgtcagcgaaaaacacgaaggaaacaaaatcattgccttcgagcgggcgggactcctgttcatctttaacttccacccatcaaaatcgtacaccgattaccgcgtcggaaccgcactccctggcaaattcaagatcgtccttgattccgacgccgcagagtacggtggacaccagagactcgatcattcgaccgactttttctcagaagcattcgaacacaacggacgcccttactcgctgctggtgtacatcccaagccgagttgccctgatccttcaaaatgttgacctgcccaac

SEQ ID NO: 12735 - DNA, 2106 bp, synthetic construct
  misc_feature 1..2106: note = source = /note="Description of Artificial Sequence: Synthetic coding sequence"
  source 1..2106: mol_type = other DNA
atggccgctccaatgaccccggcggccagaccggaggattacgaggccgcactcaacgccgcgctcgcggacgtgcctgaactggcccgcctgctggaaatcgatccgtacctgaagccgtacgccgtggattttcagcggcgctacaagcagttctcgcaaatcctgaagaacatcggcgagaacgaaggtgggatcgacaagttctccagaggatatgagagtttcggagtgcataggtgcgccgatggcggcctgtactgcaaggaatgggcccccggggcggaaggtgtgtttctcacgggcgactttaacgggtggaatcctttctcatacccgtacaaaaagctggactacggtaaatgggaactgtacattccgcctaagcagaacaagtcagtgctggtgccgcacggatccaagctcaaggtcgtgatcacttccaaatccggggaaatcctgtaccgcatctccccgtgggcgaagtacgttgtccgcgagggtgataatgtcaattacgactggatccactgggatcctgagcatagctacgaattcaaacactcgcgaccaaaaaagccgagatcgcttcgcatttacgaatcacacgtcggcatctcgtcacacgaaggaaaggtggcctcgtacaaacattttacgtgcaatgtcctcccaagaatcaagggactgggatacaactgcatccagctcatggccattatggaacatgcgtactacgcctcgtttggataccagatcaccagcttcttcgcggcatcgtcgagatacgggaccccggaggaactccaggaacttgtggacactgcgcattcaatgggaatcatcgtactgctcgacgtggtgcattcccatgcctctaaaaacagcgccgacggcctcaacatgttcgacggaacggactcctgttactttcattcaggaccgaggggtacccatgacctctgggatagccgcctcttcgcatacagcagctgggagattctgcgattcctgttgtcaaatatccggtggtggctggaagagtaccggttcgacgggttccggtttgatggcgtgacttccatgctctaccaccaccacggagtgggacaaggcttcagcggtgactacagcgaatacttcggactgcaagtggacgaggatgctttgacttatctgatgctggctaatcacctggtgcatactctttgtcccgacagcataactatcgccgaggacgtctcgggaatgccggctctctgctcccctatttcgcagggcggcggaggattcgactacagactggctatggcgatccctgataaatggatccaactgctgaaggagttcaaggatgaggactggaacatgggagatatcgtgtacactcttactaacaggcggtacctcgaaaagtgcatcgcatacgcagaaagccacgaccaagcactcgtgggcgataagtccctggccttttggctgatggatgcagaaatgtataccaatatgtcggttctgaccccgttcaccccagtgattgacaggggaatccagctgcataagatgatccgcttgatcacccacgggttgggaggagagggatacctcaacttcatgggaaacgagtttggacatcctgaatggctggattttcccagaaaaggcaataatgaatcgtaccactacgcgcggcggcaattccacctgaccgacgatgacctccttcgctataagttcttgaacaacttcgatcgcgacatgaaccgcctcgaagagcggtacggatggcttgcggccccacaggcttacgtctcagagaagcacgaaggcaacaaaatcatcgcattcgaacgggcaggactgctgttcatcttcaacttccacccaagcaagtcgtacaccgactaccgcgtcggcaccgcacttcccggaaagttcaaaattgtcctcgactccgacgctgccgaatatggagggcaccagcgcctggatcactctactgacttcttctccgaggcttttgagcacaatggtcgtccatactccctgttggtctacatcccatcacgggtggccctgatcctgcagaatgtggacttgccgaac

SEQ ID NO: 12736 - DNA, 2106 bp, synthetic construct
  misc_feature 1..2106: note = source = /note="Description of Artificial Sequence: Synthetic coding sequence"
  source 1..2106: mol_type = other DNA
atggcagccccgatgactcccgccgcccggccggaggactacgaagctgcgcttaacgccgccctggcagacgtgcctgagctcgcgcgcctcttggagatcgatccatacttgaagccttatgctgtggacttccaacgtcggtacaagcagttctcgcagatcctgaagaatatcggagaaaacgaaggaggcatagataagttttcccgcggctacgaatcgtttggggtgcaccgctgtgcggatggtggattgtactgcaaggaatgggcccccggtgcggagggcgtgtttctgactggtgactttaatggctggaacccattcagctacccgtacaagaagttggactatggcaaatgggagctgtacatcccgccgaagcaaaacaagagcgtgctggtcccacacggcagtaaactcaaagtggtgattacgtccaaatcaggagagatcctctaccgcatcagcccgtgggccaagtacgtggtgcgagaaggtgataatgtcaattatgactggatccattgggacccggaacattcgtatgagttcaaacattcgcggcctaagaaacctcgctccctccggatctacgagtcgcacgtcggaatcagctctcatgaaggaaaggtggcgtcctataagcatttcacctgcaacgtgctccctagaattaaggggctcgggtacaactgcatccagctcatggccattatggaacacgcctactacgcatccttcggttaccagatcacctcctttttcgccgcgagctcgaggtatggaaccccggaggaacttcaggaactggtggataccgcccactcaatgggaatcatagttctgctggatgtagtccactctcatgcctccaaaaactctgccgacggactgaacatgtttgatggcactgattcctgctacttccattcaggacctcgcggtacccacgacctgtgggactcaaggttgttcgcatactcgtcgtgggagatcctgcgcttcctgctgtcaaatatccggtggtggctggaagaataccgtttcgatggttttagatttgacggagtgacttccatgctctaccatcaccatggagtgggacaagggttttcaggcgactacagcgagtacttcggacttcaggtggatgaggacgcccttacgtatctcatgctcgcaaatcacctcgtgcacaccctgtgtccggattcgatcactatcgctgaagatgtttcaggaatgccagctctctgcagcccgatctctcagggaggaggaggtttcgactaccggctcgcgatggccatacccgataaatggattcaactgcttaaggagttcaaggacgaagattggaatatgggagatatagtctacactctgactaacaggcggtacttggaaaagtgcatcgcttacgcggaatcccacgaccaggcgctcgtgggggacaagtcccttgcgttctggctgatggacgcggagatgtacacgaatatgtcggtgctcactccatttacgccggtgatcgaccggggaatccagctgcacaagatgatccgtttgatcactcacggactgggcggggaaggctaccttaacttcatgggaaacgaattcggacaccctgaatggctggactttccaaggaagggaaacaacgaaagctaccactacgcccggagacagttccatctcaccgatgatgatctgttgaggtacaagttcctgaataacttcgacagagacatgaatcgattggaagagagatatggttggctcgccgcacctcaagcgtacgtcagcgagaagcacgagggcaacaagatcattgctttcgagcgggccgggctgttgtttatcttcaacttccacccatcaaaatcgtataccgactacagggtcggaactgccctgccgggcaagttcaaaattgtgttggactccgacgcggctgaatacggagggcatcaacgcctggatcattccaccgacttcttcagcgaggcctttgaacacaatggcagaccctactcgctcctggtctacattccgagccgcgttgcgctcattttgcagaacgtggacctgccaaac

SEQ ID NO: 12737 - DNA, 2106 bp, synthetic construct
  misc_feature 1..2106: note = source = /note="Description of Artificial Sequence: Synthetic coding sequence"
  source 1..2106: mol_type = other DNA
atggctgcccccatgacgcccgcagccaggcctgaggactacgaggccgcactaaatgcagccctagcggacgtgccggaactcgctcggctgctggagattgatccatacctaaaaccttatgctgtggatttccagaggagatacaagcaatttagccagatcttaaagaatatcggagagaacgaagggggtatcgataagttcagtaggggttatgagtcttttggcgtacaccgatgcgcagacggcggcctgtattgcaaagagtgggccccaggcgccgaaggggtattcctcacgggggatttcaacgggtggaacccgttctcatacccctacaaaaaactagattacggcaaatgggagctctacatcccaccgaaacaaaacaagagcgtgcttgtccctcacgggagcaagttgaaggtggttattacctcaaagagtggcgagatcctttatcggatctcaccctgggccaaatacgtcgtcagggagggggataatgtaaactacgattggatccactgggacccggagcactcatacgaatttaagcactctagacctaagaagccacggtctctgcggatatacgagagtcacgtgggcataagcagtcatgaaggtaaagtcgcaagctataaacattttacctgtaacgtgctgccacggataaaaggccttggctacaactgcatccagctgatggctatcatggagcatgcctactatgccagttttggctaccagatcacctctttttttgcagcgagttctagatatggcacacccgaagagctgcaagaactggtggacacagcccacagcatgggtattatagtcttgctggatgttgtccacagtcatgccagtaaaaactccgccgatggcctgaatatgttcgatggcactgatagttgctactttcactctggacctcgcgggactcacgacttatgggatagtaggctgtttgcctacagcagttgggagattctccggttcctcttaagtaacatacgttggtggcttgaggaataccggtttgatggtttcaggttcgacggcgttacctcaatgctctatcaccatcatggcgtggggcaggggttctccggcgactacagtgagtacttcggactgcaggtcgatgaagatgcacttacctacctcatgcttgccaatcacctggtccacacgctctgtcctgatagcatcacgatcgctgaagatgtcagtggaatgcctgccctgtgctctcccatttcacagggggggggtgggttcgactatcgcctggccatggctattccagataaatggatccagctgttgaaggaattcaaagacgaggattggaatatgggcgacatcgtgtacacacttacaaacagaagatacctcgaaaagtgcattgcctatgcagagtcccacgatcaggccctggtcggcgacaaaagtctagccttttggctgatggacgctgaaatgtacacgaacatgtcagttctcacaccttttactcccgttattgatcgcgggatccaactgcacaagatgatccggctgattactcatggcttgggcggggagggctacctgaacttcatggggaacgaattcggacacccggagtggcttgatttccctagaaaggggaacaatgaaagttatcattacgcacgcagacaatttcatctgacagacgatgatctgctgaggtacaaattcctcaataacttcgaccgagatatgaaccgactggaagagcgctacggatggctggccgccccgcaggcatacgtatccgagaagcacgaaggcaacaagattattgcattcgagagagcaggcctcctgtttatcttcaactttcacccatcaaagtcttacacagactatcgagttgggaccgcattacctggaaagttcaagatcgtactcgattctgatgcagcggaatatggaggccaccaaaggcttgatcactccaccgacttcttctcagaagcttttgaacacaacggaagaccctacagcctccttgtgtacatcccatccagggttgcccttattcttcagaacgtcgacctcccgaac

SEQ ID NO: 12738 - DNA, 2106 bp, synthetic construct
  misc_feature 1..2106: note = source = /note="Description of Artificial Sequence: Synthetic coding sequence"
  source 1..2106: mol_type = other DNA
atggccgcccctatgacgccagccgccagaccagaggattacgaagccgccctcaatgccgcgctggctgacgtgccagagttggcacggctgctcgaaatcgacccgtacctgaaaccgtatgccgtggacttccagcgcagatacaagcagtttagccagattttgaagaatatcggagaaaatgaagggggaatcgacaagttcagccggggatacgaatcctttggagtgcatcggtgcgcggatggaggtctgtactgcaaggaatgggctccaggggctgaaggggtattcctgaccggagacttcaacggctggaaccctttcagctacccctataagaaattggactacggcaaatgggagctctacatccctccgaagcagaataagagcgtgctggtcccgcacggatcgaagctcaaagtggtgattacgtcgaaatccggagagatcctttacagaatctcgccatgggctaaatacgtcgtgagagaaggagacaatgtcaattacgattggatccactgggacccggaacattcgtacgagttcaagcattcgcgccccaagaaaccgaggtcactgcgcatttatgagagccacgtgggaatttcctcgcatgaaggaaaggtggcttcatacaaacactttacctgcaatgtcttgccacggatcaagggattgggatacaactgtatccaactgatggctatcatggaacatgcctactacgcatcatttggctaccaaatcacttcgttcttcgccgcgagttctcggtacggtacgcccgaagaactgcaagaactggtggacactgctcactctatgggcatcatcgtgctgctggacgttgtgcattcccacgcatcgaagaactcagccgatggacttaacatgttcgatggcactgactcgtgttacttccacagcgggccgcggggaactcacgacctctgggactccagattgttcgcctacagctcatgggaaatactgagatttctgctgtcgaatatccgctggtggctcgaagagtacagatttgacggattccggttcgacggggtgacgtcaatgctctaccaccatcacggggtgggacagggatttagcggcgactactcggagtactttggcctgcaggtggatgaagatgccctgacctacttgatgctggctaaccaccttgtgcacactctctgcccggactcaatcacgatcgcggaggatgtgtcaggaatgccggcactctgctccccaatctcgcaaggcggtggagggttcgactaccgcctggctatggcaatcccggataaatggatccaactcctgaaggagttcaaggacgaagattggaacatgggagacattgtctacaccctgaccaaccggcggtacctcgaaaagtgtatcgcttacgccgaatcgcacgaccaagccctggttggtgataagagcctcgccttctggctcatggacgctgagatgtatactaacatgtcggtcctgactcctttcaccccagtgatcgatcggggaatccagttgcacaagatgatcaggctgatcactcacggactcggcggcgagggctacctgaactttatgggaaacgaattcggacacccggaatggctggatttcccgaggaagggcaacaatgagtcgtaccactacgcacggaggcagttccacctgactgacgacgatctgctgcgctacaaattcctcaacaattttgatagagatatgaataggttggaagagcggtacggatggctggccgcgccgcaggcatacgtcagcgagaagcacgagggaaataagatcatcgcatttgaacgcgccgggctcctcttcatctttaacttccatccatcgaaatcgtacactgattaccgcgtcggtactgctctgccgggaaagttcaagatcgtcctggacagcgacgcagccgaatacggaggtcaccagcgcttggatcattcgaccgacttcttctccgaagcatttgagcataatggacgcccttactcgttgctggtctacatccctagccgtgtggctctcatcctccaaaatgtggacctgccgaat

SEQ ID NO: 12739 - DNA, 2106 bp, synthetic construct
  misc_feature 1..2106: note = source = /note="Description of Artificial Sequence: Synthetic coding sequence"
  source 1..2106: mol_type = other DNA
atggccgcacctatgaccccggcggcacgaccagaagattacgaagcagcacttaacgccgcactcgcagatgtgccagagttggcgagactgctggaaatcgatccataccttaaaccttacgcggtcgactttcaaagacgctacaagcaattctcccaaattcttaagaacattggggaaaacgagggaggtatcgacaagttctcccgcggatacgagagcttcggcgtgcatcggtgtgcagacggtggactgtactgcaaagaatgggcaccgggagcagaaggcgtctttctcaccggagatttcaacgggtggaacccattctcctacccctacaagaagctcgactacggcaagtgggagctctatattccgccaaaacagaataagtcggtgcttgtgccacacggatccaaactgaaggtcgtgattacgtccaagtcgggtgaaattctttacagaattagcccgtgggcaaaatacgtggtgagggagggtgacaatgtgaattacgattggattcattgggatcccgaacatagctacgagttcaaacattcacggcctaagaagcctcggtcactgcgcatatacgaatcacacgtcggtatctcctcgcatgaaggtaaagtcgccagctacaagcattttacctgcaatgtgctgcctcggattaaaggactcggatacaactgcatccaactgatggccataatggaacacgcttactacgcatcgtttgggtaccagattacgagcttctttgcggcctcatcacgctacgggactcctgaggagcttcaagaactggtggacacggcacactccatgggcataattgtgctgctcgacgtcgtccattcgcatgcgtcaaagaactcggcagatggattgaacatgtttgatggcaccgattcatgttactttcactcaggtccaagaggaacccatgatctttgggattctcggctgtttgcatactcctcatgggagatcctcagatttcttctttccaatatccgatggtggctggaggaatacaggtttgatggattccggtttgacggggtgacttccatgctgtaccatcatcacggagtgggtcaaggattctctggagactacagcgaatactttggactgcaggtggatgaagatgcactgacgtaccttatgcttgcaaaccatttggtccacaccctgtgtccggatagcataacgatcgccgaggatgtcagtggtatgcccgccctttgttctcccatttctcaaggaggaggaggttttgattataggctggccatggctataccagacaagtggatacagctgctcaaggaattcaaggatgaggattggaacatgggagacattgtttatacgctgaccaatcgaagatacctggagaagtgtattgcatacgccgagtcccatgaccaggccctggtcggtgacaagtcgcttgcattttggttgatggacgccgaaatgtacactaacatgagcgttctgacccctttcacgcctgtgattgatcgtggaatccagcttcacaagatgatcagactcataacgcacggtctgggaggggaaggctacctcaacttcatgggcaacgaattcggtcatccggaatggttggatttccctagaaaaggaaataacgaatcctaccattacgcccggcgacagtttcacctcaccgatgatgacctccttagatataagttcctgaacaactttgatcgggatatgaaccggctggaggaacgatacggatggcttgcagcgcctcaggcatacgtctccgaaaaacatgaaggcaataagataattgcatttgagagagccgggctgctgttcattttcaactttcatccatcaaaatcgtacaccgactacagagtgggaaccgccctcccaggaaagtttaagattgtgttggactcggacgcagcggaatacggcgggcaccaaagactcgatcatagcaccgactttttctccgaagcatttgaacataatggtaggccttactcgctgcttgtgtacatcccttcaagagtggcgctgattcttcagaatgtggaccttcccaac

SEQ ID NO: 12740 - DNA, 2106 bp, synthetic construct
  misc_feature 1..2106: note = source = /note="Description of Artificial Sequence: Synthetic coding sequence"
  source 1..2106: mol_type = other DNA
atggcggcaccgatgacccctgcagcaaggcccgaggactacgaggcagccctgaacgcagcccttgccgacgtcccggaactcgcgagactgcttgaaatcgacccttaccttaaaccttacgcggtcgacttccaaaggcgatacaagcaatttagccagattttgaagaatataggagaaaacgagggcggaatagataagttctcccgggggtacgaatcgttcggagtgcaccgatgcgcagatggaggtctgtactgtaaagaatgggcaccgggtgccgaaggggtgttccttacgggagacttcaacgggtggaacccattctcatatccatacaaaaagctggattacggaaagtgggagctgtatattccgccgaagcaaaacaaatcagtgttggtgccgcatggctcgaagctcaaggtcgtcattacgtcaaagtcgggtgagattctttatcggatctcaccttgggcaaagtacgtggtgagggaaggggacaacgtgaattatgattggatccattgggacccagagcactcctacgagtttaagcactcgcgccctaaaaagccacggtcccttcgcatttatgaaagccatgtcggtatctcttcacatgaaggtaaagtagcgtcatacaagcactttacttgcaatgtgttgccgagaatcaagggtctggggtataactgtatccaactgatggctattatggaacatgcatactacgcttcgtttggatatcagatcactagcttcttcgctgcatcgtcaagatacggaactcctgaggagcttcaggaactggtcgacactgcacatagcatggggattattgtgctgctggatgtggtccactcccacgcatcgaagaatagcgcagatgggttgaacatgtttgatggtaccgactcgtgttactttcattcgggacccagaggcacccatgacctgtgggactccagactctttgcatatagcagctgggagattcttcgattcctgctttcgaacattcggtggtggctcgaagaataccgctttgatggcttcagatttgacggagtgacctcgatgctctaccatcatcatggagtgggccagggattttccggtgattacagcgaatactttggtttgcaagtggatgaagatgcacttacttacctcatgcttgcaaaccacctggtgcatactctgtgtcccgattcgattaccatcgcagaagatgtttctggaatgccagcactttgcagccccatttcccagggtggaggtggatttgattaccgcctggcaatggcaatacccgataagtggattcaattgctgaaggagtttaaagatgaggattggaacatgggagatatcgtttacactctcaccaaccgccgctacctcgagaaatgtattgcttacgctgaatctcatgaccaggccctggttggagacaaatcacttgcattctggcttatggatgcggagatgtacacgaacatgtcagtgctgacccctttcacccctgtcattgatcgcggaattcaacttcataagatgattagacttataactcatggtttgggtggagaaggttacctgaactttatgggaaatgaatttggacatccagagtggcttgatttccctcggaaagggaataatgaaagctatcattacgctcgccgccagtttcaccttaccgacgatgacctcttgcgatacaagttcctgaacaattttgaccgcgatatgaatcgactggaggaacgatacggctggctggccgcaccacaagcatacgtcagcgaaaagcatgaaggcaacaagatcatagccttcgaacgcgctggattgctcttcattttcaactttcacccgtctaagtcctacaccgattacagagtgggtaccgcacttccaggaaaattcaagattgtgcttgattcagacgcagcagagtacggtggtcaccaaaggcttgaccatagcaccgactttttctcagaagcctttgaacataacggtagaccttactcgcttctggtgtacatcccatcgcgggtggcactgatcctccagaatgtggatctgcctaac

SEQ ID NO: 12741 - DNA, 2106 bp, synthetic construct
  misc_feature 1..2106: note = source = /note="Description of Artificial Sequence: Synthetic coding sequence"
  source 1..2106: mol_type = other DNA
atggccgctcctatgactcccgcagcaagaccagaagattatgaagccgcgctcaatgctgcgcttgccgatgtgcccgagctcgcacgccttctcgagattgacccatacctcaaaccttacgctgtggactttcagcgcaggtacaaacaattttcgcagatactgaaaaacattggagaaaacgagggtggtatcgataagttttcccgcggatacgaatcgtttggagttcatcgatgtgcggacggcggactgtactgtaaggaatgggcaccaggggccgagggagtgttccttactggagactttaatggttggaaccctttctcctatccttacaagaaactggattacggtaaatgggaactttacatcccaccaaagcaaaacaaatcggtgcttgtcccacatggatccaagctgaaagtggtgattacctcgaaatcgggggaaattctgtaccgcatatctccctgggcaaaatacgtggttagagaaggtgataacgtgaattacgattggatccattgggatcctgaacattcttacgagtttaagcattcgcgtcctaagaagcctcggtcgctcagaatatacgaaagccatgtgggaatctcatcccatgagggtaaggtcgcctcgtacaagcacttcacctgcaacgtcctgcctcggatcaagggactgggctacaattgtattcaacttatggcaataatggaacacgcatactacgcgtcatttggttatcaaattaccagctttttcgcagcctcgtcgcggtacggaactccagaagagctgcaggagcttgtggacaccgcacactcgatgggtatcattgttcttctggatgtcgtccattcacatgcctcaaagaattccgccgatggcttgaacatgtttgacggaaccgacagctgctactttcactcggggccgcggggaactcatgacctctgggattcgaggcttttcgcttattcgtcatgggaaatccttcggtttcttctgtcgaacattcggtggtggctggaagaataccgtttcgatgggtttcgctttgatggcgtgacttcaatgctctaccaccaccacggagtgggccagggttttagcggtgattactcggaatacttcggacttcaagtggatgaggacgccttgacttatcttatgctcgcgaaccatctggtgcataccctttgtccggactcgattacgatagcagaggacgtgtccggtatgcctgcactttgctctcctatttcgcaaggaggcggggggttcgactaccggctggcaatggccataccagacaagtggatccagctgctgaaggagttcaaggatgaagattggaatatgggcgacattgtttacaccctgaccaatcggagataccttgaaaagtgtatagcatacgcagagagccacgatcaagcactggtcggagataagtcccttgcattttggcttatggacgcagaaatgtacactaatatgtcagtcctcactccctttacccccgtcattgatagagggattcaacttcataagatgattcgcttgataacccacggactgggcggagagggatacctgaactttatgggaaacgaattcgggcatcccgagtggcttgattttccgaggaaaggtaacaacgaaagctaccactacgcgcgcaggcagtttcacttgactgacgatgatcttcttcggtacaagttcttgaacaatttcgatcgcgatatgaacaggcttgaggagagatacggatggctggcagcaccacaagcatacgtgtccgagaagcatgagggcaacaagattatcgcctttgaacgagcagggctgttgttcatattcaactttcatcccagcaaatcgtatacggattaccgcgtgggtaccgcacttcctggcaagttcaagattgtgcttgatagcgacgcagcagagtacggtggacatcagagactggaccactccactgatttctttagcgaggcatttgaacataatggtcgtccgtactctctgctggtgtacattccttcccgggtggcattgattctgcaaaatgtggatctcccgaac

SEQ ID NO: 12742 - DNA, 2106 bp, synthetic construct
  misc_feature 1..2106: note = source = /note="Description of Artificial Sequence: Synthetic coding sequence"
  source 1..2106: mol_type = other DNA
atggcagcccctatgaccccggcagcgcgcccagaagactacgaagccgccttaaatgctgcattggccgacgtgccagagctcgccaggctcctggagatagacccctaccttaagccctacgccgtggatttccagaggcggtacaaacagttttcacagatcctgaagaacattggtgaaaacgaggggggcattgacaagttctctcggggttacgagtcatttggcgtccatcgctgcgcagacggcgggttgtattgtaaggagtgggcgccaggggcggagggggtctttctgaccggagactttaatggctggaatcctttctcttacccctataagaagttagattacggaaaatgggagctgtatatcccacccaagcagaataagtcagtgctagtgccgcacggcagtaagctgaaggtagttatcacttccaaatctggcgaaatactatatcggatatctccttgggccaaatacgtggtgcgagagggtgataacgtgaactatgattggatccactgggatcccgagcactcgtacgagttcaagcatagcaggccgaagaaacccaggtcactccgcatatacgaaagccacgtgggcatctcaagtcacgagggcaaagtggcatcttataagcattttacttgcaacgtgcttccgaggatcaagggactgggctataattgtatccaactgatggcgataatggagcacgcctattacgcctcctttggttatcaaatcacctcgttttttgccgccagttctcgctacgggacacctgaagagctacaggagttggtggacacagcccattccatgggaattattgtgctcctggatgtggtgcattcgcatgcgtctaaaaacagtgccgacggcttgaatatgttcgatggcaccgacagttgctatttccatagtggaccacgcggtacgcacgatttgtgggattctcgactatttgcctatagctcttgggagattctccgatttctcctgtccaacattcgttggtggctcgaggaataccggttcgacggatttaggtttgatggtgtaaccagtatgctttatcaccatcatggcgtcggccagggcttcagcggtgactactccgaatacttcgggctgcaagtcgacgaagacgccttaacctaccttatgctcgccaaccatcttgtgcataccttgtgcccagattcaatcacaatcgcagaggacgtttccgggatgccagccctgtgtagcccaataagtcagggaggcggtggcttcgactacagattggccatggccattccggacaagtggatacagttgttgaaggagtttaaagacgaggattggaatatgggcgatattgtctatactctgaccaaccgtagatacctggagaaatgcatcgcatacgccgaatcgcatgaccaggcacttgtaggggacaagagtttggccttttggctgatggacgccgagatgtacaccaacatgagcgttttgacaccatttactcccgtcatcgaccgagggattcagctgcacaaaatgattcgtctcattacacacggcttgggcggcgagggatacctgaactttatggggaatgagttcgggcaccctgaatggttggattttccacgcaaaggaaataacgagtcataccactacgcacggcggcaatttcatctcactgatgatgacctgctgcggtataaattcctgaataatttcgaccgcgatatgaataggttggaggaacggtacggatggctcgctgctccccaggcctacgttagtgaaaagcacgagggtaacaaaattatagcattcgaaagagcaggattgctgttcatcttcaatttccacccttcaaaatcctacacagactatagagtgggaacggcattaccaggaaaattcaaaatagttctggactccgatgctgcagagtacggcgggcaccaacgtctagatcatagtactgactttttttctgaagccttcgaacacaatggacggccatatagtctcctagtctacatcccaagtagggttgcactgattctacagaatgtcgatcttccaaat

SEQ ID NO: 12743 - DNA, 2106 bp, synthetic construct
  misc_feature 1..2106: note = source = /note="Description of Artificial Sequence: Synthetic coding sequence"
  source 1..2106: mol_type = other DNA
atggcggcgccgatgacgccggcggcgcgtccggaagattatgaagcggcgttaaatgcggcgttagcggatgtaccggaattagcgcgattactagaaatagatccgtatttaaaaccgtatgcggttgattttcaacgtcgttataaacaattttcgcaaatactaaaaaatataggtgaaaatgaaggtggtatagataaattttcgcgaggttatgaatcgtttggtgtacatcgatgtgcggatggtggtctatattgtaaagaatgggcgccgggtgcggaaggtgtatttctaacgggtgattttaatggttggaatccgttttcgtatccgtataaaaaactagattatggtaaatgggaattatatataccgccgaaacaaaataaatcggtactagtaccgcatggttcgaaactaaaagtagtaataacgtcgaaatcgggtgaaatattatatcgtatatcgccgtgggcgaaatatgtagtacgtgaaggtgataatgtaaattatgattggatacattgggatccggaacattcgtatgaatttaaacattcgcgaccgaaaaaaccgcgttcgttacgaatatatgaatcgcatgtaggtatatcgtcgcatgaaggtaaagtagcgtcgtataaacattttacgtgtaatgtactaccgcgaataaaaggtttaggttataattgtatacaattaatggcgataatggaacatgcgtattatgcgtcgtttggttatcaaataacgtcgttttttgcggcgtcgtcgcgatatggtacgccggaagaactacaagaactagtagatacggcgcattcgatgggtataatagtactactagatgttgttcattcgcatgcgtcgaaaaattcggcggatggtttaaatatgtttgatggtacggattcgtgttattttcattcgggtccgcgtggtacgcatgatctatgggattcgcgtctatttgcgtattcgtcgtgggaaatattacgttttttactatcgaatatacgatggtggctagaagaatatcgatttgatggttttcgatttgatggtgtaacgtcgatgctatatcatcatcatggtgtaggtcaaggtttttcgggtgattattcggaatattttggtctacaagtagatgaagatgcgttaacgtatctaatgctagcgaatcatctagtacatacgttatgtccggattcgataacgatagcggaagatgtatcgggtatgccggcgctatgttcgccgatatcgcaaggtggtggtggttttgattatcgtctagcgatggcgataccggataaatggatacaattactaaaagaatttaaagatgaagattggaatatgggtgatatagtttatacgttaacgaatcgacgttatctagaaaaatgtatagcgtatgcggaatcgcatgatcaagcgctagttggtgataaatcgctagcgttttggttaatggatgcggaaatgtatacgaatatgtcggtattaacgccgtttacgccggtaatagatcgtggtatacaactacataaaatgatacgtttaataacgcatggtttaggtggtgaaggttatttaaattttatgggtaatgaatttggtcatccggaatggttagattttccgcgtaaaggtaataatgaatcgtatcattatgcgcgtcgacaatttcatttaacggatgatgatttattacgatataaatttctaaataattttgatcgtgatatgaatcgattagaagaacgatatggttggctagcggcgccgcaagcgtatgtttcggaaaaacatgaaggtaataaaataatagcgtttgaacgtgcgggtctattatttatatttaattttcatccgtcgaaatcgtatacggattatcgtgtaggtacggcgttaccgggtaaatttaaaatagttctagattcggatgcggcggaatatggtggtcatcaacgtctagatcattcgacggattttttttcggaagcgtttgaacataatggtcgtccgtattcgttattagtatatataccgtcgcgtgttgcgttaatattacaaaatgtagatctaccgaat

SEQ ID NO: 12744 - DNA, 2106 bp, synthetic construct
  misc_feature 1..2106: note = source = /note="Description of Artificial Sequence: Synthetic coding sequence"
  source 1..2106: mol_type = other DNA
atggcggctccaatgacgccggctgccagaccagaagattatgaggcggctctgaacgcagcacttgcggatgtgccggagctcgctcgtctgttggaaattgatccttaccttaagccatatgccgtagacttccaaagacgctataaacaattttcgcagattctgaagaatatcggagaaaatgagggaggaatcgataagttttcaagaggatatgaatcattcggagttcacagatgcgcggatggaggtctgtattgtaaggaatgggctcccggagcagaaggagtattcttgacaggagatttcaatggatggaatccattctcgtatccttacaagaagcttgactatggcaagtgggagttgtacataccgcccaaacagaataaaagcgtgttggttcctcacggtagcaagcttaaggtggtgattacttcgaagtcaggagaaatactctatagaatttctccatgggctaaatacgtcgtccgcgagggagataatgttaattacgactggattcactgggatccggaacacagttatgagtttaaacattctagaccgaaaaagcctagatcattgcgtatttacgagagtcacgttggaattagttcgcatgaagggaaagttgcctcatataagcactttacctgcaacgttttgccaagaatcaaaggccttggatacaattgcatacaactcatggccatcatggaacatgcctactacgcatcctttgggtaccagataacttctttcttcgcagcatcatcacgatacggcactccagaggaactgcaagaattggttgatacggctcatagcatgggaattattgtactccttgatgtggtccatagccacgcatctaagaactctgctgatggattgaacatgtttgatggaaccgattcgtgttatttccatagcggacctcgcggaacacatgatctgtgggattcgaggctctttgcgtacagctcgtgggaaattttgcgtttcttgctttcgaacataagatggtggctagaggaatacagattcgatggatttagattcgatggtgttacgtcaatgctttatcaccatcacggtgtgggacagggcttttcaggagactattctgaatactttggactgcaggtggatgaggatgctcttacatatcttatgctagcaaatcatttagtccataccttgtgtccagattcgattacaatcgctgaggatgtatctggaatgccggcactgtgctcaccaatttcgcaaggaggtggaggtttcgattatcgattggcaatggcaattcctgacaaatggattcaattgttgaaggaattcaaagacgaagattggaacatgggagatattgtgtacacattgactaacagacgatacttagaaaagtgtattgcttacgctgaatcccatgaccaggcacttgttggagataaaagtctcgcattctggttgatggatgctgaaatgtatactaatatgagcgtcttgacaccattcacacctgttattgatagaggtattcagttacataagatgattcgtttgatcacccatggacttggcggagaggggtaccttaattttatgggtaatgaattcggccatccagagtggcttgacttcccacgtaaaggaaacaacgaatcatatcactacgcaaggagacagttccatctaactgatgacgatcttttgagatataaatttcttaataacttcgatagagacatgaatcgccttgaggaaagatatggatggctggcagcgcctcaagcttatgtctcagagaaacatgaaggaaacaaaatcatagctttcgaaagagctggtctccttttcatcttcaattttcatccttctaaatcttataccgactacagggttggaactgcattgccaggaaaatttaaaattgtgcttgactccgatgccgctgaatatggaggacatcagcgtcttgatcattcgaccgattttttctccgaggccttcgaacacaatggacgtccatattcccttctagtgtatatcccaagccgtgttgctttaatcctgcaaaatgttgatttgccaaac

SEQ ID NO: 12745 - DNA, 2106 bp, synthetic construct
  misc_feature 1..2106: note = source = /note="Description of Artificial Sequence: Synthetic coding sequence"
  source 1..2106: mol_type = other DNA
atggcggctccaatgaccccggccgctcgaccggaggactacgaagcagcgttgaacgccgccctggcagatgtgcctgaactcgcccgactcctcgagatcgacccgtaccttaagccgtacgccgtggattttcaacgccggtacaagcagttttcccagatcctcaagaatatcggcgaaaatgaggggggaattgacaaattctcgcgaggatatgagtccttcggggtgcacaggtgtgccgatggaggactttactgcaaggaatgggctccgggcgctgagggagtctttcttactggtgacttcaacggctggaacccattttcgtacccttacaaaaagttggactacgggaaatgggagttgtacatcccacctaaacagaataagtcagtgctggtgccgcacggatccaagctgaaggtggtcatcacctcgaagtctggagaaatcctgtaccgcatttccccttgggcaaaatacgtcgtcagagagggcgacaatgtgaactacgactggattcactgggaccccgagcacagctacgaattcaagcactcgcgcccaaagaagccaaggtccctccgcatttacgaatcacatgtgggtatctcgagccatgaaggcaaagttgcctcctataagcatttcacctgcaatgtgctgccccgcatcaaaggccttggatataactgtatccaactgatggctattatggagcacgcctattacgcatcgtttggatatcaaatcacgtcattctttgcagcctcgtcacgttatggcactccagaagaactccaggagctggtggataccgcgcactcgatgggcatcatcgtactcctggatgttgtgcacagccacgcgtcgaagaattcagctgatggactcaatatgttcgatggtactgatagctgctactttcattccggaccacgcggcacgcacgacctgtgggactcgcgccttttcgcctattcctcttgggaaatcctcaggtttctcctgtccaatattcggtggtggttggaagaataccggtttgacggatttcgctttgatggggtgaccagcatgctttaccaccaccatggggtcggccaggggttttcaggtgattactccgagtactttgggctgcaggtcgacgaagatgcactcacctacttgatgctggcaaaccacttggtgcacacgctgtgcccggattccatcaccatcgcggaggacgtgagcggaatgcccgcactctgcagcccgatctcgcagggcggcggcggtttcgactaccggctcgcgatggccatccccgacaagtggatccaactcctgaaagagtttaaggacgaggactggaatatgggcgacatcgtgtacactctgaccaacagacgctacctcgagaagtgcattgcctacgctgagtcccacgatcaggccctggtgggagacaaatcgctcgctttctggctcatggatgctgagatgtacactaatatgtcggtgctgaccccttttaccccggtgattgaccgaggcatccaattgcataagatgatccggctgattactcacggactgggaggagaaggatacctcaacttcatgggcaatgaattcggtcaccccgagtggctggactttcctagaaagggcaataacgagtcctaccattacgctcggaggcagttccatctcaccgacgacgatctgctgagatacaagtttctgaacaacttcgatcgtgatatgaaccggcttgaagaacggtacggttggctggcggcgccacaggcctatgtcagcgaaaagcatgagggaaacaagattatcgcatttgagagagccggactcctgtttatcttcaacttccatcccagcaaatcctacactgattatagggtcgggaccgcactgccagggaagttcaagatcgtgctggattccgacgccgctgaatacggaggccaccagcgcctggaccactcaaccgacttcttctccgaagccttcgaacacaacggtagaccttactctctcctcgtctacatcccaagcagggtggccctgatcctgcagaacgtggatctcccaaac

SEQ ID NO: 12746 - DNA, 2106 bp, synthetic construct
  misc_feature 1..2106: note = source = /note="Description of Artificial Sequence: Synthetic coding sequence"
  source 1..2106: mol_type = other DNA
atggcggcgccgatgaccccggcagcaagacctgaagattacgaggccgccctcaacgcggcccttgcagacgtcccagaattggcccgcctcctggaaatcgatccttacctgaagccttacgccgtcgacttccaaagacgctacaaacagttctcgcaaatcctgaaaaacattggagagaacgagggtggcatcgataagttctcccgcggatacgaatcgtttggagtgcatcggtgcgctgacggcggcctgtactgcaaagagtgggcacccggggccgaaggagtgttcctgaccggggacttcaacggatggaacccattttcctacccgtacaagaaactggactacggcaaatgggaactctatatccccccgaagcagaataagtcggtgttggtcccgcacggaagcaagctgaaggtcgtgatcactagcaagagcggggagatcctttacagaatttcgccctgggcaaagtacgtcgtgagggaaggcgataacgtgaattacgactggatccattgggaccccgagcattcctacgagttcaagcattcgaggccgaaaaagcctcgctcacttagaatctacgaatcacatgtcggcatctcctcccacgaaggaaaagttgcctcgtacaaacacttcacgtgcaacgtgctgcccagaatcaaaggactcggctacaattgcatccaactgatggcgattatggagcacgcttactacgcgtcctttggctaccagatcacttccttctttgcagcttcatcacgctatggtacccccgaagaactgcaggaactcgtggatacggcacacagcatgggcatcattgtgcttctcgacgtggtgcactcacacgcgtcgaagaattcggcagacggactgaacatgttcgacggaaccgacagctgttactttcatagcggccctcggggaacccacgatctgtgggactccaggctgttcgcctactcgagctgggagatcctccggtttctgctgtcgaatatacgatggtggctggaggaataccggttcgatggattcagattcgacggagtgacctccatgctctaccatcaccacggagtgggccaggggttcagcggcgactactcggagtactttgggcttcaggtcgacgaggatgcactcacctacctgatgttggcaaaccacctcgtgcacaccctctgtcccgactccatcaccatcgccgaggacgtgtcaggaatgccagctctgtgctctccgatcagccaaggaggaggtggattcgattaccgcctggcgatggcaatccccgacaaatggatccagctgcttaaggaattcaaagacgaagattggaatatgggcgatatcgtgtacaccctgaccaatagacggtacctggagaagtgcatcgcctacgctgagtcacacgatcaagcgctggtgggcgataagtccctggctttttggctcatggacgccgaaatgtacactaatatgtccgtcctgactccgttcactcctgtgatagacagaggtatccaattgcataagatgattcgcctcattactcacggcctgggcggagaaggatatctgaactttatgggaaacgagttcggacaccccgagtggctggactttccacggaagggaaacaacgaatcgtaccattacgcccgccgccagttccatctcactgacgacgaccttctccgctacaagttcttgaataactttgatagagacatgaacagacttgaggaacgctacgggtggctcgcggccccgcaggcttacgtctcagagaaacatgagggcaacaaaatcattgcgttcgagagggccgggttgttgtttatctttaacttccatccatccaaatcgtacaccgactatcgcgtgggtaccgccctccctggaaaattcaagatcgtccttgattcggacgctgccgagtacggaggccatcaaaggttggatcattccacggacttcttctccgaggcgtttgaacataacggaaggccgtactcgcttctggtctacatcccgtcccgcgtcgcacttattctgcaaaacgtggacttgcctaac

SEQ ID NO: 12747 - DNA, 2106 bp, synthetic construct
  misc_feature 1..2106: note = source = /note="Description of Artificial Sequence: Synthetic coding sequence"
  source 1..2106: mol_type = other DNA
atggccgctccgatgaccccagccgcgcggcctgaagattacgaagctgcgctgaacgcggccctggccgacgtgcctgaattggctcggctgctggagattgacccgtaccttaaaccttacgcagtggacttccagcggcgctacaagcagttctcgcagattctgaagaacatcggagaaaatgagggaggaatcgacaagttctcgcggggatacgaatcatttggggtgcaccggtgcgctgacggtggcctgtactgcaaggagtgggcaccgggagccgagggagtgtttcttaccggcgacttcaacggttggaacccattttcatacccgtacaagaagttggactacggaaagtgggagctgtacatccctccgaagcaaaacaagtcggtgttggtcccgcacggatccaagctcaaagtcgtgatcacctccaagtcaggcgaaatcctgtaccgtatttccccatgggctaagtacgtggtgagagaaggagataacgtgaattacgactggatccactgggatcctgaacattcctacgaattcaagcactcacgcccgaaaaaaccccgctccttgagaatttatgagtcacacgtgggaatctcctcacatgagggaaaggttgcatcatacaaacactttacttgcaatgtcctgccgcggatcaaaggcctcggatacaattgcatccagctgatggcgatcatggagcatgcgtactacgcgtccttcggataccaaattactagcttcttcgccgcttcgtcgcgctacgggaccccggaggagctgcaggaactcgttgacactgctcatagcatgggtatcatcgtgctgctggacgtggtgcattcgcacgcgtcaaagaattcagccgacggactgaatatgttcgacggcaccgattcctgctatttccatagcggtccgagaggaacccatgacctgtgggacagcaggctttttgcctacagctcgtgggaaatccttagattccttctgtccaatatcaggtggtggctggaagagtacagattcgatggattcaggttcgacggtgtgacgtcaatgctgtatcaccaccacggggtgggccagggattcagcggagactactcggagtacttcggccttcaggtggacgaagatgccctgacgtacctgatgcttgcgaaccacctcgtgcatactttgtgcccggactcgatcaccatcgccgaagatgtctcaggtatgccggctctctgctcgcctatctcgcagggcgggggcggattcgattacagacttgctatggctattcccgacaagtggatccaactgctgaaggagttcaaggatgaagattggaacatgggagacattgtgtacaccctcactaacagaagatacctggagaagtgtatcgcatacgcggagtcgcacgatcaagctctggtcggagacaaatcgctggcattctggctcatggacgccgaaatgtacaccaacatgtccgtcctgaccccgttcactccggtgattgatagaggcatccagctgcacaaaatgatccggctgatcactcacggcctgggaggagagggatatctgaatttcatgggaaacgaattcggccacccggaatggctcgactttccaagaaagggaaacaacgagtcctaccactacgcccggcggcagttccatctgactgacgacgacctgctgcgctataagttcctgaacaactttgaccgggatatgaacagactcgaggagcgctacgggtggctggccgctcctcaagcgtacgtctcggaaaaacatgaaggtaacaagattatcgctttcgagcgcgccgggctccttttcatcttcaacttccacccaagcaaatcgtacactgattaccgcgtcggaactgcactgccaggaaagtttaagattgtgctggactcagatgcagcagagtacggagggcaccaacggctggatcattcaaccgactttttctcagaggctttcgaacacaacggacgcccgtattcgctgctggtgtacatcccaagcagggtggcgctcatactgcagaacgtggatcttcctaac

SEQ ID NO: 12748 - DNA, 2106 bp, synthetic construct
  misc_feature 1..2106: note = source = /note="Description of Artificial Sequence: Synthetic coding sequence"
  source 1..2106: mol_type = other DNA
atggcagctcctatgaccccagccgctaggcccgaggactatgaggcagccctcaatgctgcactggccgatgtccccgaactggctcgtctcctggaaatagacccatatctgaagccgtatgccgtggactttcaaagaagatataaacagttctcacaaatcctgaaaaacatcggggagaacgagggcggcattgacaagtttagcaggggatacgaatccttcggtgtgcaccgctgtgccgacggcggactgtactgcaaagagtgggctcctggggctgagggagtgtttcttaccggggattttaacggatggaacccgttcagttacccttataagaaattggattacggcaaatgggaattatacattccgcccaagcagaacaaatccgtcctggtgccccacggttcaaagctgaaagtagttatcacttctaagtcaggtgaaatcctttatagaatctctccttgggcaaaatacgtagttagagagggcgacaacgtcaactacgattggattcactgggaccccgagcactcatacgagttcaaacattcacggcctaaaaaacccaggtctctgcggatctacgagagtcacgtgggtatctcttcacatgaggggaaagttgctagctataaacactttacctgcaacgtcctcccacgcatcaaaggcctcggatacaactgcatccagttgatggcaattatggaacatgcatactacgcatccttcggatatcagatcacatccttctttgctgcctctagtcgctacggcacccctgaagagctccaggaactggtagataccgctcactccatggggatcattgtgctgctggatgtagtgcatagccacgcttccaaaaatagtgccgatggtctgaacatgttcgatggaactgatagttgctactttcatagtggaccgaggggaactcacgacctctgggactcacggctgtttgcatacagctcttgggagattttgagatttctgctgtccaacattaggtggtggttggaagaatatagatttgacggattccgatttgacggtgtcactagcatgctgtaccatcaccatggagtaggccaggggtttagtggagactattcggaatactttggccttcaggtcgatgaggatgctcttacctatttgatgctagcgaaccatctggtccacacactttgtccagacagtatcacaatagctgaggacgtttccggaatgccagctctctgttcaccaatctcccagggcgggggcggctttgattacaggctggcgatggctatccccgataaatggatccagctgctgaaagaatttaaagacgaggattggaacatgggcgacattgtgtataccctgaccaaccggcgctatctggaaaagtgcattgcatacgctgaaagtcacgaccaggcgctggttggtgataaatctctggcattctggctgatggacgcggagatgtacaccaatatgagcgtgcttaccccttttacaccagtcatagatcggggcatacaactccacaaaatgatcaggcttattacccacgggctgggaggcgagggatacctgaacttcatgggaaacgagtttggacatccagagtggctggacttcccaaggaagggaaacaatgagagctaccattacgctagaaggcagtttcatcttaccgatgacgatctgttgaggtacaaattcctgaacaactttgaccgggacatgaacaggcttgaggagcgttatggctggttggcagcaccccaggcttacgtctcagaaaagcacgagggcaataaaataattgcatttgagagagccggcctgctttttatttttaactttcatcccagcaaaagctacactgactatcgcgttggaaccgcattgcctggcaagttcaagattgtccttgacagtgatgccgcagagtacggtggccaccagaggcttgaccactccaccgatttcttttccgaagcatttgagcacaatggcagaccttactctctgcttgtgtacatccctagcagagtggcgctgattttgcagaacgtggatctccccaat

SEQ ID NO: 12749 - DNA, 2106 bp, synthetic construct
  misc_feature 1..2106: note = source = /note="Description of Artificial Sequence: Synthetic coding sequence"
  source 1..2106: mol_type = other DNA
atggccgcacctatgacaccagctgctaggcccgaagattatgaggccgctctaaacgcggcattggccgatgtacccgagcttgcgaggttgctagaaattgatccttatctcaaaccatatgccgtcgatttccagcgccgctacaagcagttttctcagatcctcaaaaatataggagagaatgaaggagggatcgacaaattttcacgcggatatgaatcatttggagttcacaggtgtgcggatggaggactgtactgcaaagaatgggccccaggagcagagggggtttttcttacaggggattttaacgggtggaacccattttcttatccctataaaaagctcgattacggaaaatgggaactttacatcccaccaaagcagaacaaatcggtactcgtgcctcacgggtcaaaactcaaggttgtaattacatccaaatccggagaaatactctatagaatatccccatgggctaagtatgtcgttagagaaggggataacgtcaactatgattggattcattgggatccagagcattcttacgaattcaaacacagtagaccaaagaaacctagatctctaagaatatatgaatcccacgtcggaattagtagtcacgaagggaaagtggcgagttataaacactttacatgtaacgtactcccccggattaaagggctaggatacaactgtattcagctgatggccataatggaacacgcatattacgcttctttcggataccagatcacatcgttttttgccgctagttccaggtatgggacacccgaagaactgcaggagctcgtcgacacagcccactcaatgggaattatcgttttactagatgtcgtccatagtcacgcatccaagaattcagcagatggacttaatatgtttgatggaacagattcatgctatttccactctggaccccggggaacacacgacctttgggattctaggctctttgcatattcttcttgggaaatcctccggtttcttctttctaacatcaggtggtggctcgaagaatataggtttgacgggttcaggtttgatggagttacaagtatgctctaccatcatcacggagttgggcaggggttttccggggattacagtgaatattttggacttcaggttgacgaggatgcgctgacatatctaatgcttgccaatcacctcgttcacactctgtgtcccgattccattactatcgccgaagatgtttccgggatgcctgctctgtgtagtcctatatcacaggggggaggagggtttgactatcggcttgccatggctattcccgataaatggatccagttgctgaaagaattcaaggatgaagattggaacatgggagacatcgtttatactctcacaaaccgccggtatctcgaaaaatgtattgcatatgccgagtcccatgatcaggctctagtcggagataaatcgctggcattttggctgatggatgccgagatgtatactaacatgagtgtcctaactcccttcactcccgtcatcgatcgagggattcagctccacaagatgatacgcctcatcacacatgggcttgggggagaaggatatcttaactttatgggaaacgaattcggacacccagaatggctggattttccaaggaaggggaataacgaatcttatcattatgcacgacggcagtttcatttgactgatgacgatctcttgagatataaattcctaaacaactttgatcgagatatgaaccgattagaagaacggtacggatggctggcagcacctcaggcctatgtgagtgagaagcatgaaggaaacaaaatcatagcctttgaacgcgccggacttctctttatttttaattttcacccctcaaaatcttatacagattatcgggttggaacagctctgcccgggaaattcaagatagtgcttgattcagacgcagccgaatatgggggacatcaaaggctagatcattccacagatttttttagtgaggccttcgaacacaatggaaggccctactctctgttagtttacataccttctcgagttgcactcatcctgcagaatgtagatctccctaac

SEQ ID NO: 12750 - DNA, 2106 bp, synthetic construct
  misc_feature 1..2106: note = source = /note="Description of Artificial Sequence: Synthetic coding sequence"
  source 1..2106: mol_type = other DNA
atggctgcccctatgacccccgctgcacgcccggaggattatgaggctgcgctgaacgccgctctcgccgacgtgcctgagctcgcacgtctccttgagatcgatccatacttgaagccctacgcggtcgacttccagcgtaggtacaagcagttttcccagatcctgaagaacatcggcgaaaacgagggcggcatcgataagttctctcggggctacgagagtttcggcgtgcaccgttgcgctgatggcggcctttactgcaaggagtgggcccccggtgccgaaggtgtgttcttgacgggcgattttaacggatggaaccccttttcttacccgtataagaagctggactacggaaagtgggagctctatatcccccctaagcaaaacaagtcggttctggtgccgcatggcagtaagctgaaggtggtcatcacctctaaaagcggtgagattctctatcgcatcagcccgtgggccaagtacgtggtgcgcgagggtgacaacgtcaattacgactggattcattgggaccctgagcatagctacgagtttaagcactctcgtcctaaaaagccccgctcgctgcgcatctacgagtcccacgtgggaatctccagccacgagggcaaggtcgcttcctataagcacttcacctgcaacgtattgccgcgtattaagggtttaggatacaactgtattcagctgatggcgattatggaacacgcatattacgcctcttttggataccagatcactagtttcttcgctgcaagttccagatacggtacccctgaggaactgcaggagctcgtcgacaccgcccattctatgggtattattgttctgctagatgtggttcacagccacgcaagtaaaaattcggctgacggcctcaacatgttcgatggcaccgattcttgctacttccactccggaccgagaggtacccacgatctttgggattcccgcctattcgcctattcctcgtgggagatcctccggttccttctttccaacattcgctggtggttggaagaatatcgttttgatggtttcagattcgatggggtcactagcatgttgtaccaccaccatggcgtgggtcagggcttctcaggcgattactctgagtactttggactccaagtcgacgaagatgcccttacctaccttatgctggcaaaccaccttgtccacaccctatgcccggacagcattaccatcgctgaggacgttagtggtatgcccgcgctctgttcgccaatcagccagggcggcggcggcttcgactaccgcctggctatggccatccctgacaagtggattcagctcttgaaggagttcaaggacgaggactggaacatgggtgacattgtgtacaccctgacaaaccggcgttatctggagaagtgcatcgcctacgcggagtctcatgaccaagccctggtcggtgacaagtctttggctttctggctgatggatgctgagatgtatacaaacatgtccgttttgacgcctttcacgcctgtgatcgatcgtggcattcagctgcacaagatgatccgcctgatcacacatggactcggcggagaggggtacttgaactttatgggtaacgaattcgggcaccccgaatggttggacttcccgcgcaagggaaataacgagtcttaccattacgcccggaggcaattccatctgactgacgacgatctgctgcgatacaaattcctgaataacttcgatcgcgatatgaaccggctggaggaacgctatggctggctcgccgcgccgcaggcctatgtctccgaaaagcatgagggcaacaagataatagcgtttgagcgcgcgggtctgctctttatttttaatttccaccccagcaagagctacaccgactaccgcgttggtaccgccctccccggcaagttcaagatcgtactagacagtgatgccgctgagtatggcggccaccaacgccttgatcactcgaccgacttcttctctgaggccttcgaacacaacggacgcccctactccctgctcgtttatattcctagccgtgtggcacttatcctgcagaacgtcgacctgccgaac

SEQ ID NO: 12751 - DNA, 2106 bp, synthetic construct
  misc_feature 1..2106: note = source = /note="Description of Artificial Sequence: Synthetic coding sequence"
  source 1..2106: mol_type = other DNA
atggctgccccaatgactcccgcggctcgccccgaagactatgaggctgctttgaacgctgccctggcggacgtgccagagctagctcggctgcttgaaattgacccttacttgaaaccatatgctgttgactttcagcgacggtacaaacagttttcccagatcctgaagaacatcggagaaaatgaaggaggcattgacaaattctcaagaggctacgagtccttcggagtgcatcgttgcgctgacggcggtctttactgtaaggagtgggccccaggggccgaaggtgtcttcctcaccggggatttcaacgggtggaacccattctcatacccatacaaaaaactggactacggcaagtgggagctgtacataccacccaagcagaataagagtgtgctggtgccacacggatccaaactgaaggtggttataacgtccaagtcaggagagatcttgtaccgtattagcccctgggcaaagtatgttgtgagagaaggagataacgtcaactacgactggatccactgggatcctgaacatagctacgagttcaaacacagcaggccaaaaaagccccgttccttgcgtatttatgaatcccatgtgggaatatcctcacacgaaggaaaagtggcatcttacaagcatttcacctgtaatgtcctgccccggattaaaggcctgggatataactgcattcagctcatggccattatggaacacgcttactatgcctcattcggctaccagattaccagttttttcgcggctagttccaggtatggaacaccagaggagctgcaggaactggtagatactgcccactcgatggggataatcgtgctgctggacgtcgtgcacagtcacgcttccaagaacagcgccgacggactaaacatgttcgacggcactgatagctgctacttccacagcggtcccagggggacacacgacctgtgggatagcagactgttcgcctacagcagttgggagattctgaggtttctgctaagcaacatccgctggtggctggaagagtaccgatttgacgggtttaggttcgatggagtgacgagcatgctgtaccaccatcatggtgtgggccaaggattttcaggggattactctgagtactttgggctgcaggtagatgaggatgctctaacatacttgatgcttgccaaccacctggtgcacaccctgtgcccagactccatcaccatagccgaggatgtgagtgggatgccagccctgtgctcccctattagtcagggagggggggggtttgactacagactcgcaatggccattcctgataaatggatccagctgttgaaggagttcaaggacgaggattggaacatgggtgatattgtgtacacactcactaacagacgttacctggagaaatgtatcgcctatgcagagtctcacgatcaggcactggtaggggataaaagccttgctttctggctgatggacgcagagatgtatactaacatgtccgtgttaactccttttacgcctgtcattgataggggcatccagctccacaaaatgattaggttgatcacacacgggctcggtggcgagggctacctaaactttatgggtaacgagttcggtcatccagaatggctggactttccccgaaaaggcaacaacgagtcgtatcattacgctaggagacagttccacctgaccgacgacgatctcctgcgctacaagtttttgaataacttcgacagagatatgaaccgtctggaagagcgatatggatggctggcagccccgcaagcgtacgtatccgaaaaacatgagggcaacaaaatcatagcgtttgagcgtgcagggcttttatttatattcaatttccacccgtccaagtcctatacagattatagagtgggcacggccctcccaggcaaattcaagattgtcctggactccgatgctgccgagtacggcggccaccagagactggatcactctactgatttcttcagcgaggcatttgagcacaacgggagaccctatagtttgctcgtttacatccccagccgagtcgcgctgatactgcaaaatgtagatctgcctaat

SEQ ID NO: 12752 - DNA, 2106 bp, synthetic construct
  misc_feature 1..2106: note = source = /note="Description of Artificial Sequence: Synthetic coding sequence"
  source 1..2106: mol_type = other DNA
atggcggcacccatgacgccagctgcgcgcccagaggactacgaggccgctcttaacgccgcattggccgatgtgcctgaacttgctcggctcctggagatcgacccatatctgaagccatatgccgtggactttcagagaaggtataagcagtttagccagattctgaagaacattggcgaaaatgaggggggcattgataagttcagtaggggttatgagagctttggagtgcatagatgcgcggacggcggcttgtattgcaaggagtgggcgccaggtgctgagggggtgttcctgaccggggactttaacggatggaatccattctcttatccgtacaaaaagctcgactatgggaagtgggagttgtatatccctccgaaacagaacaagtctgtgttggtgccccatggctctaagcttaaagtcgtaatcacatctaaatcaggagaaatcttgtatcggatctccccctgggccaaatacgtcgtcagagagggggacaatgttaattacgattggattcattgggacccagagcatagctatgaatttaagcactcacgccccaaaaaaccacgctctctgagaatctatgagtctcatgtgggaatttcttcccatgagggtaaagtggcatcctacaaacacttcacgtgcaacgtgctgcctcggatcaagggactcggatataactgtatccagctgatggccattatggagcatgcctattacgcctccttcgggtaccagatcaccagtttttttgccgcgagcagtaggtatggtacccctgaggaactgcaagagttggttgacaccgcacattctatgggtattattgtgcttctggacgttgtccactcccacgctagcaagaactctgccgacggtctcaatatgttcgacggaacagactcttgctacttccattctggcccccgaggcactcatgatctctgggactcccggcttttcgcctattcctcttgggagattctccggtttcttctgtctaacatacggtggtggcttgaggagtacaggttcgatggctttcggttcgatggggtgacatcaatgctgtatcaccatcacggtgtcggtcaagggttttccggtgactatagcgaatactttggactccaggtagatgaggatgcactgacatacctgatgctggctaaccatctcgtccacactctgtgtcccgattccatcacaatcgcggaagacgtctccgggatgccggcactgtgtagccccatttcccagggcggaggcggtttcgattaccgactggccatggcgattccggacaagtggattcaactgcttaaagaattcaaagacgaggattggaatatgggggacatcgtgtacactctgaccaaccgacgctatctggagaagtgtatcgcctacgcagagtcacacgatcaggcactggtgggtgacaagagtctggctttctggctgatggatgcagagatgtacactaacatgtctgtcttgaccccgtttacgcctgtcattgaccgggggattcagctgcataagatgatccgcctcatcactcacggccttgggggagaaggatatttgaacttcatgggcaatgaattcggacatcccgaatggctggacttccccagaaaggggaacaatgaatcttaccactatgccagacggcaattccatctgacagacgatgacctcctgaggtacaagtttctgaataactttgacagggacatgaacagactggaggagcggtatggttggctggccgccccccaggcgtacgtttccgagaagcatgaggggaataagatcatagcctttgagcgggccggactcttgttcatttttaatttccatccatccaagtcatacacagactatcgggtggggaccgccctgcctgggaagttcaagattgttctcgattccgacgctgcagagtacggtggacatcagaggcttgatcactccactgatttcttttcagaggcatttgagcacaacggcagaccttactctctgctggtgtacatcccatcacgggtggctctgatcctccagaacgtggacctgcctaac

SEQ ID NO: 12753 - DNA, 2106 bp, synthetic construct
  misc_feature 1..2106: note = source = /note="Description of Artificial Sequence: Synthetic coding sequence"
  source 1..2106: mol_type = other DNA
atggctgctccaatgactccagctgctagaccagaagattatgaagctgcacttaatgctgctttagccgatgttccagaacttgcacgtcttcttgaaattgatccatatcttaaaccatatgctgttgattttcaaagaagatataagcaatttagtcaaattctaaagaatattggagaaaatgagggagggatcgataaattctctagaggatatgagagctttggagtacatcgttgtgcagatggaggattatattgtaaagaatgggctccaggagcagaaggagtttttttaacaggagattttaatggatggaacccattcagttatccatataaaaaattagattatggaaaatgggaactttatattcctccaaaacaaaataaatcagttttagtaccacacggatcaaaattaaaagtagttataactagtaaatcaggagaaattttatatagaatttcaccttgggccaaatatgtggttagagaaggagataatgtaaattatgactggattcattgggatccagaacacagttacgaatttaaacattctcgtccaaaaaaacctagatcacttagaatttatgaatcacatgttggtatttcaagtcacgaaggaaaggttgctagttataaacattttacttgtaatgtattaccaagaattaaaggattaggatataactgtatccaattaatggcaattatggaacatgcttactacgcttcattcggttatcaaataacatcattttttgcagcatctagtagatatggaactccagaagaattacaggaacttgttgatactgctcactctatgggaattatagttttattggatgttgttcatagtcatgcttctaaaaattctgctgatggacttaatatgtttgatggtacagattcttgttattttcactctggacctagaggtacacatgatttatgggattctagattatttgcttattcttcttgggaaattcttagattcttacttagtaatattagatggtggttagaagagtatagatttgatggatttagatttgatggtgttacttcgatgctttatcaccatcatggtgtaggacaaggattttctggtgattattcagaatattttggactacaagtagatgaagacgctcttacatatttaatgcttgcaaatcatttggtacatacattatgtcctgattcaataacaattgcagaagatgtttcaggtatgccagccttatgttctccaatttcacaaggaggaggaggatttgattatagacttgcaatggcaataccagataagtggattcaacttcttaaagaattcaaagatgaagactggaatatgggtgatatagtttatactttaactaatagaagatatcttgaaaaatgcattgcatatgctgaatctcatgatcaagcacttgttggagataaatctcttgctttttggcttatggacgctgagatgtatactaatatgagtgtgttaactccttttacaccagtaattgatagaggaattcaattacataagatgattagattaattactcatggattaggaggagaaggttatcttaattttatgggaaacgagtttggacatccagaatggcttgatttcccacgtaaaggaaataatgaatcttatcattatgcaagaagacaattccatttaactgatgatgatcttttgagatataaatttctaaataattttgatagagatatgaatcgacttgaagaacgatatggatggttagctgcaccacaagcatatgtatcggaaaaacatgaaggaaataagattattgcatttgaacgagcaggattattatttatttttaattttcatccatcaaaaagttatacagattatagagtcggaacagcacttccaggaaaattcaaaattgttctcgattctgatgctgctgaatatggtggtcatcaaagattagatcattcaactgattttttctcagaagcttttgaacacaacggtagaccttatagtctccttgtttatattccatcaagagtagctcttattttacaaaacgtcgacttaccaaat

SEQ ID NO: 12754 - DNA, 2106 bp, synthetic construct
  misc_feature 1..2106: note = source = /note="Description of Artificial Sequence: Synthetic coding sequence"
  source 1..2106: mol_type = other DNA
atggccgcccctatgacccccgctgctcgacccgaggactacgaagccgccctgaacgccgctctggccgacgttccagaactcgcaaggctattagaaatcgatccttacttgaaaccatatgcagtggatttccaaagacgctacaaacaattctcccagatcctgaagaatataggggaaaacgagggaggaatagacaagttcagcagaggctacgagagctttggagtgcaccggtgcgccgatggcggactctactgtaaggaatgggcacccggcgcggaaggagtgttcctcacgggcgactttaacggatggaatccttttagctacccttataagaaactggattacgggaagtgggagctctacatcccccctaagcagaacaagtccgtgctggttccccacggatctaaactgaaagtggtgatcacctccaaatctggcgagatcctatatcgaattagcccttgggcgaagtacgtagttcgcgagggtgataacgtgaactatgattggatccactgggatcccgagcattcgtatgagtttaagcacagccgacccaagaaaccccggtctttgcggatctatgagagtcacgtcggcatcagtagccatgagggcaaggttgcctcttacaagcattttacatgcaatgtgcttcctaggatcaagggactgggctacaactgtattcagctgatggccattatggaacacgcgtattatgcttcattcggctatcagatcacttcgttcttcgctgcttccagccgctacggaactcctgaggagctacaggaactcgtcgataccgcacactccatgggcatcattgtattactggatgtggtccattcccacgcctccaaaaactccgcggatggcctgaatatgttcgacggcacagacagttgctattttcattccggacctcgcggtacccacgatctatgggattccaggttgtttgcctattcgagctgggagatcctgcgttttttgctgtcgaacattaggtggtggctcgaagagtacaggttcgatggcttccgtttcgacggcgtgactagcatgctgtaccaccatcatggcgtcgggcaggggttcagcggagattacagtgagtatttcgggctgcaggtcgacgaggatgccttgacatacctcatgctggcgaaccatttggtgcacaccttatgccccgattccatcacaattgcggaggatgtcagcgggatgccagccctctgctctccaatcagccagggcggaggaggctttgattacaggcttgctatggctattcctgacaagtggatacaactgctcaaggagttcaaagacgaggactggaatatgggagacatcgtctacaccctgacaaataggaggtatctggagaagtgtatcgcatatgcagaatcacatgaccaggccctggtgggagataaatcgctggcgttttggctaatggacgctgagatgtacacaaacatgtctgtcctcacacccttcactcccgtcatcgaccggggcattcaattgcacaagatgatcaggctcatcacccacggattaggaggtgaaggctacctgaactttatggggaacgaatttggacaccccgagtggttggactttccccgcaagggtaacaacgaatcctatcactatgcccggcgacagttccaccttactgacgatgatctgctacggtacaagttcctgaataacttcgacagagacatgaataggctggaggagcgctatggatggcttgccgcaccccaggcatacgtgagcgagaagcacgagggcaacaaaatcattgcattcgagcgcgcaggattactgttcatctttaacttccacccttctaagtcttacaccgactaccgggttgggaccgcattgcctgggaagtttaagattgtcttggactccgatgccgccgagtacggaggccatcagcgattagaccactcgacggattttttttctgaagccttcgagcataacggtcggccctattccctgctggtctatattccaagccgcgtggcactgatcctgcagaacgtggatctgcccaac

SEQ ID NO: 12755 - DNA, 2106 bp, synthetic construct
  misc_feature 1..2106: note = source = /note="Description of Artificial Sequence: Synthetic coding sequence"
  source 1..2106: mol_type = other DNA
atggccgcccctatgacacctgcagccagaccagaagactacgaggcagccctgaacgcggctctcgccgatgttcctgagttagcacgtctcctcgagatcgacccttatttgaagccttacgcagtcgattttcagcgccggtacaaacaattcagccagattctgaaaaatatcggggagaatgaggggggcatcgacaagttctcccgtgggtatgaaagttttggtgtacatcggtgtgctgacggggggttgtattgtaaagagtgggcccccggtgccgagggtgtctttcttacaggtgactttaacggctggaacccgttcagctacccctataagaagctggattatggcaaatgggagctgtacatcccccccaagcagaataagtccgtcttggtgcctcacggaagcaagctgaaggtggtgataacttcgaaaagtggtgaaattctctaccggatctccccttgggcgaaatatgtagttagagagggcgacaacgtcaattacgactggatacattgggatcctgagcacagctacgaatttaaacacagcaggcccaaaaaaccaaggtcgttacgcatctacgagagtcatgttggtatctcgtctcatgaaggcaaagttgcatcttacaaacatttcacctgcaatgtacttcctcgaataaagggcctcggctataattgtatacagctgatggctattatggaacacgcatactacgcctccttcggataccagattactagctttttcgcagcgagctctaggtacggcacccccgaggagctccaggagctggtggacactgctcactccatgggcattatcgtgctcctggatgtggtccattcccacgcttccaagaatagtgctgatgggctgaacatgttcgatggcaccgattcatgctattttcacagtggccctcgggggacgcatgacttgtgggatagtagactgtttgcctacagtagctgggaaatccttaggttcttgttatctaacataaggtggtggttagaggaatatagatttgatggcttcaggtttgacggcgtaacttctatgctgtaccatcaccacggggtgggccagggcttttccggcgattactccgagtattttggccttcaggtggacgaagacgcattgacatacttgatgctcgcaaatcacttggtccacacattgtgtccggatagcatcactatcgcggaggacgtaagcggtatgcccgcactgtgcagtcccataagccagggaggcggaggcttcgattataggctggccatggccatccctgataagtggatccagcttttgaaggaattcaaagacgaagattggaatatgggcgacatcgtatatacgttgaccaatagacggtacctggaaaagtgtatcgcctatgccgagagccatgatcaggcactggtcggcgacaaatccctcgccttctggttgatggatgccgagatgtacaccaacatgagcgtccttacccctttcacgcccgtgatagataggggtattcagctgcataagatgattcgtctcatcactcacggactcggcggcgagggctatttaaatttcatggggaatgaatttggccacccagaatggttggacttcccacggaagggcaataacgaatcctaccattacgcccggcgccagtttcatttgaccgacgatgatctgctccgttataagttcctgaataactttgaccgcgacatgaacagactggaggagagatacggctggctcgccgcaccccaggcttacgtgtctgagaaacacgagggaaacaaaattattgcatttgaacgagccggactcctgttcatttttaattttcatccttctaagtcatataccgattacagggtggggactgcactgcctggaaaattcaagatagtgctggacagcgacgccgccgaatacggtggtcaccagcgcctcgaccactctactgatttcttttctgaagctttcgagcataatggacgtccctactctttgctggtgtacattcccagtagggtagctctgatccttcagaacgtcgacctcccaaac

SEQ ID NO: 12756 - DNA, 2106 bp, synthetic construct
  misc_feature 1..2106: note = source = /note="Description of Artificial Sequence: Synthetic coding sequence"
  source 1..2106: mol_type = other DNA
atggcggctccgatgacccccgctgctcggcccgaggactatgaagctgccttgaacgcagctctcgccgacgtcccagaactagctaggctcctggaaatcgatccatacttgaaaccctatgctgtcgactttcagaggagatataaacagtttagtcagatactcaagaatattggagagaatgaaggcgggatagacaagttctctcgcggctacgagtcgtttggagtccaccgctgtgctgatggtggcctctactgtaaagaatgggcgcctggcgccgagggtgtttttctgaccggtgattttaacgggtggaacccctttagctacccatataagaaactggattacgggaaatgggaattgtatattccccctaagcagaacaaaagcgtgctggtcccccatggatctaagctaaaagttgtcataacatcgaagtccggagagatactctatcggatctctccctgggctaaatacgtggttcgggagggcgacaatgtgaactacgactggatccactgggacccggagcattcttacgaattcaagcattctagaccgaagaagcctagatctctgcgaatatacgaaagccatgtgggcattagtagccacgaaggcaaggtagcttcttataagcattttacctgcaacgtgctgcctcggataaagggcctgggctacaattgcatccaactcatggccatcatggagcacgcatattatgcctcctttggctaccagattaccagtttcttcgcagccagcagcaggtatggaactccggaagagctacaggagctggttgatactgcacattcgatgggtatcattgtgctactggacgtcgttcattcacacgcatccaaaaattctgccgacggcttaaacatgttcgatggaaccgattcttgctacttccacagcggccccagaggtacccacgatctgtgggacagccgcttgttcgcctactcttcatgggaaattctgagattcctactcagcaatatcaggtggtggttagaggagtatcgcttcgacgggtttcgctttgacggcgtgacatccatgctttaccaccaccatggtgttggccaggggttttccggagattactctgagtatttcggcctgcaggtggatgaagacgcgttgacctatctaatgttggccaaccatttggtgcacacactgtgtcccgattctatcacgattgccgaagacgtttccggcatgccggccctctgttccccgatttcacaggggggtgggggtttcgattatcgcctggctatggccattccggacaagtggatccagctgctaaaagagtttaaggacgaagattggaatatgggtgacattgtctacacgctgaccaatcgacgctatctagaaaaatgcatcgcctacgctgagagtcacgatcaggctctggttggcgacaaatctctcgcgttctggctgatggatgccgaaatgtatactaacatgagcgtgcttactccttttaccccagttattgatcggggaattcagctgcacaaaatgattcgcttaatcacccacggcttgggaggagaggggtacctgaacttcatgggcaacgagttcggacaccctgaatggcttgacttcccccggaagggcaacaacgaatcctaccactacgcccgaagacaatttcaccttactgacgatgatctgcttaggtataagttcctcaacaacttcgatcgggatatgaaccgtctggaagagcggtacggatggttggccgcaccacaagcttatgtgtctgagaagcatgaaggcaataaaataatcgcattcgaacgggccggtctgctgttcatctttaatttccatccaagtaaaagctacactgattaccgcgtgggtactgctctccccggcaaatttaaaatcgtactcgatagtgatgctgcagagtatggaggacatcaaaggctcgaccacagcactgattttttcagcgaggcatttgaacataacgggaggccttattccctccttgtctacattcccagtcgggtggcgttaatcctgcagaacgtagacttgcccaac

SEQ ID NO: 12757 - DNA, 2106 bp, synthetic construct
  misc_feature 1..2106: note = source = /note="Description of Artificial Sequence: Synthetic coding sequence"
  source 1..2106: mol_type = other DNA
atggcagcccctatgacgcctgcagcgcgcccggaggattacgaagcagcactgaacgcggcacttgcagatgtgcctgaactggcacgtctgctggagattgatccatacctgaagccttacgcagtggatttccagagaagatacaaacaattctcacagatactcaagaatatcggtgagaacgaaggcgggattgataagttcagccgggggtacgagtcattcggcgtccatcgctgtgcagatggaggtctttactgcaaagaatgggcaccaggtgcagagggggtgtttctgactggcgatttcaatgggtggaatcctttttcctacccatacaaaaaactggattatggaaagtgggaattgtacatcccaccaaagcagaacaaatcagtgcttgtccctcatggatctaagctgaaggtggtgatcacctccaagtcgggggaaattctttaccgtatttcgccttgggcaaagtacgtggtgagggaaggcgacaacgtcaactacgactggatccactgggacccagagcactcctacgaattcaagcacagccggcctaagaagccacggtcccttaggatttatgagtcgcatgtgggaatatcaagccacgagggtaaagtcgcatcctacaagcatttcacttgtaacgtcttgccccgcattaaagggcttggatataactgtattcaattgatggcgataatggagcacgcctactacgcctcgtttggttaccaaattacctccttctttgcagcctcctcgagatacggtactccagaagagcttcaggagctggtcgacactgcacacagcatgggtatcattgtccttctggatgtggtgcattcccacgcgtccaagaactcggcggatggtcttaacatgttcgacggcaccgactcatgttactttcactcgggcccgcgcgggactcatgatctctgggattcgagactgttcgcctactcgagctgggagattctccgattcctgctctcgaacattcggtggtggttggaagaatacaggtttgatggttttagatttgatggggtgacttccatgttgtaccatcaccacggagtgggccaaggctttagcggagattactcggaatactttggtttgcaagtggatgaggatgcattgacctaccttatgctcgctaatcatcttgtgcataccctctgcccagattccattaccatcgcagaagatgtgagcgggatgcctgcgctttgcagccccataagccaaggtggtggaggatttgattaccgtctggcaatggcaattcctgacaagtggattcagctcctcaaggaattcaaagatgaggattggaacatgggtgacattgtctacaccctcaccaaccgccgttatctggaaaaatgtatcgcctacgcggaatcgcatgatcaggcactggttggagataagtcgctggccttttggcttatggacgcagaaatgtacactaatatgtcggtgcttactcctttcacgccagtgattgatcgcggtattcaacttcataagatgatccgtctcattactcatgggctgggcggtgagggatacctgaactttatgggaaacgaattcggccatccagagtggcttgattttcctagaaaggggaataacgaatcataccactacgcgcgtcggcagttccatttgaccgatgacgacctcctgcggtacaaatttcttaacaacttcgaccgcgacatgaacagactggaggaacgatacggatggcttgcagcaccccaggcctacgtctccgaaaagcacgagggtaataagattatcgcatttgaacgggcgggactgctgttcatctttaacttccatccgagcaaatcgtacactgactaccgggtcggaactgcacttcccggcaagttcaagattgtgctggactcagatgcggctgaatacggtggccaccaacggcttgatcactcaacggactttttctctgaggcctttgagcataatggacgaccatactcgctccttgtgtatatcccttcacgcgtcgcactgattcttcaaaatgttgatctcccaaat

SEQ ID NO: 12758 - DNA, 2106 bp, synthetic construct
  misc_feature 1..2106: note = source = /note="Description of Artificial Sequence: Synthetic coding sequence"
  source 1..2106: mol_type = other DNA
atggctgcccctatgaccccggcagcccgccccgaggattacgaagcagcactgaacgctgctctcgcagatgtgcctgagctcgccaggctcttggagattgacccttacctgaagccttatgccgtggattttcagcgacgttataaacagtttagccagatcttgaaaaatatcggcgaaaatgagggtggtattgacaaattttccagggggtatgaaagcttcggggtgcaccgttgcgctgacggaggcctctattgtaaggaatgggcccccggcgcagaaggcgtgttcctgacaggggacttcaacggctggaatcctttttcctatccttacaagaagctggattacggcaaatgggagttgtatatcccaccgaaacagaacaagtctgtcctagtaccccacgggtcaaaattgaaggtcgtgattacctcaaaatccggcgaaatactgtataggatttccccttgggccaaatacgtcgtacgggaaggtgataacgttaactatgactggatacactgggacccagaacactcctacgagtttaaacactcccgccccaaaaaaccccgctcactgaggatatatgaatcccatgtaggcatctcctctcatgaaggcaaggtggcatcctacaagcacttcacatgtaatgtcctgcccaggataaaggggctggggtacaattgtatccagctcatggcaataatggaacatgcctattatgcctcattcggatatcagatcaccagcttttttgccgcttccagccgctacggcactcctgaagaactccaggaactagtggacaccgcccattctatgggcattatagtgctgctcgatgtagtgcatagccatgcctcaaaaaattccgcggacggactaaatatgttcgacggcacagactcatgctacttccactccggtcctagaggcacccacgacctgtgggactcccggctgtttgcatattcctcctgggaaatcctgcgtttcctgctgagtaacatccggtggtggctggaggagtaccggttcgatgggtttcgattcgatggggtgacgagcatgctctaccatcaccacggggttggacaggggtttagcggtgactattcggagtattttggcttacaggtcgacgaggatgctctgacctacttgatgctggcaaatcacttggtgcatacgctgtgccccgactctatcactattgccgaagacgtctccgggatgccggccctatgtagccctatcagtcaggggggaggggggttcgattatcgcttggccatggccatacccgataaatggatccagctgctgaaggagttcaaggatgaggattggaacatgggggatattgtgtacacgctgaccaatcggcggtacctggagaagtgcatagcctacgccgagtctcatgaccaggcgctggtgggcgataagtccctggcattttggctgatggatgcggagatgtatacaaacatgagtgtgctgacaccttttaccccggttatcgaccggggaatccagctgcacaagatgattaggttgatcacccatgggcttggaggcgaaggatatttgaattttatggggaatgaatttggccatcctgagtggctggattttccaaggaagggcaacaatgagagctatcattacgccagaagacaatttcatctgaccgatgacgacttgctccggtacaagttcctgaataacttcgatcgggacatgaataggctagaggagcgatatggatggctggcggctccccaggcttacgtgtctgagaagcatgagggaaataaaatcatcgcctttgagcgagcgggactgctgttcatctttaacttccacccaagcaagtcttacacagattaccgagtcgggaccgctcttccaggcaaattcaaaattgtgctcgactctgatgcagccgagtacggcggccaccagaggctcgaccactcaaccgatttcttcagcgaagcattcgaacataatggccggccatacagtctgctcgtgtatattccttccagagtggcgctgatcctgcagaatgtggatctgcccaac

SEQ ID NO: 12759 - DNA, 2106 bp, synthetic construct
  misc_feature 1..2106: note = source = /note="Description of Artificial Sequence: Synthetic coding sequence"
  source 1..2106: mol_type = other DNA
atggccgctcctatgacccccgccgccaggccggaggactacgaggccgctctgaacgccgccctcgccgacgtgccagaactggcgaggctgctcgaaatcgacccctacttgaaaccctatgccgtggattttcagagacgatataaacagttcagtcaaatcttgaagaatatcggtgagaacgagggtgggattgacaagttttcccgtggatacgagagcttcggcgtgcatcggtgtgccgacggcggcctgtactgcaaagagtgggccccgggtgccgagggggttttcctcacaggcgactttaacgggtggaaccctttcagttacccatacaagaagttggattatggaaaatgggaactttacatccctcccaagcaaaacaagagtgtcctagtgccccacggttctaaacttaaggtggttatcacctcaaagtccggtgaaatactatataggatcagtccatgggccaaatatgtggttcgggagggagacaatgttaactacgattggattcactgggacccagagcactcatatgagtttaagcattccaggcccaaaaagccacgatccctgagaatctacgagtcacatgtaggcatttcaagtcatgaaggaaaggtggccagctataaacatttcacatgtaacgtactgccaaggataaaaggactgggttacaattgtattcagctcatggctatcatggaacacgcgtactatgcttctttcggctaccagatcacctcgttcttcgctgcatctagccgatatggtaccccggaggaactgcaggagctcgtggatacggcacatagcatgggcatcatcgttctgctggacgtggttcactctcacgcctcgaagaacagcgccgacgggcttaacatgttcgacggtactgacagctgttacttccactcagggccacggggcacccacgatttgtgggattcacgcctattcgcctattccagttgggaaatattgagatttctgctgtccaatattcgctggtggctcgaggagtaccgcttcgatgggttccggtttgatggcgtgacaagtatgttgtaccatcaccatggcgtgggccaaggcttctccggggattactcggagtatttcggtttgcaggtggacgaagatgcgctgacttatctgatgctggctaaccatctggttcataccctgtgtcctgacagcattacgattgctgaggatgtgagcggcatgccagcgctatgttctccaatcagccagggtggcgggggattcgattacaggctggcgatggcaattccggacaaatggattcaactcctcaaagagttcaaagacgaggattggaacatgggggatatagtgtatactctgactaacagacgctatctcgagaagtgcatagcatatgctgagagtcatgatcaggccttggtgggcgataagtccctcgctttttggcttatggacgccgaaatgtacactaacatgagcgttctgaccccttttacacccgtgattgaccgcgggattcagctccacaagatgatccggcttatcactcatggtcttgggggggagggatacctgaatttcatgggtaacgagtttggacaccctgaatggctggattttccacggaagggtaacaacgagtcctaccactacgcacgtcggcagtttcatcttactgatgacgacctactgagatacaagttcctgaacaactttgacagagacatgaatcggctcgaagaacgctatggctggctggctgccccgcaggcatatgtttccgagaagcacgaggggaataaaataatcgcattcgaacgcgccggactgttgtttatttttaactttcacccctccaagagttacaccgattacagagtgggtactgccctgccaggaaagttcaagatcgtgctggactctgatgcggcagagtacggtggacatcaacgcctcgatcattccactgactttttttctgaagcctttgagcacaacggccggccctacagtctgctagtgtacatcccctcacgggtggccctaatactgcagaatgtcgacctcccaaac

SEQ ID NO: 12760 - DNA, 2106 bp, synthetic construct
  misc_feature 1..2106: note = source = /note="Description of Artificial Sequence: Synthetic coding sequence"
  source 1..2106: mol_type = other DNA
atggcagcgcctatgactccagccgctcgccccgaagattacgaggcagcactcaacgcagcactggccgatgtgcctgaattggcacgccttctggaaattgatccataccttaagccctacgccgtggacttccagagacgatacaagcagttttcgcagatacttaagaatataggggaaaacgaaggcggtattgacaagtttagcagaggatacgagagctttggcgtgcatagatgtgctgatggtggactgtactgtaaggaatgggctccaggagcagagggagtgttcctcaccggcgactttaacggatggaatccattttcttacccttacaaaaaactggactacggaaagtgggaactgtacatcccacccaagcagaacaagagcgtgctcgtgccccatggctcgaaactcaaggtggttattacgtcaaaaagcggtgaaattctgtaccggattagcccatgggcaaagtacgtcgtcagagaaggagacaacgtgaactacgactggattcattgggatcctgagcattcctacgagtttaaacattcgcggcctaagaagcctcgttcccttaggatttacgaatcacatgtggggatatcatcacacgaaggtaaggtcgcctcctacaagcattttacctgtaacgtgctgccccgcataaagggactcggctacaactgtattcagctcatggccatcatggagcacgcctactacgcgtcctttggataccagattacctctttctttgcagcaagctcacggtacggaacccctgaagaactccaggaattggtggatacggcccatagcatggggattattgtgctcctggatgtggtgcattcccatgcaagcaagaattccgcagatggactgaatatgttcgacggaaccgactcatgttactttcattccggaccccgcggtactcacgacctctgggattcgcgactctttgcttactcgagctgggaaatacttagattcctgcttagcaacatccggtggtggctggaggaataccgcttcgacgggtttcgttttgacggtgttacttctatgctgtaccatcatcacggagtcgggcaaggcttctcgggcgattactcggagtactttggacttcaagtggatgaagatgcgctcacttatcttatgctcgccaatcatctcgtccacactctgtgtcctgattcgatcaccattgctgaggacgtgtccggtatgccagcactgtgttccccaatttcccagggcggcggcggttttgattaccggctggcaatggcaattcctgataagtggatccaactccttaaggaattcaaggacgaggattggaatatgggtgatatcgtgtacactctcactaacaggcggtaccttgagaaatgcatagcgtacgcggaaagccacgatcaagcattggtcggtgacaagtcactggcattttggctgatggatgcagagatgtacaccaatatgtcagtgcttaccccctttacccctgtcatcgaccggggcatccaactccataagatgatcagattgatcacccacggtctgggaggcgagggatacctcaactttatgggtaacgaatttggacaccccgaatggcttgattttcctagaaagggcaataatgaaagctaccattacgccaggagacaatttcacctgaccgacgatgacctccttcggtataagtttcttaacaatttcgatcgcgatatgaatcggctggaagaaaggtatgggtggctcgccgcccctcaagcgtacgtgagcgaaaagcatgaggggaataagattattgcattcgaacgtgcaggtctgcttttcattttcaactttcatccctccaagtcctacactgattaccgagtcgggacggcactgcctggaaagtttaagattgtgctggacagcgatgcggcggaatacggaggacaccaaagacttgaccatagcaccgatttcttctcggaagcatttgaacacaatggccgcccatactcgctgctggtttacataccgtcacgcgtggcattgattcttcaaaacgtggacctgcctaac

SEQ ID NO: 12761 - DNA, 2106 bp, synthetic construct
  misc_feature 1..2106: note = source = /note="Description of Artificial Sequence: Synthetic coding sequence"
  source 1..2106: mol_type = other DNA
atggcggcgcccatgactcctgcagcacgacctgaagattacgaagcagcgctcaatgcagccctggcggacgtgcctgaactcgcgcggctccttgagattgatccatatttgaaaccctacgcagtggacttccaacgacgctacaaacagttttcccagattcttaagaacataggtgaaaacgaaggaggtatcgacaaattctcccgtggatacgagtccttcggtgtccatcgctgcgctgacggtggactttactgtaaagaatgggcaccaggagcagagggagtgttcctgaccggagactttaacgggtggaatcctttttcgtatccttacaaaaagctcgactacggcaagtgggaactgtacattccaccaaaacaaaacaagtcggtgcttgtgccccacggatcaaaactcaaagtggtgatcacctctaagtccggcgagatcctgtacagaataagcccttgggcaaaatacgtcgtgagggaaggtgataacgtgaactacgattggattcactgggatcccgagcatagctacgagttcaagcactccaggcctaaaaagcctagatcgctcagaatttacgagtcgcatgtggggatttcaagccatgaaggtaaggtggcttcgtacaagcattttacctgtaatgtccttccccgcataaagggactgggttataactgcattcagcttatggcaattatggaacacgcatactacgcatcgttcggataccaaattacgtccttttttgccgcgtcatccaggtacgggaccccagaagagctgcaggagcttgtcgacactgcgcattcgatggggattatagtgctcctcgatgtggtgcactcccatgcatccaaaaactccgccgatggacttaacatgtttgatggaactgactcctgttactttcattcgggcccacgaggtacccatgatctttgggacagcagactttttgcatactcatcctgggagattctcagatttcttctgagcaatatcagatggtggctcgaagaataccgctttgatggttttaggttcgatggagtcacttcgatgctttaccatcatcacggggtcggccaggggtttagcggtgactacagcgagtacttcggacttcaggtggatgaggacgcactcacctaccttatgcttgcaaatcatcttgtccatactctgtgtccagatagcattaccattgccgaagatgtgtccgggatgccagcactgtgttcacccataagccagggtggaggaggtttcgactaccggctcgcaatggccattccagataagtggatacaacttcttaaggagttcaaagatgaagattggaatatgggagacattgtgtacactcttactaatagaagatacttggaaaagtgtattgcatacgcagaatcgcatgatcaagcattggtgggagataaatcgcttgcattctggctcatggatgccgaaatgtacaccaacatgtccgtgctgactccttttaccccagtcattgatcggggtattcaactgcacaaaatgatcagacttatcacccatggactcgggggagagggatatctgaactttatggggaacgaattcggtcatccggaatggctggattttccgaggaagggaaataacgagtcgtaccattacgcacggagacagtttcatcttactgacgatgatctgcttagatataagtttctgaacaatttcgaccgcgacatgaacaggcttgaggagaggtatggctggctggcagccccacaagcgtacgtgtcagaaaagcacgagggaaataagattatcgcattcgagcgggcgggcctgttgtttatcttcaattttcatccgagtaagagctacaccgattaccgggtaggcactgctcttcctggcaaattcaagatcgtgctggattcggatgcggcagaatacggaggtcatcagcgccttgaccatagcactgatttcttctccgaagcgttcgaacacaacggtaggccgtactcccttcttgtgtacattcctagcagggttgcacttattcttcagaatgttgatctccccaat

SEQ ID NO: 12762 - DNA, 2106 bp, synthetic construct
  misc_feature 1..2106: note = source = /note="Description of Artificial Sequence: Synthetic coding sequence"
  source 1..2106: mol_type = other DNA
atggccgctccaatgacccctgccgcccgtccagaggactatgaggctgcgttaaacgcggcccttgcggatgtacctgaattggcgaggctactggagattgacccttaccttaagccctatgccgtcgactttcaacgtagatacaaacagttttctcagatcctgaagaatatcggcgagaacgagggtggaatcgacaaattctcccgaggttacgagagctttggcgtccatcgctgcgcggacgggggtctctattgcaaggagtgggcccccggggcggaaggtgtcttccttacgggggattttaacggatggaacccatttagctatccctacaagaaattagattatgggaaatgggagttgtacataccgcccaaacagaataagtccgttcttgttcctcacggttcgaagctgaaagtggtgatcacatctaagagtggtgaaatcctataccggatcagtccctgggcaaaatatgttgtccgtgaaggagataatgtcaattatgattggattcactgggatcccgaacattcatatgagtttaagcatagccgaccgaagaaacccaggagcctacgcatttacgagtcccacgtcggaattagctctcatgagggcaaggtcgcgtcatataagcactttacctgcaacgtactcccccgaattaaaggacttggctacaattgcatccagctcatggcgatcatggaacacgcctactatgcatcgttcgggtaccagatcactagttttttcgcggcatcaagccgctatggcactccagaggaattgcaagagttagtcgatacagctcactctatgggaattattgtgttgcttgacgtagtgcattcgcacgcttctaaaaattctgcagatggtctgaacatgtttgacggaacggattcctgttattttcactctgggccgcgaggcactcacgacctatgggactcacggctcttcgcttattcgtcctgggaaattttgcgtttccttctgtcaaatatccgatggtggctcgaggagtatcggttcgacggcttccggttcgacggggtcacgagcatgttgtatcaccatcatggcgtcggacaaggtttcagcggggattactcggaatactttggcttgcaagtcgacgaggatgctctgacgtacttaatgctggccaatcatctcgtccataccttgtgtccagattcgatcacgattgccgaggacgtttcgggaatgcctgcgctgtgctctccaattagtcaaggtggaggcggttttgattatcggctggccatggcgattccggacaagtggatccagctattgaaggagtttaaggatgaggattggaacatgggagacattgtgtataccttgacaaatcgccgatatctggagaaatgcattgcctatgccgagtctcacgatcaggcgctcgtaggggataagtcgctggctttttggctcatggacgcggagatgtatacgaacatgtcggttctgaccccctttacgccagtcattgaccggggaatacagcttcacaagatgatcagactcataactcatggtcttggaggtgaaggttacctgaactttatgggcaacgaatttggacatcctgagtggttggattttccgagaaaaggaaacaacgagagttatcattacgctcgtcggcagttccaccttacggatgatgaccttcttcgttataagtttttgaataactttgatcgtgacatgaatagattagaggagagatatggttggctggctgccccgcaagcttatgttagtgagaagcatgaagggaataagataattgccttcgagcgtgcggggcttctcttcatattcaattttcaccccagcaagtcgtacacggattatcgagtggggacagcactgcctgggaagttcaaaatagtccttgacagcgacgccgctgagtacggtggccatcagcgcctcgatcattccacggactttttcagcgaagcgttcgagcataacggtagaccatatagccttttggtgtacatcccctcccgcgtggctttgatactccagaacgtggatctacccaat

SEQ ID NO: 12763 - DNA, 2106 bp, synthetic construct
  misc_feature 1..2106: note = source = /note="Description of Artificial Sequence: Synthetic coding sequence"
  source 1..2106: mol_type = other DNA
atggcagcgccaatgacccctgcagcacggcctgaggactacgaagcggcgctgaacgctgcccttgcagatgttccagaactggcaagactgcttgaaatcgacccttatcttaagccttacgcggtggacttccagagaaggtacaagcagttttcccaaatcctgaagaacattggtgagaacgaaggcggcatcgacaagttttccagaggatacgaatcctttggagtgcaccggtgtgcagatggcggactgtactgtaaggaatgggcaccgggcgcagagggtgtgttcctcactggtgactttaatgggtggaatcctttttcctacccatacaagaagctggattacggaaaatgggaactctacattccaccaaaacagaataagtccgtcctggtaccacatggaagcaaacttaaggtcgtcataacgtcaaagtcaggtgagatcctgtaccgtatttcgccatgggcaaaatacgtggtcagagaaggcgataatgtgaactacgactggatccattgggatcccgaacacagctacgaattcaagcatagcagacccaagaagcctagatcacttagaatttacgagtcccacgtgggtatttcgagccatgagggcaaagtggcttcctacaagcattttacttgtaacgtgcttcccaggattaaggggcttgggtacaactgtatccagcttatggccattatggaacatgcctactacgccagctttggctaccaaatcacttcgttcttcgcagcgtcgtcgagatacggcaccccagaagaactgcaggagctggtcgatactgcccacagcatgggcattatagttctcctggacgtcgtgcattcacatgcaagcaagaactccgcagatggactgaatatgttcgatggtaccgattcatgctactttcactccgggccccgtggaacccacgacctctgggacagccgtctgttcgcgtacagttcatgggaaattcttaggttcctgctgtcaaacatccgctggtggctggaagaatacagatttgacgggtttcgctttgatggagtgacctctatgctctaccatcaccatggtgttggacaaggattctcgggggactactcagaatactttggactccaggtcgatgaggacgctctcacctacctcatgctcgccaaccatctcgtgcatacgctttgtcctgactcaatcacgatcgcagaggacgtgtccggtatgcctgccctctgctctccaatctcacaagggggaggaggatttgattacagactggcaatggccattccagataagtggatacagctgttgaaggaattcaaggatgaagattggaatatgggtgacatcgtctacactctgactaaccgccgctacctcgagaagtgtatcgcatacgctgaatcgcatgatcaggcactggtcggagacaaatctctcgcattctggctgatggatgccgaaatgtacactaatatgtccgtgttgaccccttttaccccggtgatagaccgcggtatccagttgcataagatgattcggctgattactcatggattgggaggtgaaggatacctgaactttatgggaaacgaatttgggcaccctgagtggcttgatttcccgagaaagggtaataacgagagctaccattacgcacggagacaatttcatctgacggatgacgacctgctgcgatacaaatttcttaacaactttgatagagatatgaatcgactggaagaaagatacggttggctggcagctccccaggcttacgtttccgagaagcatgaaggaaacaagattattgccttcgagagggcaggactgctctttatcttcaacttccacccttcaaaatcctacaccgattaccgcgtgggaaccgcccttccggggaagttcaaaatcgtgctcgattccgacgccgctgaatacggtggacaccagaggctcgatcactcgactgatttcttttcagaggcatttgagcacaacggtcgcccatacagcctgttggtgtacattccatcaagagttgcactgatcctgcagaacgtcgacctgcctaac

SEQ ID NO: 12764 - DNA, 2106 bp, synthetic construct
  misc_feature 1..2106: note = source = /note="Description of Artificial Sequence: Synthetic coding sequence"
  source 1..2106: mol_type = other DNA
atggccgccccaatgactccagccgcgaggcccgaagattacgaggcggcactgaatgctgcgcttgctgacgtgccagaactggcccggctgctggaaattgacccgtaccttaaaccatacgcggtggatttccaacgccgttacaagcagttctcgcagatcctgaagaacatcggcgaaaatgaaggaggcatcgacaagttctcacgcggatacgaatcatttggcgtgcaccgctgtgcagatgggggactctactgcaaggaatgggccccaggcgccgaaggagtgtttctgaccggggacttcaacggatggaatccgttttcttatccgtacaagaagttggactacggaaaatgggaactgtatatcccgcctaagcagaacaagtcagtgttggtgcctcacggatccaaactgaaggtggtcatcacgagtaagagtggagagatcctgtacagaatctccccttgggcgaagtacgtcgtgcgggaaggtgacaacgttaactacgattggatccactgggacccggagcatagttacgagtttaagcattcccgacctaagaagccaagatcactccgcatctacgaatcgcatgtcggaatctcaagccacgaagggaaagtggcgtcctacaagcacttcacctgcaatgtgctgcctcggatcaaaggcctgggttacaactgcatccaactgatggcaatcatggagcatgcctattacgcatcgttcggctaccagattacttcgttttttgccgccagctccaggtacggcactccggaagagcttcaagaactcgtggacacggcccattccatgggaatcatcgtcctgctggacgtggtgcactcgcatgcgtcaaaaaacagcgccgacggactgaacatgttcgatggcaccgactcctgctacttccactccggaccgaggggcacgcacgatttgtgggattcacggcttttcgcatactcatcatgggagatcctgcgttttttgctctcgaacatccggtggtggctcgaggaatatcgctttgacggatttcggttcgacggagtgactagcatgctgtaccaccaccacggcgtcggacaaggtttcagcggagattacagcgaatacttcgggctccaggtggacgaggacgcgctgacctacctcatgctggccaaccacctggtccatactctgtgtccggactctatcaccatcgctgaagatgtgagcggaatgccagccctgtgttcaccgatttcccagggcggcgggggatttgattacaggctcgcaatggccatcccggacaagtggatccaactgctcaaggagtttaaggacgaagattggaatatgggagacattgtgtacaccctgaccaatcgccggtacctcgagaagtgcatagcctacgcagaaagccacgatcaggctctggtgggggataagtcacttgcgttctggctgatggatgccgaaatgtatactaacatgagcgttttgacccctttcaccccagtcatcgatcgcggcatccagctccataagatgattcggctgatcacgcatggccttggtggagaaggatacctcaactttatgggaaacgagttcggccacccagagtggctggactttcctcgcaagggaaacaacgaaagctaccattacgctcgccggcaatttcacctcaccgacgatgatctgctgaggtacaaattcctcaacaactttgaccgggatatgaatcgcctcgaggaaagatacggttggctcgctgccccgcaagcatacgtgtcggagaagcacgagggaaataagatcatcgccttcgaacgggcaggtctgttgttcatctttaactttcatcctagtaagtcgtacaccgattatcgggtgggtaccgctttgccgggtaagttcaagatcgtgctcgattcagacgcggcggaatacggaggacaccagagactggaccactccactgatttcttctcggaagccttcgagcacaatggacgcccttacagcctgctcgtgtacatcccaagccgcgtcgcactgattcttcagaatgtggacctgccaaac

SEQ ID NO: 12765 - DNA, 2106 bp, synthetic construct
  misc_feature 1..2106: note = source = /note="Description of Artificial Sequence: Synthetic coding sequence"
  source 1..2106: mol_type = other DNA
atggccgcaccgatgaccccggctgcccgtccggaggactacgaagcagccctgaacgctgccctcgccgacgtccccgaactggcgagactcctggaaatcgacccctacttgaaaccgtacgccgtggatttccaacgaagatacaagcaattctcccagatccttaagaatatcggagagaatgagggagggattgataagttttcacgcggctacgaatcctttggagtccatcgctgtgctgacggaggactctactgcaaggagtgggcgcctggtgcggaaggggtgttcctcaccggcgatttcaacggatggaacccgttttcctacccttacaaaaaactggactacggaaagtgggagctttacatcccaccaaagcagaataagagcgtgttggtgccgcatggaagcaaacttaaggtggtcatcacttccaaatcgggagaaatactgtacaggatctcaccttgggccaagtacgtggtgcgggaaggagataacgtgaactacgattggatccattgggacccggagcattcgtacgagttcaagcattcacgccccaagaagccaaggagtttgcggatctacgagtcacacgtcggaatttcctctcatgaaggaaaggtggcgagctacaaacatttcacctgcaacgtcctcccccgcatcaagggcctggggtataactgcattcagctgatggctattatggaacacgcttactacgcgagcttcggataccagatcacctccttcttcgccgcgtcgtcgcgctacggtactccggaagagctgcaagaactcgtggacactgcgcacagcatggggatcatcgttctgctcgacgtggtgcactcacatgcgagcaagaattctgccgacggcctgaacatgttcgacggaacggactcgtgctatttccatagcggccctcgcggcactcacgacctctgggactcaagattgtttgcatactcgtcgtgggaaatactgaggttcttgctgagcaacatccggtggtggcttgaagaataccggttcgacggctttcgctttgacggtgtaacttccatgctttatcaccaccacggagtcggccagggattctctggtgactattccgaatacttcggtctgcaagtagatgaagatgctctgacctatctcatgctggcgaaccatctcgtgcacaccctctgtcctgattcgatcactatcgcagaggacgtctcaggtatgccggctctctgttccccaatctcccagggtgggggaggattcgactaccgcttggcaatggcaatcccggataagtggatccagctcttgaaggagtttaaagatgaggattggaatatgggcgacatagtgtacacgctcactaaccgcaggtaccttgagaagtgcatcgcctacgcagagtcacatgaccaggcgcttgtgggcgacaagtccctggcgttttggctgatggacgctgaaatgtatactaatatgtcagtcttgaccccattcacccctgtcatcgataggggaatccaactgcacaaaatgattcgccttatcacccatggactgggcggagagggatacctgaacttcatgggtaacgaattcggacacccggaatggctggacttcccccggaagggaaacaacgagtcataccactacgcacgccggcaattccacctgactgatgatgatctccttcggtacaagtttctcaacaatttcgacagagatatgaatcggctggaggaacgatacggatggctggccgccccacaagcctacgtgtccgagaaacatgagggcaacaaaatcattgcttttgaaagagctggattgctgtttatcttcaatttccacccgtcgaaatcctacaccgattaccgcgttggcaccgcgctgccgggaaagtttaagattgtgctggattcggatgctgccgaatatgggggtcaccagcgccttgaccactccacggacttcttctcggaagcctttgaacacaatggtagaccgtacagcctcctggtgtacatcccctcccgggtggccttgatactccagaacgtggacttgcctaat

SEQ ID NO: 12766 - DNA, 2106 bp, synthetic construct
  misc_feature 1..2106: note = source = /note="Description of Artificial Sequence: Synthetic coding sequence"
  source 1..2106: mol_type = other DNA
atggctgccccgatgaccccagctgcacgccctgaggactacgaagcagcgctgaacgcagcactggccgacgtcccggagctggcccggcttctcgaaattgacccatacctgaagccatacgcagtggattttcagcgaaggtacaaacagttctcgcaaatactcaagaatattggagagaatgagggcggtatagataagtttagtcgtggatacgaatcattcggcgttcatcgatgtgcagatggcggtctttactgcaaggaatgggcgcctggggccgaaggagtctttctgaccggcgactttaacgggtggaatcctttcagctacccctacaagaaattggactacggaaagtgggaactctatattcctcctaagcagaacaagagtgtgctggtgcctcacgggtcaaagctgaaagtggtcattactagcaagtcaggcgagattctttatcgcatttccccttgggcaaagtacgtcgtcagagaaggcgacaatgtgaactacgattggattcattgggatccagagcacagctacgagtttaagcattccagacccaaaaaaccacgttcacttaggatctacgagagccatgtgggtatcagctctcacgagggtaaggtggcaagttacaaacacttcacttgcaacgtgcttcctaggattaaaggacttggttacaattgcatccagctgatggccataatggagcatgcgtactacgcctccttcgggtaccaaattacctcatttttcgccgcaagctcccggtacggaacccccgaagagctgcaagaattggtggataccgctcacagcatgggtattatcgtcttgcttgacgtggtgcatagccacgcatcgaaaaacagcgcagatggactgaatatgtttgatgggaccgattcctgctactttcactcgggacctcggggaacccatgatctgtgggactcgaggctttttgcatatagttcgtgggaaattcttagatttcttctctcgaacatccgatggtggctggaagaatacagatttgacggtttccggttcgacggtgtcacttcgatgctctaccatcatcatggcgtgggccagggtttctccggcgactactctgagtactttggtctgcaggtcgatgaggatgcacttacttacttgatgctggctaaccaccttgtgcataccctgtgtccagattcaattactattgcggaagatgtgtcgggaatgccagctctctgtagcccgataagccaaggaggaggtggttttgactacagactcgcaatggcgatcccagataagtggatacaattgctcaaagagtttaaggacgaagattggaacatgggtgatattgtgtataccctcaccaaccgccggtacctcgaaaaatgtatcgcctacgccgaaagccatgatcaggcattggtaggagacaagtccctggcgttctggctgatggatgcagaaatgtatactaatatgtcggtgcttactcccttcactcctgtgattgacagaggaatccaactgcacaaaatgattcgcttgataacgcatggacttgggggagagggctaccttaacttcatgggtaacgaatttggtcacccggaatggctggatttccctcgtaagggaaataacgaatcttaccactacgccagacggcagttccatctgaccgatgatgatcttctgagatacaagtttctcaataacttcgatcgtgacatgaatcgtctcgaagaacgctacggatggctcgcagcaccgcaagcatacgtgtcggagaagcatgaaggaaataagatcattgcgtttgaacgcgcaggcctcctgttcatattcaattttcatccttcaaagtcttacaccgattatcgggtcgggaccgcacttccaggaaagtttaagatagtgctcgattccgacgcggcggaatatggtggtcatcaaagactggaccattcgactgactttttctccgaggcttttgagcacaacggaaggccatactcacttcttgtttacataccttccagggttgcccttattcttcaaaatgtggatctgcctaac

SEQ ID NO: 12767 - DNA, 2106 bp, synthetic construct
  misc_feature 1..2106: note = source = /note="Description of Artificial Sequence: Synthetic coding sequence"
  source 1..2106: mol_type = other DNA
atggccgctcctatgacccctgccgcgcgtcccgaggattatgaagccgccctgaacgctgcgctcgccgacgttccagagctggcacgattgctggaaatcgacccatatctcaaaccctatgctgtggatttccagaggcgctataagcagtttagccagatccttaaaaacattggagaaaacgagggaggcattgataaattcagccgtggatatgaatcctttggcgttcatcgatgcgcagatggcgggctgtactgcaaggagtgggctcccggcgcagagggagtgttccttacaggggactttaacggatggaaccctttcagttacccctataagaagctcgactacggcaagtgggagctgtacatcccacccaagcagaataagtccgtcctggtccctcatggctcaaagttaaaagttgtgatcacgagtaagagcggagagattctttacagaatctctccctgggccaaatatgttgtccgcgaaggtgacaacgtcaattatgactggattcactgggaccctgagcacagctatgagttcaaacattcgcgtccgaaaaagccacgatcactcagaatctatgagtcacatgtgggtattagtagccacgagggaaaagtggcaagctacaaacactttacatgcaacgtgctgccaagaataaaggggctcggctacaactgtatccagttaatggcaattatggaacacgcctactatgcaagttttggttaccagattacttcattttttgccgccagcagcaggtacggaacccccgaagaactgcaagaattggttgacacagcacacagcatgggcatcatcgttctgctcgacgttgtccatagccatgcctcaaagaattccgctgatggacttaatatgttcgatggaaccgattcttgctatttccattcgggccctagaggtactcacgacctgtgggacagtaggttatttgcatacagctcctgggagatcctgagattccttctgtccaacattcgttggtggctagaagaatacagattcgacggtttcagatttgatggcgtgacgtcaatgctgtatcatcaccatggagtgggtcaggggttttccggcgattattccgaatacttcgggctgcaggtggatgaagacgcgttgacttatctgatgttggctaaccatcttgtgcataccctgtgccccgattctatcactatcgcggaggatgtgagtggcatgcccgccctgtgcagtccaatcagccagggcggagggggttttgattataggctggctatggctatacctgacaagtggatccaattgctcaaggagtttaaggacgaagactggaatatgggcgatattgtttacaccctcactaaccgaaggtacctcgagaaatgtatagcctacgcagaatctcacgaccaggcgctggtgggcgacaaatccttggcgttttggctaatggacgctgaaatgtatactaacatgtctgtccttactcccttcaccccagtgatcgatcggggaattcagctccacaaaatgatccggctcataacccatggcctcggcggcgaggggtacctgaatttcatgggcaacgagtttggccatcccgagtggcttgactttcccaggaaggggaacaatgagtcctatcattacgcccgcagacagttccacctgacagacgacgacttgttgagatacaaattcctgaacaattttgaccgtgatatgaaccggctcgaggagcgctacggttggcttgccgctccacaagcttacgtctcagagaagcacgaagggaataagatcatagcgtttgagcgggccggattgctatttatattcaactttcatccctccaagtcgtacaccgactaccgggtgggcactgcgcttcctggcaaatttaagattgtgctggatagcgacgccgccgagtacggagggcaccagagactggatcattccacggattttttcagcgaggcgtttgaacataacggccggccttacagtttgctggtctacatcccttccagggtggctctgatcctacaaaacgtggacctaccaaat

SEQ ID NO: 12768 - DNA, 2106 bp, synthetic construct
  misc_feature 1..2106: note = source = /note="Description of Artificial Sequence: Synthetic coding sequence"
  source 1..2106: mol_type = other DNA
atggccgctcctatgactcccgctgcccgaccagaggactacgaagctgcacttaacgccgcgttggccgacgtccctgagttggcaaggctgcttgagatcgatccctacctgaagccttatgctgtcgactttcagaggcggtataaacagttctcacagattcttaagaatatcggtgaaaacgagggcgggattgataagttctctcggggatacgagagtttcggcgttcatagatgcgctgatggaggcctctattgcaaggaatgggcccccggggctgagggggttttcctgactggggatttcaacggctggaaccctttctcttatccttacaagaaactggattacgggaagtgggagctttatattccgccaaagcaaaacaagtcagtcctggtgcctcatgggagcaagctgaaagtggtgattacctcaaaaagcggggagatcctgtataggatctctccctgggcaaagtacgttgtgcgggagggcgacaatgttaattacgactggatacactgggatcccgagcactcttatgagtttaagcattctcgccctaaaaagcccaggagtctcagaatctacgagtcccatgttggtataagctcccacgagggcaaagtggcgagttataaacacttcacttgcaatgtgctgccacggatcaaaggccttggatacaactgcattcaacttatggcaattatggagcacgcttattacgcttccttcgggtaccagattacaagcttcttcgcagcctcctcccggtatggtacaccagaggaactgcaggagctcgtcgatacggcgcattccatgggcatcatcgtgctgttggacgtcgtgcatagtcacgcttctaagaattcagccgacggattgaatatgttcgatggcaccgactcctgctacttccattccggaccaagaggcacacacgatctctgggacagccgccttttcgcttattcatcctgggaaattctgcggtttctcctttctaacatcagatggtggctcgaggagtatcggtttgatggctttcgctttgatggtgtgacctccatgctgtatcaccaccatggtgtcggacagggatttagcggcgattactcagaatacttcgggttgcaagtggacgaggatgccctgacatacctcatgctggcaaatcacctggtacatacgctctgccctgacagtatcaccatagcagaggacgtctccggtatgcctgcattgtgttctcctatcagccagggcggggggggttttgattaccggcttgccatggcgatacccgataagtggattcagctgctgaaggaatttaaggacgaggactggaacatgggcgacatcgtttacacccttactaacagacggtacctcgaaaagtgtatcgcctacgctgaaagtcacgaccaggcgcttgtgggagataagtcacttgcattttggcttatggatgcagagatgtatacaaatatgagcgtgttgactccatttacccctgtaatcgaccgcggaattcagctgcacaagatgatcaggctcatcacacacggcctgggcggcgagggctatctgaatttcatggggaatgaatttggtcaccccgagtggctcgatttcccacgcaaaggcaataacgagtcataccattacgctcgcaggcagtttcatcttaccgacgacgatttgttgcgctacaagttccttaacaactttgatcgggatatgaaccgactggaggagagatacggatggttggccgctccgcaagcttacgtgtccgagaagcatgagggcaacaaaatcatcgcattcgaacgggcaggcctcctgttcatattcaattttcacccctccaagagctacaccgactaccgcgtgggaaccgcgcttcctgggaaattcaagattgtcttggattctgacgccgccgaatacggcgggcatcagagactcgatcattctacggattttttctcagaggccttcgaacataacggtcggccctactccctgctcgtctatataccgtctcgcgtggccctgatcctgcagaacgtagaccttccaaac

SEQ ID NO: 12769 - DNA, 2106 bp, synthetic construct
  misc_feature 1..2106: note = source = /note="Description of Artificial Sequence: Synthetic coding sequence"
  source 1..2106: mol_type = other DNA
atggccgctcctatgactccagccgccaggccggaggactatgaagcggccctcaatgctgcactggccgacgtgcctgagttagccaggctgttggaaatcgatccataccttaagccatatgccgtggatttccagcgccggtataaacaattttcccagatcctgaagaacattggggagaacgagggagggattgataagttttccaggggatacgagagtttcggggttcacagatgcgcagacgggggtctgtattgtaaggagtgggccccaggagcggagggagtgttcttgacgggcgattttaatggttggaatccgttctcttacccctataaaaagctggactacggcaagtgggaactgtatatcccgcctaagcagaataaatccgtcttggtcccacacgggagtaaactgaaagtggtgatcacaagcaagtctggtgagattctgtaccgcatctctccctgggctaagtatgttgtcagggaaggggataatgttaattacgactggatccactgggaccctgagcattcctacgagttcaagcactccaggcccaagaagccaaggagcctcaggatctacgaatctcacgttggcatttcatcacacgagggcaaggtcgcctcctataaacacttcacgtgcaacgttctcccacgcatcaaaggactggggtacaactgtatccagctgatggctattatggaacacgcctactacgcctcatttggctatcagatcacgtctttcttcgctgcctccagccgctacggcacacccgaggagctacaggaactggtcgacaccgcacactctatgggaatcatagtgcttctggatgtggtgcactcacatgctagcaaaaattctgccgatggactgaacatgttcgacggtacagatagctgctacttccacagtgggcctcggggaacgcacgacctgtgggacagtaggctcttcgcttacagctcttgggaaatacttcggtttctattaagcaatattcggtggtggttggaggaatatagattcgacggcttccgcttcgatggcgtgacgtcaatgttataccaccaccacggagtgggacagggcttctccggtgattattccgagtatttcggcctgcaggtggatgaggatgctctcacctatctcatgctggctaatcatctcgtgcacactctctgcccagacagcatcactatcgcggaggatgtgtctgggatgcccgcgctgtgctctcctatatcccaaggggggggggggtttgactatagactggccatggcgattccagataagtggattcagctgctgaaggagtttaaggacgaagactggaacatgggcgatattgtgtatacactcaccaatagaagataccttgagaaatgcatcgcctacgctgaatcgcacgatcaagccctagtaggcgataagtctctggccttttggttgatggatgccgagatgtacaccaacatgagcgttctaacccccttcactcccgtcatcgatcgtgggattcagctccataaaatgattagactcatcacacacgggttgggcggcgagggctatctaaactttatgggcaacgagttcggtcatcccgagtggctggactttccaaggaaagggaataacgaatcgtatcattacgcccgaagacagttccacctgacagatgacgacctgctgcgatataagttcctgaacaatttcgaccgggacatgaataggctggaggaacggtatggttggctcgctgctccacaggcttacgtgagtgagaaacatgagggtaataaaatcatagcattcgaacgggccggcctgttattcatctttaatttccatccgtcaaaatcatatacagactatcgggtgggcactgctctgccaggcaagtttaagattgtcctggattccgatgctgccgagtacggaggtcaccagaggcttgaccactctactgacttttttagcgaggctttcgagcataatgggcgcccttactccctgctggtgtatattccgtctagggttgcgcttattttgcagaacgtggacttgcctaat

SEQ ID NO: 12770 - DNA, 2106 bp, synthetic construct
  misc_feature 1..2106: note = source = /note="Description of Artificial Sequence: Synthetic coding sequence"
  source 1..2106: mol_type = other DNA
atggcagctccgatgactcccgccgcacgccccgaagattacgaggctgcccttaatgctgccctcgctgatgtgccagaactggctcggttgctagaaatagacccctacctgaaaccatatgctgtggacttccagaggcgatataagcagttctcgcagatcttgaaaaatataggggaaaatgagggcggtatcgacaagttttctaggggatatgaatctttcggcgtccatcgctgcgctgatggagggctgtactgtaaggagtgggctcccggtgctgagggggtttttcttacaggagatttcaacggatggaaccctttcagctacccctacaaaaagctggattatgggaagtgggagctgtacatcccaccaaaacagaacaaatctgtgttggtccctcacgggtccaagttaaaagtcgtgattacaagcaagtcgggcgaaatactctaccggatcagcccgtgggcaaagtatgtggtgcgggagggagacaacgtcaattatgattggattcactgggatcctgagcactcatatgagttcaagcactcaagaccgaagaagccccgctcactcagaatctatgaatcccacgttggaatctctagtcacgagggcaaagtggcctcttataaacactttacttgcaatgtgctgcctcgcattaaaggactgggctataattgtatccagctgatggccattatggagcatgcatactacgcatcattcggctatcagatcacaagttttttcgctgcctcctccaggtacggaactcccgaggagttgcaagagctcgtcgacacagcccattccatggggattatagttctgcttgacgttgttcattcacatgcctctaagaattctgccgacggtctcaatatgttcgacggtacggactcttgctattttcacagtggcccacgcggtacacacgatctctgggacagcaggctgttcgcctacagctcttgggagattctgcgatttcttctctcgaatattagatggtggttagaggagtaccgattcgatgggttcagattcgatggtgtaacaagtatgctatatcatcatcatggtgtcggccagggcttctcgggcgactactctgagtatttcggactgcaggtagatgaagatgctctgacttatctaatgctggctaatcacctcgttcatacactctgtcctgactcaatcacgatagctgaagatgtgtccggcatgcctgccctctgttccccaatatcccagggcggtggcggcttcgactacaggctggcgatggcgattcccgacaaatggatccagctccttaaggagtttaaggacgaggactggaacatgggtgacattgtgtatacactgacaaataggagatacctcgaaaaatgtattgcctacgcagaatcccacgaccaggccctggtgggcgacaagagtttggctttctggctgatggatgcggaaatgtacactaatatgagcgtgttaaccccctttaccccagtgatagaccgagggatccagctccataagatgatccggctcatcacccacggcctggggggggaagggtacctgaattttatggggaatgaatttgggcatccagaatggctggacttcccacggaaggggaataatgagtcatatcattacgcccgccgacaatttcacttgacagatgacgatttgctacgatacaaatttctcaataactttgacagggacatgaatagattagaggagcgttacgggtggcttgcagcaccccaggcctacgtctccgagaaacacgagggcaataagataatcgcttttgaacgcgcaggattactatttatttttaacttccatccttccaagtcctatactgactatagagtgggaacagccctcccaggcaagtttaagatcgtcttggattcggatgccgcagaatacgggggtcaccaaagactcgatcactcaaccgatttcttctccgaggcctttgaacacaatggccggccatactcactgcttgtgtatattccttctcgggtggcactcatcctccagaacgtggacctgcccaac

SEQ ID NO: 12771 - DNA, 2106 bp, synthetic construct
  misc_feature 1..2106: note = source = /note="Description of Artificial Sequence: Synthetic coding sequence"
  source 1..2106: mol_type = other DNA
atggccgccccgatgaccccggccgcacgccccgaagattacgaagccgcgcttaatgcagcgttggctgatgtgccagagctcgcgcgcctgctcgaaatcgatccttaccttaagccatacgcggtcgactttcagaggcggtacaaacaattctcgcagattctgaagaacatcggtgaaaatgagggcggtatcgacaagttttcccgcggctacgagtccttcggcgtgcaccggtgtgctgacggaggactctactgcaaggaatgggccccgggggctgagggagtgttcttgactggggacttcaacggctggaaccctttttcgtacccctacaagaaactggattacgggaagtgggaactgtacatcccaccgaaacagaataagtccgtccttgtccctcatggcagcaagctgaaagtggtgatcacctcgaagagcggcgagatcctctaccggatctcaccgtgggcgaagtacgttgtgagggagggtgataatgtcaattacgactggatacattgggatcctgaacactcctatgaattcaagcattcacgtccgaagaagcctcggagcctccgtatttacgaatcccacgtcggcatcagcagccatgaaggaaaagtggcctcatataagcacttcacttgcaacgtgctgcctaggatcaagggactgggttacaattgtattcagctcatggcgatcatggagcacgcatattacgcctcattcggataccagataacttcctttttcgcggccagctcgcgctacggaacccccgaggagctgcaagaattggtggacacggctcattctatgggcattatcgtgctgctggacgtcgtgcattctcacgcatcaaagaatagcgctgatggactgaacatgttcgatggaaccgattcctgctatttccactctgggccacggggaacccatgacctttgggattcgcgcctgtttgcctacagctcatgggagatccttcggttcctgctgagcaatatccggtggtggctcgaagaataccggtttgatggcttccgcttcgacggagtgacctccatgctttaccaccaccacggggtgggacaaggattcagcggcgactattccgagtactttgggctgcaagtggacgaggatgctttgacctacctgatgctggcaaatcacctggtgcatactctgtgcccggattccatcaccatcgcggaggatgtgtctggaatgcctgctctgtgctccccgatctcgcaagggggaggtggttttgactatcgcctggctatggcaatccctgataagtggatccagttgctgaaggaattcaaggatgaggactggaacatgggcgacatcgtttacactctgactaatagaaggtaccttgaaaaatgcatcgcttacgcggaaagccacgaccaagcgttggtcggagataaatcgctcgccttttggctcatggacgccgaaatgtacaccaacatgagcgtgttgactccgtttactccggtgatcgatcgcggaatccagctgcacaagatgattcgcctcatcacccacggattgggaggagaaggttacctgaacttcatggggaacgagttcggccatccagaatggctggacttcccgcgcaaaggcaacaacgaatcgtatcactatgcccgccgccagttccatcttaccgacgacgacttgctgagatacaagtttctcaacaacttcgatagagacatgaaccgattggaagaacggtacggatggctcgcggcgccgcaggcctacgtgtccgaaaagcatgagggaaataagatcatcgcgttcgagagggctgggcttctgtttatcttcaacttccacccgagcaaaagctacaccgattacagagtgggcacggcactccccggaaagttcaagatcgtcctggattcagacgcagccgaatacggcggacaccaacgcctggaccattcaaccgacttcttctcggaggctttcgaacataacggacgtccttactcgctcttggtgtatattccgtccagagttgcactcatcctccaaaacgtcgacctgccgaac

SEQ ID NO: 12772 - DNA, 2106 bp, synthetic construct
  misc_feature 1..2106: note = source = /note="Description of Artificial Sequence: Synthetic coding sequence"
  source 1..2106: mol_type = other DNA
atggccgctccgatgactccagctgctagaccggaggactatgaggcagcgctgaacgccgctctggctgatgtgccagagctcgcacgtctgctggagatagacccttacctgaagccatacgccgtcgatttccagcgccgctacaaacagtttagccagatactgaagaatattggcgaaaacgaaggcggcattgacaaattctcccgtggttacgagagcttcggcgtgcaccgctgtgcagatggcggtttgtactgtaaggaatgggctcctggcgctgagggagtgttccttaccggcgattttaacgggtggaacccgttttcctacccgtataaaaagctggattacggcaaatgggagctgtacatcccaccaaagcaaaacaaaagcgtcttagtaccgcatggttccaaactcaaggtcgtcattacgagcaaaagcggtgaaattctgtaccgcatctcaccatgggcgaagtacgttgtccgcgagggtgataatgtgaattatgactggatccactgggatccagaacattcctacgaattcaaacactccaggccaaagaagcctcgctccctgcggatctacgaatcccacgtgggaattagcagccacgagggcaaggttgcgagctataagcatttcacctgcaatgtgctgcccagaatcaaaggcctgggctacaactgtatccagctgatggctatcatggagcatgcatactatgcgtcttttggttaccaaataacctctttcttcgcggcttctagccgctacgggacccccgaagaactgcaggagctggtggatactgctcatagcatgggcattattgttctgctagacgttgtgcactcacacgcatctaagaactccgcagatgggctgaatatgttcgacggtaccgactcttgctatttccatagcggcccgcgcggaacccatgacctttgggatagccgcctgttcgcctatagcagctgggaaattctgcgctttctgctgagcaacattcgctggtggcttgaggagtaccgttttgacggtttccgtttcgacggtgtgacgtccatgctgtaccatcatcatggcgtgggccagggttttagcggcgattactcggaatatttcgggctgcaggtggacgaggacgcgctgacttacctcatgctggcaaatcacctagtacacaccctgtgcccggattctatcaccattgcggaggacgtgagcggaatgccggccctatgctctcctatctctcaaggcggtggaggtttcgattaccgccttgctatggcgataccagacaaatggatccagcttctaaaggagtttaaggatgaggattggaatatgggtgacatcgtgtacacgctgaccaaccgcaggtacctggaaaagtgtatcgcgtatgccgaatctcatgaccaggcactggttggtgacaagtccctggcgttctggctgatggacgcggagatgtacaccaatatgagcgtccttacccccttcacaccagttattgaccgtggtatccaactgcataagatgatacggctgatcactcatggcctgggtggtgaaggatacttgaatttcatggggaacgagtttggtcaccctgaatggcttgattttcctaggaaagggaataacgaaagctaccattatgccagacgtcaatttcatctcacagatgatgacctgcttcgctataaattcctcaataactttgaccgagacatgaatcgactggaggaaaggtacggctggttggctgcgccgcaggcgtacgtgtcagaaaaacatgagggcaacaaaattatcgcatttgaacgggccggcctgcttttcatcttcaattttcatccaagcaaaagctacacggactaccgcgtcggtactgcgctgccgggcaagttcaagatcgtgctcgattctgatgctgctgagtacggtggccaccaacgcttggatcattctacggatttcttcagcgaggcgttcgaacataatggccgcccatatagcctgttggtgtatataccgagcagggtcgctctgatacttcaaaacgtagatctgccgaac

SEQ ID NO: 12773 - DNA, 2106 bp, synthetic construct
  misc_feature 1..2106: note = source = /note="Description of Artificial Sequence: Synthetic coding sequence"
  source 1..2106: mol_type = other DNA
atggccgccccaatgacaccagctgcccggcccgaagattacgaagcagcactcaatgctgcattagccgatgtgcctgaacttgcgcgactccttgaaatcgatccttatttaaaaccttatgccgtggatttccagagacgatataaacagttttctcagatactgaagaacatcggggaaaatgaaggagggattgataaattcagtagagggtatgagtcatttggagtgcataggtgcgctgatggagggctgtattgcaaggaatgggccccaggagccgagggagtgttccttacaggagatttcaacgggtggaaccctttttcctatccttacaaaaagctcgactacgggaagtgggagctatatattcctccaaaacagaacaaatctgtcttggtgcctcacgggtctaagctgaaagtcgtaatcacgtcaaaatccggggaaatattatataggatatccccatgggccaagtatgtagttcgggaaggggataacgtgaattatgattggatacattgggatccagagcatagttacgaatttaaacatagtcgccctaaaaaacctagatctctgaggatctacgaaagtcacgttggaatctcatctcatgaagggaaagtagcatcttacaaacattttacttgcaatgtgctcccacggatcaaagggctcgggtataattgtattcagttgatggctataatggagcacgcttactatgctagtttcggatatcagataacatctttttttgctgcctcttctcggtatggaacacctgaagagctgcaggaattagtagatacagctcactctatggggatcattgtactgcttgatgtggtgcattctcacgcctctaaaaacagtgcagatggactaaatatgttcgatgggactgatagttgttattttcactcggggccacggggaactcacgacttgtgggatagtcgtctgttcgcctactctagttgggaaatacttagattcctcctttctaatatccggtggtggctagaagaatatcggtttgatggattcaggttcgatggggtgacgtctatgctatatcatcatcacggggtagggcagggattctctggagattattctgaatactttgggttacaggtggatgaagacgccttaacatatctcatgctggctaatcatttggtccatactttatgtcccgattctattacaatagcagaagatgtaagtgggatgcctgccctatgttccccaatctctcagggagggggggggtttgactatcgcctggcgatggcaatacctgataaatggatccagcttcttaaagagtttaaagatgaggactggaacatgggagatatagtttatacattaacaaataggagatacctggaaaaatgcattgcctacgctgaatcgcatgatcaggctttagtaggggacaaatccctggcgttctggttaatggacgccgagatgtatactaacatgtctgtgctcacacctttcactcctgtgatcgatcgcgggatccagttgcacaaaatgattcgtctcattactcacggactaggaggggaagggtaccttaattttatgggaaacgaattcgggcatcccgaatggcttgatttcccacggaaaggaaataatgaatcctatcactacgcccgcagacagttccatctgacagatgatgatctcttgaggtacaagttcctcaacaactttgatagagatatgaataggttggaggaacgatacgggtggctcgctgcaccacaggcttatgtatccgaaaagcatgaggggaataaaattatcgcctttgagagggcaggactacttttcattttcaactttcatccctctaagtcctatactgattatcgcgttgggacggcccttccaggaaaattcaaaatagtccttgattcggacgctgccgaatatggggggcatcagaggcttgatcattccacagactttttttctgaagcctttgagcataatggaagaccgtacagtctgctggtatacataccttctagagtagccctcatccttcaaaatgtcgacctcccaaat

SEQ ID NO: 12774 - DNA, 2106 bp, synthetic construct
  misc_feature 1..2106: note = source = /note="Description of Artificial Sequence: Synthetic coding sequence"
  source 1..2106: mol_type = other DNA
atggccgcccctatgactccagccgcgcggccggaggactacgaagcagcactgaacgctgccctggcggatgtgccggagctggcaagactcctggagatcgacccgtacctcaagccgtacgcagtggatttccaaagacgctataaacagtttagccaaatcctgaagaacatcggcgaaaacgaagggggaatcgataagttttcacggggatacgaatctttcggcgtccatcgctgcgcggacggaggactctactgtaaggaatgggcgccaggagctgagggagtttttctgaccggagatttcaacggttggaatccattctcctacccgtacaagaagctggactacggaaagtgggaattgtacattccgccaaaacagaacaagtcggtcctggtgcctcacggcagcaagctgaaagtggtgatcacctcaaagtcaggcgagatcctttacagaatcagcccttgggccaagtatgtggtgagggaaggagataatgtgaactacgattggatccactgggatccagagcattcttacgaattcaaacattcgcgcccgaagaaaccacgctcccttcggatctacgagagccacgtgggaatctcctcacacgaaggcaaagtggctagctacaaacacttcacctgcaatgtgctgccccggattaagggtctgggatacaactgtattcagctgatggcgattatggaacacgcatactacgcttccttcggctaccagatcacttccttcttcgcagcgtcgtccaggtacggtacccctgaagagcttcaagaactcgtcgacaccgcccactcaatgggcatcatcgtcctgctcgacgttgtgcactcgcacgcaagcaagaacagcgcggatggactcaatatgttcgacggaactgacagctgctacttccactcgggaccccggggaacccacgacctgtgggactcaagactttttgcctactcctcgtgggaaatcctgcgattcctgctgtccaacatcagatggtggctggaagaataccggtttgacggatttcggttcgacggcgtgacttctatgctgtaccaccatcacggagtggggcagggattctcgggcgactactctgaatacttcggcctgcaagtggacgaggatgcccttacgtacctgatgctcgcgaatcacctggtccacaccctgtgcccagattctattaccatcgccgaggacgtctcgggaatgcccgcactgtgttcgccaatttcgcagggcggaggaggtttcgattaccggctggcaatggccattccagacaagtggatccagctgctgaaggaattcaaagacgaagattggaacatgggagacattgtgtacaccttgactaacagacgctacttggaaaagtgcatcgcctacgccgaatcccacgaccaggccctggtcggggacaaatccctggccttttggttgatggacgcagaaatgtataccaatatgagcgtgctgacccctttcactcccgtgatcgataggggaattcagctccacaagatgatccggctgatcactcacggactggggggcgaggggtatctgaacttcatgggcaatgaattcggacacccggaatggttggactttccacgcaaggggaataatgaaagctaccattacgcgcgccggcagttccacctgaccgatgacgatctgctgcggtacaaattcctgaataacttcgaccgggatatgaaccgcctcgaggagcggtacgggtggctggctgctccacaggcgtacgtgtctgagaagcacgagggaaacaagatcatcgcgtttgagcgagcaggtttgctgttcatcttcaacttccacccatccaagtcgtacactgactaccgggtcggtaccgcgctgccgggcaagtttaagatcgtgctggactcagacgcggcggagtacggcggacatcagagactggaccactcaaccgacttcttcagcgaggccttcgaacataacggcagaccgtactcgttgttggtctacatcccctcgcgcgtggctcttatcctccaaaacgtggaccttccaaac

SEQ ID NO: 12775 - DNA, 2106 bp, synthetic construct
  misc_feature 1..2106: note = source = /note="Description of Artificial Sequence: Synthetic coding sequence"
  source 1..2106: mol_type = other DNA
atggccgcgcccatgaccccggccgctcgaccagaagattacgaagcagccttgaacgctgccctggccgacgtgcccgagcttgcgcggttgttggagatcgacccttatcttaagccctatgcggttgattttcagcgcaggtataaacagttcagccagatcctgaagaacatcggagagaacgagggagggattgacaagttctcaagaggttatgagtctttcggcgttcatcgctgcgctgacggggggctctactgcaaggaatgggcgccgggcgccgagggcgttttcctgactggcgactttaacggttggaatcccttctcttacccatacaagaagctcgattacgggaagtgggagctatacatcccaccaaagcaaaataagtctgttctagtcccacatggaagtaagctcaaggtggtcataactagcaagtccggcgagatattgtaccgtatctctccctgggccaagtacgtcgtgagggagggggataacgtcaactatgattggatccactgggatccggaacactcatacgagtttaagcattccagaccaaaaaaaccaagatcattaaggatctacgagtcacatgtgggcatcagttcccacgagggaaaagtggcttcctataaacactttacctgtaacgtgcttccacgcatcaaaggacttggctataattgtattcagctaatggccattatggaacacgcctattacgcgtcattcggttatcagatcacgtcattcttcgcagcctcctctagatatggcacaccagaggagctgcaggagctcgtggataccgcgcactctatgggaattattgtgttactggatgtggtacattcccacgcttctaagaatagtgccgatggcctgaatatgttcgacggaaccgactcatgttatttccatagcgggccgcggggcactcatgacctctgggattcgagactctttgcttattccagctgggaaatacttcggtttctgctgtctaacattcgctggtggctggaggagtatcggttcgacggctttagattcgacggcgtcacgtctatgctctatcaccaccatggtgtggggcagggtttttcaggggactatagcgagtattttggactccaggttgacgaggacgctctgacctacctcatgctggctaatcacctggtgcacaccttgtgccctgattcaattacgatcgctgaggacgtaagcggaatgccggccttgtgttcccctatctcccagggaggaggcgggtttgattaccgcttggcaatggctattcctgataagtggatccaactcctgaaagagttcaaagacgaggattggaacatgggtgacatagtttacacgctgactaaccggaggtaccttgagaaatgtatagcatacgcggagtcccacgatcaggctctagtcggggataagagcttggccttctggctgatggatgcagaaatgtataccaatatgtcagtgctgaccccattcaccccagtaatcgacagggggattcaactgcacaagatgattcggctgatcacacatgggctgggcggagagggctatctgaattttatgggaaacgagtttggccatccggagtggctcgatttccctcggaagggaaataatgagagttatcattacgctagacggcagtttcatttgaccgacgatgacttgttacggtacaaattcctgaacaatttcgatcgcgatatgaatcggctggaggagcgttacgggtggctcgctgcaccacaggcttacgtctccgagaagcatgaggggaacaaaatcatcgctttcgaacgagcggggctgctgttcattttcaacttccatcctagcaagagttatactgactaccgtgtgggtaccgcactcccgggcaagttcaagatcgtcttggacagtgatgccgctgagtatggggggcaccagcgacttgaccattccactgactttttctctgaggcattcgaacataacggcagaccctattcactcctggtgtatattccctcccgggtcgcccttatcctgcagaacgtggacctgcccaac

SEQ ID NO: 12776 - DNA, 2106 bp, synthetic construct; identical to SEQ ID NO: 12754
  misc_feature 1..2106: note = source = /note="Description of Artificial Sequence: Synthetic coding sequence"
  source 1..2106: mol_type = other DNA

SEQ ID NO: 12777 - DNA, 2106 bp, synthetic construct
  misc_feature 1..2106: note = source = /note="Description of Artificial Sequence: Synthetic coding sequence"
  source 1..2106: mol_type = other DNA
atggccgcgccaatgacaccggcagctcgtccggaggactacgaggcggcactgaacgccgcattggccgatgtgccggagttagcgcgtctgctggaaattgatccatatttgaagccctacgccgttgacttccagagacgatacaaacagttttctcaaattctgaagaacataggtgagaacgagggtggtatcgataagttctcacgcggctatgaatcctttggagtgcatcggtgcgcagatggtggattgtactgcaaagagtgggcacccggcgccgaaggggtctttctcacgggagatttcaatggctggaaccccttctcgtatccgtacaagaagctagattacggcaagtgggagttgtacataccgccgaaacaaaacaagagtgtactcgtgcctcatgggtccaagctgaaggtcgtgatcacgtccaagtcgggggagatcctttaccggatatccccctgggcgaagtatgtggttcgggagggagacaacgtcaactacgactggattcactgggacccggaacactcctatgaattcaaacactcccgcccaaagaagcctagaagcctgaggatttatgagagtcacgttggcattagctcccacgagggcaaggtggcctcgtacaaacacttcacatgtaacgtgttgccccgcatcaagggccttggatacaactgcattcagctgatggcaatcatggagcatgcctactacgcgagcttcggctatcagatcacatcgttcttcgccgcatcatcccggtacggaaccccagaggagctgcaggaactggtcgatacggcccacagtatgggcatcatcgtcctgctggatgtcgtacactcacacgcttccaaaaattcagccgacggactgaatatgttcgacggcacggattcctgctacttccatagcggacccaggggaacacatgacctgtgggattcgaggctgttcgcctactcaagctgggaaatcctcaggtttctgcttagcaacattcgctggtggcttgaagaatatcggtttgacggcttccgttttgacggcgtgaccagcatgctgtatcaccatcacggtgtcgggcagggattctcaggagattactccgagtactttggtttgcaggtcgacgaggacgcgctcacgtatctcatgctcgccaatcatctagtacataccctgtgccccgacagcatcacgattgcggaagatgtgtccggcatgcctgcgttgtgttcgccaattagccaaggtggcggcggattcgattatcggttggcgatggctatcccagacaagtggatacagctcctgaaggagtttaaggatgaggactggaatatgggcgacattgtttacaccctgactaatcgaagatacttggagaagtgcattgcctacgctgagagccatgaccaagcattggtcggagacaaatccctggcattttggcttatggatgccgagatgtacaccaacatgagcgttctgaccccctttactccagttatcgatcgaggcatacaactgcataagatgatcagacttatcacgcatgggctgggcggggaaggatatttgaattttatgggcaacgaattcggtcacccagagtggctggacttcccacgtaagggaaataatgagtcctaccactacgccagacgacagtttcatcttacggatgacgatctacttcggtataagtttttgaacaactttgaccgtgatatgaatagactggaagagcgctatggctggctggccgcgccacaggcctatgtgagtgagaagcatgagggaaacaagattatagccttcgaacgagcgggattgttgtttatttttaattttcacccctcaaagagttacacggattatcgcgtgggcacagccctaccgggcaagttcaagattgtcctcgactcagacgcggccgagtacggcggacatcagaggttggatcattcgaccgatttcttttcagaggcgttcgaacataacggtcgcccgtacagcctccttgtgtacattccaagccgagtggccctgattctgcagaacgtagacttgcctaat

SEQ ID NO: 12778 - DNA, 2106 bp, synthetic construct
  misc_feature 1..2106: note = source = /note="Description of Artificial Sequence: Synthetic coding sequence"
  source 1..2106: mol_type = other DNA
atggccgcgccaatgacccctgcggcgcgaccagaggactatgaagccgcactcaatgccgctctcgctgacgtgccagaacttgcaaggctccttgaaatcgatccataccttaagccctacgcagtggacttccaaaggcggtacaagcagttttcacagatactcaaaaacatcggcgagaacgaaggtggcatcgataagttttcgagagggtacgaatcatttggcgttcacagatgcgccgatggaggtttgtactgcaaagagtgggcccctggggcagagggtgttttcctgaccggagactttaacggatggaacccattttcatacccgtacaaaaagctggattacggcaagtgggagctttacattcccccgaagcaaaacaagtcggtcctcgtgcctcacggatcgaagctgaaggtcgtcataacctcgaagtccggggaaattctgtacaggatttcaccttgggccaagtacgtggtgagggaaggagataatgtgaattatgactggattcactgggaccctgagcactcctacgagtttaaacattcaagacccaagaagccccgttccctgcggatttacgaatcacatgtgggaatttcgagccacgagggaaaggttgccagctataagcattttacttgtaacgtgcttcccagaatcaagggactgggatacaactgtattcaactgatggcgatcatggaacatgcatactacgcatccttcgggtaccagatcacttcgttttttgcagcaagttcgcgatacggaactccggaggaactccaagaacttgttgatacggcgcactcgatgggtattatcgtgcttctggatgtcgtgcattcgcatgcgtcgaagaacagcgcagatggtttgaatatgttcgatggtaccgacagctgttacttccattcaggaccccggggaacccatgacctctgggactcaagactttttgcttactcctcgtgggagatcttgcgctttctgctgagcaacattcgatggtggttggaagaataccgatttgatggctttcggtttgacggcgtgacttccatgctgtaccatcaccatggagtcggacagggattctcaggcgattacagcgaatactttggactgcaggtggatgaagatgcactcacgtacctgatgcttgcaaatcatcttgtgcacaccctttgccctgatagcattactattgcagaggatgtgagtggaatgccagcactctgtagcccgattagccaaggtggcgggggttttgattacagacttgcaatggctatcccagacaagtggatccaactgcttaaggaattcaaggacgaagattggaatatgggagatattgtgtacaccctcaccaatcgccgctacctcgaaaagtgtatagcctatgcagagtcgcatgaccaagctctggtgggtgataagtcgctcgccttttggcttatggatgccgaaatgtacaccaacatgtcagtgctgaccccctttactccggttattgatcggggaatccaactgcataagatgattcgccttattactcatgggcttggaggtgaaggctacctcaatttcatgggtaatgagtttgggcaccctgagtggcttgactttccacggaaaggtaataacgagtcctatcattatgcaagacgccagttccacctgaccgatgatgatcttctccggtacaagtttctgaacaactttgatagggatatgaaccgcttggaggaacggtacggatggcttgccgcaccgcaggcatacgtcagcgaaaagcatgagggaaacaagatcattgcatttgaaagggcaggtttgcttttcattttcaatttccatcctagcaagtcctacactgactaccgagtggggactgcactgcccggcaagtttaagatcgtgctggactcggacgcagcagagtacggaggacaccagcgtcttgatcattcaactgactttttctcggaggcgttcgaacacaacggacgaccttactcgctgctggtgtacattccttcaagagtggccctgatcctccagaatgtcgacctccccaat

SEQ ID NO: 12779 - DNA, 2106 bp, synthetic construct
  misc_feature 1..2106: note = source = /note="Description of Artificial Sequence: Synthetic coding sequence"
  source 1..2106: mol_type = other DNA
atggccgcccccatgacgccagcggccagacccgaggactacgaggccgctctgaatgctgctctggctgacgttcctgaacttgcccgcctcctggagatcgacccctatctgaaaccctatgctgtggactttcaaaggcgttacaagcaatttagccagatcctgaagaacattggtgagaacgaggggggaatcgataaattcagtaggggctatgagtccttcggagtccaccgttgtgccgacggcggcctgtattgcaaagaatgggcacccggcgccgagggcgtgtttctgacgggggatttcaatggatggaacccctttagttacccatacaagaagctggattacggaaaatgggagctgtatattccacctaagcagaataagagcgtgctggtaccccatggaagcaagctgaaggtagtgatcacatccaagagtggggaaattctctatcgtatctctccttgggctaagtatgttgtccgcgaaggcgacaacgtaaactatgactggatccattgggaccctgagcacagctatgagtttaaacacagtagaccaaagaagccgcgctctctgaggatctatgagagtcacgttggtattagctcccacgagggcaaggtggcctcgtacaaacacttcacctgcaatgtgctgcctcgaatcaaaggactgggttacaattgtattcagctgatggcaatcatggaacatgcgtattacgcatcatttggatatcagatcacctccttctttgccgctagttccaggtacggcacgcctgaagagctgcaggagctggtggatacagcccacagtatggggataattgtgctgctggacgtggtgcactcacatgctagcaagaattcagcagatggtctgaacatgttcgatgggacagactcttgttactttcattcaggcccccgaggcacacatgacctatgggactctcgactgttcgcctactctagctgggaaattctccgctttctgctgtctaatatcagatggtggcttgaggagtaccggttcgatggcttccgttttgacggggttacaagcatgttataccatcatcacggcgtgggacagggtttctcaggcgattactctgagtacttcggccttcaggtcgacgaagatgccttgacatacctgatgctggctaatcacttggtccacacattatgccccgactctatcaccattgcagaagacgtgtcaggcatgcccgcgctgtgcagccctatctcccagggaggcggaggctttgactacagattagcaatggcaatcccggacaaatggatccagctcttgaaggagtttaaggatgaggactggaatatgggagacatcgtttacaccctgacaaaccgccggtacctcgagaagtgtatcgcctacgccgagagtcatgaccaagcattggtgggcgacaaaagcctggccttttggctgatggatgcggagatgtacacaaacatgagtgtccttaccccgttcacaccggtaatcgatcgtgggatccaactgcataaaatgataagactgatcacacacgggttaggaggcgaaggttacttgaattttatgggaaacgagttcggccatcctgaatggctggactttcctcgcaaaggaaacaacgagtcatatcattacgctcggcggcagtttcacctgactgacgatgacctgctcagatacaaatttctaaacaattttgaccgagacatgaacagactcgaagagagatacgggtggttggccgcaccacaagcatacgtgtcagagaagcatgagggaaataaaataatagcctttgaacgtgccggattgctgtttatcttcaacttccatccctcgaagagctacacagattaccgggtgggtaccgcgctgcctggcaaattcaagattgttctcgattccgacgcagctgaatacggtggtcatcagcgtcttgaccatagcacagactttttctcagaggcattcgagcacaacgggaggccctactctctcctggtttatattccttcccgcgtcgctctgattctgcagaacgtggacctgccgaat

SEQ ID NO: 12780 - DNA, 2106 bp, synthetic construct
  misc_feature 1..2106: note = source = /note="Description of Artificial Sequence: Synthetic coding sequence"
  source 1..2106: mol_type = other DNA
atggcagcacctatgactcctgcagcaagacctgaggactacgaagcagctctgaacgctgcactggccgacgtgcctgagctggcaagattgcttgaaattgatccatacctcaaaccttacgcagttgactttcaacgaaggtataaacagttctcacaaatcctgaagaacataggagagaacgaagggggaatcgacaaattctcccgcggatacgaatcatttggcgtgcatcgatgtgctgatggtgggttgtactgtaaggaatgggcgcctggtgcagaaggtgtgtttcttacgggagatttcaatggttggaatccattcagctacccttacaagaagctggattacggcaagtgggaactttacattccacctaaacaaaacaagtccgtgcttgtccctcatggaagcaagctcaaagtggtgataacgtcgaaaagcggagagattttgtaccgcatttcgccttgggcaaagtacgtggttcgagaaggtgataacgtgaattacgattggatacattgggaccctgagcactcatacgagtttaagcactcgcgcccaaaaaagcctagaagccttagaatttacgagtcccatgtcggaatatcaagccacgagggtaaagtggcctcatacaaacacttcacctgtaacgtgcttcctcgcatcaagggattgggatacaattgcatccagcttatggcaattatggaacatgcctactacgcgtccttcggataccagattacctcgttcttcgcggcatcatcacggtacgggacccccgaggagctgcaagaactcgtggatactgcacattcaatgggcattatcgtccttctggatgtggtgcactcccacgcatcgaagaactccgcggatggactcaatatgttcgatggcaccgattcgtgttactttcactcgggaccccgcgggactcatgatctgtgggattctcgcctgttcgcatactcgtcatgggagattttgagatttctgctttccaacattaggtggtggctggaagaataccggttcgatggatttagatttgacggagtgacttcaatgctgtaccaccatcacggggtcggacaaggtttctcgggcgattactctgagtacttcggacttcaggtcgacgaagatgcactgacctacttgatgctcgcaaaccatctggttcatactctctgtccagattcaatcaccattgccgaagatgtctcaggtatgcctgcactgtgttcgccaatttcacaaggtggcggggggttcgactacagactggcaatggccattcccgataagtggattcagcttctgaaggagtttaaagacgaggactggaatatgggcgatattgtctacaccctcactaataggagatacctcgaaaagtgtatcgcatacgccgaatcgcatgatcaggcactggtgggtgataaatcactggcattttggctgatggacgcagagatgtatactaacatgagcgtgctgaccccttttacccccgtcatagatagaggtattcaacttcataagatgatcagactgatcacccacggtcttggaggagaaggttacctcaactttatgggaaacgaattcggacatccagaatggttggattttcctcggaaagggaacaacgaatcgtaccattacgctaggaggcaatttcacctcaccgatgatgacctgctgcggtacaaatttctgaacaatttcgatagggacatgaatcgccttgaggaacgatacggctggctggccgccccgcaagcgtacgtgagcgagaaacatgaaggtaacaagattatcgcatttgagagagccggtctgcttttcatattcaattttcaccctagcaaatcatacacggattatcgtgtcggcactgcactccccggaaagttcaagattgtcctggatagcgatgccgcagaatatggggggcaccagcgtctggatcactcgacggactttttctctgaagcattcgaacacaatggtagaccttacagccttctggtgtacatccctagccgggtggcacttatcctgcagaacgtggacctgccaaac

SEQ ID NO: 12781 - DNA, 2106 bp, synthetic construct
  misc_feature 1..2106: note = source = /note="Description of Artificial Sequence: Synthetic coding sequence"
  source 1..2106: mol_type = other DNA
atggcagccccgatgactcctgccgcaaggcctgaagattatgaggcggccttgaacgccgcactggcggacgtccctgagcttgcccgcctgctggagatcgacccatacctgaagccgtatgccgtggactttcagcggagatacaaacaattttcgcaaatcctcaagaacattggggaaaatgaagggggaatcgataagttctcacgaggttacgagtcgtttggcgtccacagatgtgccgacgggggactctattgcaaagagtgggctcccggtgctgagggagttttcctgactggagactttaacggttggaacccgttctcgtacccgtacaagaagctcgactacggcaagtgggagctttacatcccgccaaagcaaaacaagtccgtgctggtcccacatgggagcaagctgaaggtcgtgatcacttcgaagagcggagaaatcctctatagaatttcgccctgggctaagtacgttgtgcgagaaggtgacaacgtgaactacgattggatccattgggatcccgaacactcctacgaattcaaacatagccggcccaagaagccgcgcagcctccggatctacgagagccacgtcggaatttcctcgcacgaaggaaaagtggcgtcgtacaagcactttacctgcaacgtgctgccgcgcatcaagggcctcggttacaactgtatccagttgatggcaatcatggagcatgcctactatgcatcattcggctaccagattacttcctttttcgccgctagctcgcgctacggtactcctgaagagctgcaagaactggttgacaccgcccactcgatgggcattatcgtgctgctcgatgtggtccacagccatgcatcgaagaactcagcggacggactcaacatgtttgacggtaccgacagctgttactttcactcgggacctcgcggcacccacgatctgtgggacagccgccttttcgcatactcctcgtgggagattcttcgcttcttgctgtcgaacattcggtggtggctcgaagaataccggttcgacggatttcggttcgacggggttacctctatgctctaccatcaccacggggtgggccagggcttctcaggcgactacagcgaatacttcggactccaagtggatgaggacgcattgacgtacctgatgctggctaatcatctggtgcataccctctgcccggactccatcactatcgccgaggatgtcagcgggatgccggcactgtgttcgccgatctcgcagggtggcggtgggtttgattacagactggccatggcaattcccgacaagtggatccaactgctgaaagagttcaaggatgaagattggaatatgggagacatcgtctacactctgaccaatagacgctacctggaaaaatgtattgcgtacgccgaatcacatgaccaggctttggtcggggacaaatcactggcgttctggctgatggacgccgaaatgtacaccaacatgagcgtgctgactcctttcaccccagtgatcgaccgcggaatccaactgcacaaaatgatccgcctcatcacccatggattgggaggcgaaggatacttgaactttatgggcaatgaattcggacatccggagtggcttgacttcccgcggaagggcaacaatgaatcgtaccattacgccagacggcagttccacctgacggatgatgacctcctcaggtacaagttcctcaataacttcgacagggatatgaaccggctggaagaacggtacggatggctggcggctcctcaggcttacgtttcagaaaagcacgaaggtaacaagatcatcgctttcgaacgcgctgggctgctgttcattttcaactttcacccatcgaagtcttacactgattatcgggtgggaactgcgcttccggggaaattcaagatcgtcctcgactcagacgcggcagaatacggcggacaccagcgcctggatcattcgactgactttttcagcgaagcatttgagcacaacggacggccatactcgctcctggtgtacatcccatcgcgggttgcgctgatcctgcagaatgtcgaccttcctaat

SEQ ID NO: 12782 - DNA, 2106 bp, synthetic construct
  misc_feature 1..2106: note = source = /note="Description of Artificial Sequence: Synthetic coding sequence"
  source 1..2106: mol_type = other DNA
atggcagcacctatgaccccggcagcgcggccagaggactacgaagcggcacttaacgccgccctcgcggatgtgcccgaactcgcgagactgctcgaaatagatccctatttgaaaccatatgcagtggatttccaaagacggtataaacaattttcgcagattctgaagaatatcggtgagaacgagggtggaattgataagttcagcaggggatacgagtcatttggagtgcatcgttgtgctgatggcggtctgtactgtaaggaatgggctcctggagcagagggtgtgttccttaccggtgatttcaatgggtggaacccgttttcatacccatacaaaaaacttgattacgggaagtgggagctctacatcccacctaagcaaaacaagtcagtccttgttccgcacggctccaagctgaaggtcgttattacttcgaagtcaggggaaattctttatcgcatctccccttgggccaagtacgtggtgagagaaggggacaatgtgaactacgattggatccactgggatccagaacattcctacgaattcaagcattcgcggccgaagaaacctaggtcgctgagaatatacgagtcccatgtgggcatctcctcgcacgaggggaaggttgcatcgtacaagcatttcacctgtaatgtgctgcctcggataaagggtctggggtacaactgcattcaactcatggcaataatggaacacgcctactatgcatcgtttggataccaaattaccagctttttcgcagcttcgtcgagatacggtaccccagaagagcttcaagaactggtcgacaccgcacattccatgggtatcatcgtgcttctcgacgtggttcattcacatgcctctaagaacagcgcggacggactgaatatgtttgatggaacggattcatgttactttcactcgggtccccggggaactcatgatctctgggacagcagactttttgcatactccagctgggagatacttagattcctgctttccaatattcggtggtggctcgaagagtaccgttttgatggattccgttttgacggagtgacctccatgctttaccatcaccatggagtcggccaaggattttcaggtgattattcggaatactttggccttcaggtggacgaagatgcactcacttacttgatgcttgccaatcacttggtgcataccctgtgtcctgattcgatcaccatcgccgaagatgtctccggaatgcctgcactctgttcccccatcagccaaggtggtggtggattcgattaccgacttgccatggcgattcccgataaatggatacagctgctcaaagaattcaaagacgaagattggaacatgggggatattgtctacaccttgactaatcgaaggtacctggaaaagtgcattgcatacgcagaatcccatgatcaagctctcgtgggagacaaatcacttgcattctggcttatggacgcagagatgtacaccaatatgagcgtgctgaccccgtttacccccgtgatcgaccgtggcattcaactgcataagatgatccgcctgattacgcatggcttgggtggtgagggttacttgaatttcatggggaatgaatttggacatccagaatggctggatttcccaagaaaggggaacaacgagtcataccactatgcacggcggcagtttcatcttactgacgacgaccttctgaggtacaaatttctgaataacttcgatcgggatatgaaccgcctggaagagaggtacggatggctggcagcacctcaggcatatgtgtccgagaaacacgagggaaacaagattatcgcatttgaaagggcaggacttcttttcattttcaacttccacccatccaagtcgtacactgactacagagtcggtactgcactgcctggaaagtttaagatcgtcctcgattcagatgcggcagaatacggaggtcatcagcgcctggaccacagcactgactttttcagcgaagccttcgaacataacggaaggccatactcgcttttggtgtacatacccagccgcgtggcgctgattctgcagaacgtggatctccctaac

SEQ ID NO: 12783 - DNA, 2106 bp, synthetic construct
  misc_feature 1..2106: note = source = /note="Description of Artificial Sequence: Synthetic coding sequence"
  source 1..2106: mol_type = other DNA
atggcggcccctatgacgcctgctgcccgacctgaggactatgaggctgccctaaacgcagcacttgcagatgtgccagagctggcacggttgctagagatagatccatatctgaagccctacgctgttgacttccaaaggcggtataaacaattttcccaaatactgaaaaatattggagaaaatgagggtggcatcgataagttctccaggggctacgagtccttcggcgtccaccgctgcgccgatgggggactttactgcaaagagtgggctcctggtgctgaaggagtctttttgactggtgacttcaatggctggaatcctttttcatatccatacaaaaagctcgattacggaaagtgggagctgtatatcccacctaagcagaataagtctgtgctggttccccatggctcaaagctaaaagtcgtgatcaccagcaagagcggggagattctgtaccgcatatccccatgggccaaatacgtggtccgtgagggagacaatgtgaactatgactggattcactgggatccagaacattcctatgagtttaagcactcccggcctaaaaaaccgcgcagtctacggatctacgagtcccacgtgggaatctcaagccacgaagggaaagttgccagctataaacattttacgtgtaatgttttaccacgcataaaaggcctaggatataattgtattcagcttatggctatcatggaacacgcatactatgcctcattcggataccagataacctctttcttcgcagcctcttctcggtacggaacccctgaggaactgcaggagcttgtcgatacagctcactccatgggtatcattgtattactggatgtggtgcattcccatgcttccaaaaactccgctgatggccttaacatgttcgatggtacagacagctgttactttcactccgggccaagaggcacccatgacctctgggatagcaggctattcgcatatagctcctgggagatactccgctttctgctgtccaacatccgttggtggcttgaggagtatcggttcgacggattcagatttgatggcgtgacatccatgttatatcaccaccacggagttgggcagggcttttctggagattactccgaatattttggactgcaggtagacgaggatgccctgacgtatctgatgcttgcaaatcatctggtccatacgctgtgccctgacagcattacgatcgcagaggatgtttccggtatgcccgcattgtgcagccccattagtcagggcggagggggttttgattaccggttagcaatggccataccagataagtggatccagctgctgaaagagttcaaagacgaggattggaatatgggtgatatcgtttacactctgaccaataggcgctatctcgaaaaatgcattgcttatgcggaatcgcatgatcaagctctggtgggcgacaaaagcctggcattttggctgatggatgccgaaatgtataccaatatgagtgtcctgacaccattcaccccggttattgaccgcggaatccagctgcataaaatgattcgactgatcacacacggtcttgggggagaaggctacctcaacttcatgggcaatgagttcggccacccggaatggctggacttccccaggaaaggaaacaatgaatcctatcattacgcacgcaggcagttccacctgaccgatgatgacttgctgagatacaaatttctcaacaactttgaccgtgacatgaaccggctcgaggagcgctacggctggttggctgcaccccaagcgtacgtatctgaaaagcacgagggaaacaaaatcattgcctttgagagggctgggttgctcttcatattcaattttcatcctagcaaatcatataccgactaccgagtgggaacagccctgcctggcaagttcaaaatcgtcctggattcagatgcggctgagtatgggggccatcagcgtttggatcattccacagacttctttagtgaggccttcgagcacaacggacggccatattcgctgttggtgtatatcccgtctcgggtcgccctcatcctccagaatgtggacctacccaat

SEQ ID NO: 12784 - DNA, 2106 bp, synthetic construct
  misc_feature 1..2106: note = source = /note="Description of Artificial Sequence: Synthetic coding sequence"
  source 1..2106: mol_type = other DNA
atggccgcccccatgactccagccgcccggcctgaggactacgaggccgctctcaatgcagctctggccgacgtgccagagctcgcccgattgttggagatagatccctacctgaagccttacgctgtggatttccagcggaggtacaagcaatttagccaaatactaaagaacattggggaaaacgaaggcgggattgacaagttcagccggggatatgagagctttggcgttcacagatgcgcagatggcggactgtactgcaaggagtgggcgccaggcgcagagggcgtattcctcacaggagatttcaacggctggaatcctttcagctacccgtataagaagctggactacggtaagtgggagctttatattcctccaaaacaaaacaagtcagtcctggttccacatggctcgaaattgaaggtggtcatcacctctaagtctggcgagattctgtatagaatctccccttgggccaagtatgtggttagggagggcgacaatgtgaattatgactggatccactgggaccccgaacactcttacgaatttaagcatagccgccccaagaaaccacgcagcttgagaatctacgaatctcatgtggggatcagctctcacgaaggcaaggtggccagctacaaacattttacttgcaacgtgctcccgagaattaagggcttgggttataactgcatccagctcatggccattatggagcatgcatactatgcctcttttggctatcagatcacctcgttcttcgcggcatcttccaggtacggtacacctgaagagctccaagagctggttgacaccgcacactctatgggaatcatcgtcctcctggatgtggttcacagtcacgctagcaagaattcggcagatgggctgaacatgtttgatggcaccgacagttgctacttccatagcggccctagaggaacacacgacctttgggattctaggctctttgcttactctagctgggaaatcctgcgattcctgctgagtaacattagatggtggctggaggaatacagattcgacgggtttcggtttgatggagttactagcatgctgtaccaccaccacggtgttggacagggctttagcggcgattacagcgaatatttcggtctgcaggttgacgaagacgctcttacatacctgatgctcgccaaccacctggtgcacactctgtgccctgacagtataaccattgctgaggatgttagtggcatgccggcgctgtgcagcccaatctctcaaggcggaggcgggttcgactacaggttggcaatggcaatccccgacaaatggattcagttattgaaggagttcaaagacgaagactggaacatgggagatatcgtttatactctgacaaatcgtagatacctggagaagtgtattgcctacgccgaaagccatgatcaagcccttgtgggcgataaatcactcgcattttggctgatggatgctgaaatgtacaccaatatgtctgtcctgacacctttcacccctgttatcgatcgtggtatccaactgcacaagatgataaggctgataactcacggcctcggaggcgaagggtaccttaactttatgggaaacgaattcggacacccagagtggctcgattttcctaggaaggggaacaacgaaagttaccactacgcgagacggcagttccatcttaccgacgatgatctcttgcgctacaagttcctgaacaatttcgatagggacatgaacaggctcgaagagaggtacggttggctcgctgcaccccaggcctatgtgagcgagaagcacgaaggcaacaagatcatcgcttttgaaagagccggtctgctgttcattttcaacttccacccttcaaaatcatacacagactacagggtcggcactgcattgcccggaaaatttaaaatcgtgctggattccgacgccgcagagtacggagggcaccagcgactggatcatagtacggactttttctccgaagcattcgagcataacggaagaccttacagtctgctcgtttacattcccagccgtgtcgcgcttatcctccagaatgtagatctccctaat

SEQ ID NO: 12785 - DNA, 2106 bp, synthetic construct
  misc_feature 1..2106: note = source = /note="Description of Artificial Sequence: Synthetic coding sequence"
  source 1..2106: mol_type = other DNA
atggctgcccctatgaccccggccgcacggccggaagattacgaagccgccctcaatgcggcactcgcggatgtcccagaactggccagactgctggaaatcgacccctacttgaagccatatgctgtggactttcagcggcgctacaagcagttctcacaaattctgaagaacatcggagagaacgaaggaggaatcgacaagttctcacgcggatacgaatcgttcggagtgcaccgatgtgccgacggtggcctctactgcaaggagtgggctccaggagccgaaggagttttcctgactggggatttcaacggatggaacccgtttagctacccatacaagaagctcgattacggcaagtgggaattgtacatccctcctaaacaaaacaagagcgtcctggtgcctcacggatccaagctgaaggtggtcatcacctccaaaagcggtgaaatcctctaccggatctccccgtgggccaagtacgtcgtgagagaaggcgataacgtgaactatgactggatccactgggacccggagcactcgtacgaattcaaacactcaaggccgaagaagcctcgctctctcagaatctacgaatcacacgtgggaatctcgtcgcacgaaggaaaggtggcctcctacaagcacttcacttgcaacgtcctcccacgcattaaaggattgggatacaactgcatccagctcatggcgatcatggagcatgcatattacgcgagcttcggctaccagatcaccagcttctttgccgcgtcctccaggtacggaacgcctgaagagcttcaggaactggtggataccgctcatagcatgggaatcatcgtcctgctggacgtcgtgcactcgcatgcgtccaagaactcggcggacggattgaatatgttcgacggcactgactcatgttacttccactcgggaccgcgcggcacccacgacctctgggactcacgcctgttcgcctactcctcatgggagatcctccgctttttgctgtcgaacatcagatggtggcttgaagagtacagatttgacggcttccgcttcgacggagtgacctcgatgctgtaccaccatcatggggtgggccaagggttctcgggagattactcagaatacttcggactgcaggtcgatgaagatgctctgacctacctcatgctggccaaccacttggtgcacactctctgcccggacagcatcactatcgcggaggacgtcagcgggatgccagccctgtgctccccgatctcgcaaggcgggggcggtttcgactaccgattggctatggcgattcccgataaatggatccaactgctcaaggaattcaaggacgaggactggaacatgggagatatcgtgtataccctgactaatagacgctacctggaaaagtgcatcgcctacgccgagagccatgatcaggcccttgtcggggacaaatcgctggcattttggctcatggatgccgaaatgtacacgaacatgtccgtgctgactccgttcactccagtcatcgaccggggaatccagttgcacaagatgatcagactgattactcatggactcggaggagaaggttacctgaatttcatgggcaacgaattcgggcaccctgagtggctggactttccaaggaaaggcaacaacgaaagctaccattacgcccgccgccaattccacttgaccgacgacgacctcctgcgctacaagtttctgaacaatttcgacagggacatgaaccgcctggaagaacgctacggctggctggcagcgccgcaggcttacgtttcggaaaaacatgaaggaaataagataatcgccttcgagcgcgcgggactgctgttcatcttcaactttcacccgtccaaatcgtataccgactacagggtgggtacggccctgcctggaaaattcaaaatcgtgctggattctgacgccgcggagtacggaggccaccagagactcgaccactcgactgacttcttttcggaggcctttgaacataacggtcgcccgtattctctcctcgtctacatcccaagcagagtggcccttatcctgcagaatgtggatctgccgaac

SEQ ID NO: 12786 - DNA, 2106 bp, synthetic construct
  misc_feature 1..2106: note = source = /note="Description of Artificial Sequence: Synthetic coding sequence"
  source 1..2106: mol_type = other DNA
atggcagctcctatgacccccgccgctaggcctgaggattacgaggccgccctcaacgcagccttggctgatgtgcctgagctcgcccggctgctcgagatcgacccgtatctgaagccttatgctgttgattttcaacgaagatataagcaattttcccagatcctcaaaaacattggagagaacgagggaggaatcgacaaattctctcgaggctatgaatcatttggggtgcataggtgtgctgacggcggactgtactgcaaggagtgggcccctggagcggaaggagtatttctgactggcgactttaacgggtggaatcccttctcctacccgtacaagaagctagattacgggaagtgggagctgtacattcccccaaagcaaaataagagcgtactggttccacacggaagcaagcttaaggtggtcataacatcaaaatctggtgaaattctctatcgtatcagcccctgggccaagtacgtggtgagggagggtgacaacgttaattacgattggatccactgggatccagaacattcgtacgagttcaagcatagcaggcccaagaaacccaggagcttgcgaatttacgagtctcacgttgggatcagctcccacgaggggaaggtcgcatcctacaagcattttacctgtaacgtgcttccccggattaagggcctcggctacaactgcattcaacttatggctatcatggagcatgcatactatgctagcttcggttaccaaattacttctttcttcgctgcttccagtaggtatggcacgccagaagagcttcaggagttggtagacactgcccatagtatgggaattatcgtgctgctggatgtggtccatagccacgcaagtaagaacagtgccgatgggctcaatatgttcgacggaactgactcctgttactttcatagtgggccccggggcactcatgatctatgggactctcgattgttcgcctattcaagctgggagattctgcgctttctgttaagcaatattaggtggtggttggaggaataccggttcgatggatttcgcttcgacggtgtgacttcaatgctgtaccatcatcacggcgttggacaaggtttcagcggtgactacagcgagtactttggtcttcaagtggacgaggacgccctgacttatttgatgctagcaaaccatctggtgcatactttgtgtcctgatagtatcaccatcgctgaggacgtgtcaggcatgccagcgctgtgttcgccaatcagccagggtggtggcgggttcgactacaggttagctatggccatccctgataagtggatacaactgctgaaggagtttaaggatgaagattggaacatgggcgatatcgtctacacactgactaaccgtcggtacctcgagaagtgtatcgcttatgcagagtcccatgatcaagccctggttggggacaagtcacttgctttttggttgatggatgcggagatgtatactaacatgtccgtactgacgcccttcactcccgtgattgacagagggatccagctccacaaaatgatccgcctcatcacccatggcctaggaggcgaggggtatcttaactttatgggcaacgagtttgggcatcccgagtggctcgatttccctcgcaagggtaacaatgagtcctaccattacgctaggaggcagttccatttgactgacgacgacctcctcagatataagttccttaataactttgaccgggatatgaaccgactcgaagaacgatatgggtggttggcagcaccacaagcctacgtgtccgagaaacacgagggaaacaagatcatagcgtttgaacgagctggcctgttatttatatttaattttcacccctccaagagctacactgactacagagtggggacggctcttcctggcaaattcaaaatcgttctggacagcgatgccgccgagtacggcgggcatcagagacttgaccattcaaccgatttcttcagcgaagcatttgagcataacggacgcccatatagtctgcttgtctatatcccaagtagggtcgcgctaattttgcaaaacgtggacttgccaaac

SEQ ID NO: 12787 - DNA, 2106 bp, synthetic construct
  misc_feature 1..2106: note = source = /note="Description of Artificial Sequence: Synthetic coding sequence"
  source 1..2106: mol_type = other DNA
atggcagctcccatgaccccagcagcaagacctgaagattatgaggcagctctgaatgctgcactcgcagatgtgccagagcttgcaaggctcttggagattgatccatacctaaagccctatgcggtggactttcagcgtagatacaagcagttcagccaaatcctgaagaatatcggggaaaatgagggaggaattgacaagttttctcgcggctatgagtcctttggagtgcataggtgcgcggacggtggcttatactgtaaggagtgggcgcctggtgctgagggcgtgttcctgactggcgattttaacggctggaatcccttttcatatccttacaagaagcttgactatggtaagtgggagctatacatccctccaaagcagaacaaatcagttctcgtgccccatgggtcaaaattgaaagttgtgatcactagtaagtctggtgagatcctttaccggatcagcccgtgggctaagtacgtggtgagagagggagacaacgtgaactatgactggattcactgggatcccgaacactcatacgaatttaagcatagtcgacctaaaaaacccagaagcctacgaatctatgagtcacatgtgggcatctcctcacacgaaggtaaggttgcgtcctacaagcatttcacatgtaatgtactgccacgtataaagggcctcggctataattgcatccagctcatggccatcatggaacatgcctattatgcctcattcggttaccaaatcacttcttttttcgcggcgagctcacgttatggtactcctgaggagcttcaggagctcgtggataccgcacactctatgggcattatcgtgctgcttgacgttgtacacagccacgcaagtaagaatagcgccgacggactaaatatgtttgatggaacagactcatgttacttccattcgggaccccgcggaacgcatgatctgtgggattctcggttgttcgcgtacagttcatgggagatcctccgcttccttttatcaaatattcggtggtggctcgaagaatacagatttgacgggttcaggtttgacggagtgacgtctatgctgtaccatcatcacggagtggggcaggggttttcgggcgattactcagaatattttggccttcaggtggacgaggacgcactgacctacctgatgctcgcaaaccatcttgtgcatacactctgtcctgactcaatcaccatcgccgaagatgtgagtggcatgcctgcgctatgtagcccgatcagccagggcggaggcggctttgattataggctggcaatggccatccccgacaaatggatccaattgcttaaggagtttaaggatgaagactggaatatgggcgatatagtttacacactcacaaaccggagatatctggaaaaatgcatcgcttacgccgaatcccacgaccaggccctcgtcggcgataaaagccttgcattctggttgatggatgctgaaatgtataccaatatgtccgtactgacacctttcacaccagttatcgacaggggtatccagctgcacaaaatgatccggcttatcacccacggcttgggtggtgagggatacttgaatttcatgggaaacgagtttggtcacccggaatggctggacttcccacgcaagggtaataatgagtcgtatcactacgctcggcgccaatttcacctgaccgatgatgacctgttgaggtataaatttctgaataatttcgacagggacatgaatcggctcgaagagaggtatggctggctggctgctccccaggcttatgtctctgagaagcacgaggggaataagatcattgccttcgagagggcaggcttgctgttcatcttcaatttccacccttccaagtcctacacagattaccgagtgggaacggccctgcccggaaaattcaaaatagttctggatagcgacgctgccgagtacggcggacaccagcgcttggaccactccacagatttcttctctgaggcctttgaacacaacggtcgcccatattctttgcttgtgtacattcctagtcgggtcgctctcatactgcagaatgtggatctgccaaat

SEQ ID NO: 12788 - DNA, 2106 bp, synthetic construct
  misc_feature 1..2106: note = source = /note="Description of Artificial Sequence: Synthetic coding sequence"
  source 1..2106: mol_type = other DNA
atggcagccccgatgactcccgccgccaggcccgaagactatgaggcagcgctgaatgccgcactggccgacgtcccggaactagcacgtctcctggagatcgatccatacctgaagccttacgctgtggactttcaacgccgttacaaacagttcagtcagattctgaagaacatcggagaaaacgaaggggggattgacaaattcagccgtggatatgaatcctttggcgtgcacagatgcgccgatggcgggctgtactgcaaggaatgggctcccggcgccgagggggttttcctcaccggcgactttaacgggtggaatcctttttcttatccctacaagaagcttgattatggaaagtgggagctctacattccccccaaacagaacaaaagcgtcctggtgccccacggatccaagctgaaagtggttataacctcgaaatcaggggagatcttgtaccgcatcagcccctgggccaaatacgtcgtgagagagggggataatgtgaattatgactggatacattgggatccggagcacagctatgaattcaagcattcccgccccaagaagccgcgttctcttcgcatctacgaaagccacgtgggaatctcttcccacgaaggtaaggtagcatcgtacaagcatttcacctgcaacgtgctgccacgtatcaagggtcttggttataattgtatacaattaatggccattatggaacatgcatactacgcgagctttggttaccaaatcaccagcttctttgccgcctcttctcgatatggcacacctgaagaactgcaggagctcgttgacacagctcatagcatggggatcatagttcttctggacgttgttcacagtcacgccagcaagaactcagccgatgggctgaacatgttcgatggcacggactcttgctacttccactcaggaccaagggggacccacgacttgtgggattcaagattgtttgcttacagttcgtgggagatccttaggtttctgctgtccaacatacgctggtggctggaagagtacagatttgatgggttcagattcgacggagtgacaagtatgctttatcaccaccatggagttggacaaggattttccggggactactcagagtattttggcctgcaggtcgatgaggatgccctcacttatctgatgctggccaaccacttggtgcatacattatgtcctgattctataaccattgctgaggacgtctcgggtatgcctgctctgtgtagccccatctcacaggggggcggcgggtttgattatagactcgcaatggcaattcctgacaaatggattcagctgcttaaggagttcaaagatgaggactggaatatgggggatatagtgtacacactgaccaatcgtaggtatctggaaaagtgcatcgcctacgccgaatcacatgatcaggctctggtcggtgataaatcattggctttttggcttatggacgccgaaatgtataccaacatgagcgtgctaacaccgttcacacctgtcatcgataggggaattcaactccacaagatgattcggctgatcacgcacggactcggcggcgagggttacctgaatttcatgggaaatgagtttgggcatcccgagtggctcgacttcccccgcaaagggaacaatgagagctatcattatgccagacgccagtttcaccttaccgacgatgatctgcttagatacaagtttctgaataactttgaccgcgatatgaacagactcgaggaacggtacgggtggctggccgctccccaggcttatgtctcggagaagcacgaggggaataaaatcatcgctttcgagagagctgggttactattcatctttaattttcatccaagcaagtcgtatacagactatagggtgggaactgctctgcccggtaaattcaagattgtgctggactcagatgcagctgaatatggtggccatcagcgcctggaccattcgacagatttttttagcgaagccttcgaacataatgggcgcccctacagtcttcttgtatacatcccaagtagggtagcactgatcctgcagaatgtggatcttcccaac

SEQ ID NO: 12789 - DNA, 2106 bp, synthetic construct
  misc_feature 1..2106: note = source = /note="Description of Artificial Sequence: Synthetic coding sequence"
  source 1..2106: mol_type = other DNA
atggcggctccaatgactccagcagcccgcccggaggactatgaggcagcccttaacgccgcactggcagacgttccggaactcgcccgcttgctggagattgacccgtacttgaagccatacgcggtcgacttccaacgcagatataagcaattctcgcagatcctcaagaacatcggtgaaaacgaaggcggcatcgataagttctctcgcggatacgagtcattcggagtccacaggtgcgcggatgggggtctgtactgcaaggaatgggctcctggggcagagggtgtgttcctgaccggggacttcaatggatggaacccgttcagttacccgtacaaaaagttggattatggcaaatgggagttgtatatcccgcctaagcagaataagtcggtcctggttccccacggatcgaaattgaaagttgtgatcacgagcaagtcgggggaaatcctgtacagaatctcaccttgggcgaaatacgtggtgagagaaggggacaatgtcaactacgactggatccactgggaccctgagcattcgtacgagtttaaacatagccggccgaagaagccacggagcctccgcatctatgaatcacacgttggaatcagcagccacgaaggaaaggttgctagctataaacacttcacttgcaatgtcctcccgcgcatcaagggactcggatacaactgtatccagctgatggcaattatggagcacgcctactatgcttcgttcggatatcagatcaccagcttctttgccgcatcctcccgctacggaacccccgaagaacttcaggagctggtcgacactgcacatagcatgggtatcatcgtccttctggacgtggtgcatagccacgccagcaagaatagtgccgacgggctcaatatgtttgatggaaccgactcctgctactttcattcgggtcctagaggcactcacgatctgtgggactcccggctgttcgcgtactcaagttgggagatcctcagattccttctgagcaacatccggtggtggctcgaagagtaccggtttgacggatttcggttcgatggcgtgacttcgatgctctaccaccaccacggagtgggccagggattctcaggcgactactcagaatactttggactccaggtggacgaggacgcgctgacctacctgatgcttgctaatcacttggtgcatacgctctgtccagattcgatcaccatcgcggaggatgtgtcgggaatgcccgccctctgctctccgataagtcaggggggaggaggatttgactacagactcgctatggccatccctgacaagtggatccagctgctcaaggaattcaaggatgaagattggaacatgggagacatagtgtacaccctgaccaaccgacgctacctcgaaaagtgcattgcctacgccgaatcccacgatcaagcgttggtgggagataagtcactggcattctggctcatggatgcggagatgtacactaacatgtcggtgctgactccgttcactccggtgatcgacaggggaatccaactgcataagatgattaggctcatcacccatggcctcggaggggagggatacctgaatttcatgggaaatgaattcggacacccagagtggctcgatttcccaagaaagggaaacaatgaaagctaccattacgcccgccgtcaattccacctgacggatgatgatctgctgcgctacaaattcttgaacaactttgaccgggacatgaaccgcctggaagagaggtacggttggctcgcagccccgcaggcctacgtcagcgagaaacacgagggcaacaagattatcgcgtttgagcgggcgggcctgcttttcatcttcaactttcatccctccaagtcgtacaccgactaccgagtcgggactgccctgccgggtaaattcaaaatcgtgctggactcagacgcagcggaatacggtggacaccagcgcctcgaccattcaaccgactttttctccgaggcctttgaacacaacggacgcccatactcgctgttggtgtacattccttcacgggtcgccctcatcctgcagaacgtcgacctgccgaac

SEQ ID NO: 12790 - DNA, 2106 bp, synthetic construct
  misc_feature 1..2106: note = source = /note="Description of Artificial Sequence: Synthetic coding sequence"
  source 1..2106: mol_type = other DNA
atggccgctcccatgacccctgcggcgcgtcctgaagattatgaagcagcgctcaatgccgccttggccgatgtacccgagctggcccggttactggagattgatccctatctgaagccatatgctgtcgactttcagaggagatacaaacagttcagtcagattctcaagaatattggcgagaatgagggaggaatcgacaagttttctcgcggatatgagtcattcggcgttcatcggtgtgccgacggggggctttattgcaaggagtgggctccgggagccgaaggtgtgtttcttacaggagactttaacggatggaatcccttcagttatccatataagaagttggattatggcaaatgggagttatacatccctcccaaacagaacaaatccgtcctggtgcctcatggttcaaaactcaaggtagtgattacatccaagtccggagagatactgtataggatttcgccgtgggccaaatatgtggtgcgcgagggagataacgtgaattatgactggattcactgggacccagagcatagctatgagtttaagcatagtcggcccaaaaagccacgcagcctgcggatttatgagtcccatgtaggcatttcttctcacgagggaaaggttgccagttacaagcacttcacgtgcaatgtgttgccccgaattaaggggctcggctataactgcattcagttgatggccataatggagcacgcctactatgcttccttcggctaccaaatcacgagtttctttgcggccagctccaggtacgggaccccagaggagctccaggagctggttgataccgcccactcgatgggcataatcgtgctcctcgatgtagtgcacagtcatgcttctaagaacagcgccgatgggctcaacatgtttgacggaactgattcatgctactttcactctgggcctcgaggaacgcatgacctgtgggactctaggttatttgcctactcttcttgggagatcttaagattccttctctccaatatcaggtggtggctggaggaataccgattcgacggattccgttttgacggtgtcacatctatgttgtatcaccatcacggcgtcggccaggggttctctggggactacagcgaatactttggccttcaggttgatgaagacgcactgacttaccttatgctagctaaccacctcgtgcacacgttgtgcccagactctattactattgcagaggacgttagtggaatgcccgcactgtgtagcccgatctcccagggggggggagggtttgattataggctggcaatggccatcccagataagtggatacagttacttaaggagttcaaggacgaagactggaacatgggtgatattgtctacaccctgacaaacagacgttacctcgagaaatgcatcgcctatgcagagagtcacgatcaagctctcgtaggagacaagtccctcgccttctggctaatggacgcagagatgtatactaatatgtccgtgctgaccccgttcacccctgtgatcgaccgcgggattcagttgcacaaaatgatccggctcattactcatgggttaggaggggaggggtatctgaacttcatggggaatgagttcggacaccccgaatggttagactttccccgaaaaggcaataatgaaagttatcattacgcgagacgccagttccacctgacagacgacgacctgctcaggtacaagttcctcaacaattttgaccgagacatgaaccgcctggaagagagatatgggtggttggcagcccctcaagcatatgtgtctgagaaacacgaaggcaataagattatcgccttcgaacgagctggcttgctgtttatatttaacttccaccccagcaagagctatacagactacagagtagggaccgctctacccggaaagttcaagattgttcttgattctgatgctgccgaatacggcggccaccagcggctggatcactccacggatttcttcagcgaggcgttcgaacataatggcagaccctactcactgcttgtgtacatcccctccagagtggccctaatcctgcagaacgtggatctgccaaat

SEQ ID NO: 12791 - DNA, 2106 bp, synthetic construct
  misc_feature 1..2106: note = source = /note="Description of Artificial Sequence: Synthetic coding sequence"
  source 1..2106: mol_type = other DNA
atggcggcccccatgacacccgccgcccgccccgaggattacgaggccgccctgaacgctgcattggctgatgttccagagctggcacgcctgttggagatagatccatatctgaagccttacgctgtggatttccaacggagatacaaacaatttagtcagatcctcaagaatatcggcgagaacgaagggggaatagataaattttccaggggctacgaatctttcggcgtacatagatgcgcggacggaggcctctactgcaaggaatgggctcctggcgctgagggcgtatttttgaccggggattttaacggttggaaccccttctcttatccctataagaaactggattatggcaagtgggaactgtatatacctcccaagcagaataagagcgttctggtcccccacggcagcaagctcaaagtggttattacctccaagagtggggagatactctaccggatctctccgtgggccaaatacgtagtgcgcgagggcgataacgtaaattacgactggattcactgggatcccgagcacagctacgagttcaagcactctcgaccgaagaagcctagatcactccggatttatgagagtcacgtaggaatcagttctcatgagggaaaggttgcctcatacaaacactttacatgcaacgttctgccacggattaagggcctgggatacaactgtatccagctgatggccatcatggaacatgcctactacgcctcctttggttatcagataacctccttctttgccgccagtagtcgctacggcaccccagaagagttgcaagagctcgtcgatacagcccactccatgggaataattgtgctcctcgacgtggtgcactcacacgcgtccaagaattctgcggacggtcttaacatgtttgatggtacagatagctgctattttcacagcggacccaggggtacccatgatctgtgggattcaaggctgtttgcttacagttcctgggagattttgcgcttcttgttgagcaatatcaggtggtggctggaagagtataggtttgacgggtttaggttcgacggcgtcacatctatgctttaccatcatcacggcgtcggacagggctttagcggcgattacagcgaatactttggactccaggttgacgaggacgcactgacttaccttatgctggccaaccacctggtacacactctctgccccgactctataactatcgcagaggacgtgagtggaatgccagccctgtgtagcccgattagccaaggcggaggggggtttgattaccgcctcgcaatggcgatacccgataagtggatccagctgttgaaggaattcaaggatgaggattggaacatgggagacatcgtatacaccttgacgaacagaagatacctggaaaaatgtatcgcctatgcagaaagccacgaccaggccctcgtgggcgacaaaagccttgccttttggctcatggacgccgagatgtacaccaacatgtctgtcttgacgccgtttacgcctgtgatagatcgcggaattcaattgcataagatgatccggttgatcacgcatggactgggcggagaggggtacctcaactttatggggaatgagtttggtcatccagagtggctcgatttccccaggaagggcaataatgaaagctatcactatgcaaggagacagtttcacttgacagatgatgatctgctccgatacaagttcctgaacaattttgatagagatatgaaccgcctggaggagagatatgggtggctggccgcccctcaggcgtacgtgagcgaaaagcatgagggcaacaagataatagcctttgagagagcaggcctgctgtttattttcaacttccacccttctaaaagttacactgactatcgggtggggaccgccttgccgggtaaattcaagattgtgctggacagtgacgctgctgaatacggaggtcaccagcggctggatcattccactgacttctttagtgaagcatttgagcacaatgggaggccctattctctgctggtttacatacccagcagggtggcgttgattcttcaaaacgtggatctccccaac

SEQ ID NO: 12792 - DNA, 2106 bp, synthetic construct
  misc_feature 1..2106: note = source = /note="Description of Artificial Sequence: Synthetic coding sequence"
  source 1..2106: mol_type = other DNA
atggccgctcccatgacacccgccgctcggcctgaagactacgaagccgcgcttaatgccgctctggctgacgtacctgaactggccagattgctcgagatcgacccgtacctaaaaccctacgcggtagattttcaaaggcgttataagcagttctcacagattctgaaaaacataggagagaacgagggagggattgacaaattttcccgggggtacgagtctttcggagtgcaccgctgcgccgatggcggcttatactgcaaggaatgggcccctggcgctgagggtgtgtttctgaccggcgatttcaatggttggaacccttttagctacccgtacaagaagctggactacggcaagtgggagctgtacattccccctaagcagaataagagtgtactagtccctcacgggtccaaacttaaggtcgtgattacctcaaaatcaggcgagatcctgtacagaatttccccctgggccaaatacgtagtccgagaaggggacaatgtcaactacgattggatacattgggaccctgagcatagctatgaatttaaacatagtaggcccaaaaagcctcgctctctcagaatctatgaaagccatgtaggtatctcttctcatgagggcaaagtggcgtcctataagcattttacatgtaatgtgctgccaagaatcaagggtctgggatataattgcatccagctgatggccatcatggaacatgcatattacgcctcctttgggtaccaaataacgtccttctttgcagcaagctcacggtatggcacacccgaggaactacaggaactagttgacactgcccatagtatgggtatcatcgtccttctggatgtggttcatagccacgccagtaagaactccgctgatgggcttaacatgtttgacggcactgactcttgttatttccatagtggccccaggggtactcacgacctgtgggacagtcgcctgttcgcctactcaagttgggagatcctccgtttcctgctatcaaacatccgctggtggctagaggagtatcgcttcgatggttttaggttcgatggggtcacatccatgctctatcatcaccacggggttggccaaggcttttccggcgactacagcgagtacttcggactccaagtcgacgaggatgccctaacgtacctcatgctcgccaaccacctggttcatacactgtgcccggatagcataacaatagcggaggacgtgtccgggatgcccgcgttgtgctcccctatctcccagggcggtgggggctttgactatcggctcgccatggctattcccgacaaatggatccagctacttaaagaatttaaggatgaagattggaacatgggtgacatcgtgtacacattgacaaacaggaggtatttggaaaagtgtatcgcatacgctgagagtcatgaccaggctctggtgggggacaagtctctggctttctggttaatggacgctgagatgtacacaaacatgtccgtgttgacacccttcacccccgtgattgaccggggcatccagttgcacaaaatgattaggttgattacgcacggtctgggcggcgagggctacctaaactttatgggcaatgagtttgggcatcccgagtggctcgattttcccagaaaaggcaataacgaatcctatcattacgcaagacgccagttccacctcacagacgacgacctcctgaggtacaagttcctgaacaacttcgatcgcgatatgaaccggctcgaagaacgatacggttggctggccgctccccaggcatatgtaagcgaaaagcacgaaggaaataaaattatcgccttcgagcgggctggccttctgtttatatttaatttccacccttccaagtcttacaccgattatcgagtaggaaccgcgctacccggcaagtttaaaatcgtgctcgactcagacgctgcagaatatgggggccaccaaagactcgaccattccactgattttttctcagaagcttttgagcataatggcagaccctactccttgttggtgtatatccccagtcgtgttgctctgatcttacagaatgtggatctgcccaac

SEQ ID NO: 12793 - DNA, 2106 bp, synthetic construct
  misc_feature 1..2106: note = source = /note="Description of Artificial Sequence: Synthetic coding sequence"
  source 1..2106: mol_type = other DNA
atggccgccccaatgacacctgcagccaggcctgaagactacgaggccgccttaaacgcggccctcgcggacgtccccgagttggcaagacttctggagattgacccatacctgaagccatacgcagtcgattttcaacgccggtataagcagttttcccagattctgaagaatatcggagagaatgaagggggcatagacaagttctccaggggatacgagtccttcggggtgcaccggtgcgccgatggagggctgtactgcaaagaatgggcgcccggagctgagggagtcttcctcactggagattttaacggatggaacccttttagttatccgtacaagaaactggattatggcaagtgggaactgtacatccctcccaaacagaacaagtccgtccttgtgccccacggaagcaaactgaaggtggtcataacgagcaagtccggagagattctgtatcggatctctccttgggccaagtacgtggtgcgtgaaggcgacaacgtgaactatgactggatccactgggacccagaacacagttatgaatttaagcattccaggccaaaaaaaccccgcagcctgaggatctacgaatcacacgttgggatcagctcccatgaaggtaaggtggccagctacaaacactttacctgcaacgtcctgcctcggatcaagggtttgggttacaattgcatacagcttatggcaattatggagcacgcctattacgcatccttcggttaccaaatcacatcattctttgccgcttcctcacgctatggtactcccgaggagcttcaagagctggtagatacggctcattcaatgggcatcatcgtgttactggacgtggttcactcacatgctagcaaaaactcagccgatggccttaacatgtttgatggaactgatagctgttactttcactcaggcccccgcgggacacacgacctgtgggattctaggctgttcgcctatagcagttgggagatactgaggtttttgctgtcaaacatccggtggtggttagaggagtacagatttgacggtttccgctttgacggagtgacaagcatgctttatcatcatcatggggtgggtcagggattctctggggactacagcgaatatttcggcttgcaagtggacgaagacgctctgacctacttgatgctggctaaccacctggtgcacaccctgtgccctgactctatcaccattgcagaagacgtgtcaggaatgcccgcactctgttcacccatcagccaggggggaggcggctttgactacaggctggccatggccatacccgataaatggatacaactgctcaaagaatttaaagatgaggattggaacatgggggatatcgtctatactctgactaatagaagatacctggaaaagtgtattgcctacgctgaaagccacgaccaggcgctggtgggcgataaaagccttgccttttggttgatggacgctgagatgtacaccaacatgtcagtgctcaccccatttacccccgttatagaccggggcatccagcttcacaagatgatcagactcataactcatgggctgggaggtgaaggatatcttaattttatgggaaatgaattcggccacccagaatggctggattttcccaggaaaggaaataacgagtcctatcactacgctcggcgccagttccatctgaccgacgatgatctcctgagatacaaattcctgaataacttcgaccgagacatgaaccgtctggaagaaaggtacggctggctggctgccccccaggcctatgtgagtgaaaaacacgaaggaaacaagattattgcatttgaaagggctggcctcctctttatatttaacttccaccctagtaagagctacacagattacagagttggaaccgctctgcccggcaagtttaagatcgttctagattctgacgctgcggagtacgggggacaccagcgcctcgatcactctacagatttttttagcgaagcttttgagcacaacggacgaccctattccctgcttgtgtacatcccgtccagggtcgccctgatcctccagaacgtggacctccccaat

SEQ ID NO: 12794 - DNA, 2106 bp, synthetic construct
  misc_feature 1..2106: note = source = /note="Description of Artificial Sequence: Synthetic coding sequence"
  source 1..2106: mol_type = other DNA
atggcggcaccaatgacacccgccgctcggcccgaagactacgaggccgctctcaacgcggccctggccgatgtgcctgagctcgcccgtctgctggagattgatccttatctaaaaccctacgccgtggactttcagcgacggtacaagcagttttcacagatcctgaagaacatcggcgaaaacgaaggcggaattgacaagttcagtagagggtacgagagcttcggcgtccatcgctgcgctgacgggggactctactgcaaggagtgggctccaggggccgaaggtgttttcctgacaggtgacttcaacggctggaatcccttctcctatccatataaaaagctcgactatggcaagtgggagctgtatatcccacctaaacagaataagagcgtgctcgtgcctcatgggtcaaagctgaaggtcgtaattacttccaagagcggcgagattctctatcgaatctccccctgggctaagtacgttgtcagggagggggacaacgtgaactatgactggattcattgggatccagagcactcgtacgagttcaagcattcgagacccaagaaaccccgctccctacgaatttacgaatcccacgtgggaatctctagccatgagggtaaggttgcttcctacaagcactttacgtgtaacgtgttaccccgaatcaagggcctgggctacaactgtattcagctcatggctatcatggagcacgcgtattacgcgtctttcgggtaccagatcacttcatttttcgcagcctcatcaagatatggtacgcccgaggaactacaagaactcgtcgataccgcacattcaatgggcattatcgtcctgttggacgtggtccactctcatgcttctaagaactctgccgacggtctcaacatgttcgacggcaccgattcttgctacttccatagcgggccgagagggactcacgacttgtgggattctagactgttcgcttattcgtcttgggaaattctgcggtttcttctaagcaacatacgatggtggcttgaagagtaccgttttgacggcttcaggttcgacggtgtgacgagcatgctatatcatcaccacggcgtgggccagggcttctccggcgattacagcgagtactttggtctgcaggtcgatgaggatgctcttacctacctcatgctggctaaccatcttgttcataccctgtgtccagatagtatcacaattgcagaggacgtgtctggaatgcctgccctttgctcccccatcagccaaggcggaggagggtttgactatagattagcaatggccatccccgacaagtggatacaacttttgaaagaattcaaagatgaagattggaacatgggtgacatcgtatacactctcactaatcgccgatacctcgaaaaatgcatagcatatgccgaatcgcacgatcaggccctagtaggggataaatccctggctttttggctcatggatgcagagatgtacaccaacatgtccgttctgaccccattcacacctgtcattgaccgagggatccagctccacaagatgatccgccttattacccatggacttggtggcgagggatacctcaattttatggggaatgaatttggtcacccagagtggttggactttccacggaaggggaataatgagtcctaccattacgcaaggcggcagttccacctaacagacgacgatctcctgaggtataaattcctgaacaacttcgatcgcgatatgaaccgcctggaagaacgctatggttggctcgcagcccctcaggcatacgtgtctgaaaagcacgagggcaacaagatcatcgcttttgagcgcgcggggctactgttcatcttcaatttccacccttctaagtcttacactgactaccgggtgggcacagccctaccggggaaatttaagattgttctggacagtgacgctgcggagtatggggggcaccagcggctggaccatagtactgactttttttctgaggcatttgagcataacggcagaccttattcattactggtatacataccctcccgcgtggccttgatcctccagaacgtggatcttcccaac

SEQ ID NO: 12795 - DNA, 2106 bp, synthetic construct
  misc_feature 1..2106: note = source = /note="Description of Artificial Sequence: Synthetic coding sequence"
  source 1..2106: mol_type = other DNA
atggcggctcccatgacacccgcagccagaccggaagattatgaggcggcattaaacgccgctcttgctgacgtaccagagttggcccgactgcttgaaatagacccctacctgaaaccttacgccgtggatttccagaggagatataaacagttcagccagatcctcaagaacattggggagaacgagggcggtatcgacaagttttcccggggatatgaaagctttggcgttcacagatgtgccgatggcgggctgtactgcaaagagtgggcacccggcgcagagggtgtgtttctcaccggagactttaacggatggaaccccttttcctatccttacaaaaaactggattacgggaaatgggagctgtatattccacctaagcaaaataagagcgttctggtcccacacgggtcaaagctgaaggtagttatcacaagtaagagtggggagatcctatatcgcattagtccatgggccaaatacgtggttcgcgaaggcgacaacgttaattatgactggatacactgggaccctgagcattcctatgaattcaagcattcacgcccgaaaaaacctaggagcctgaggatttatgaaagccacgtgggaattagttcccacgagggaaaggtggcaagctataagcactttacatgcaatgttctccctcgcatcaagggacttggttacaactgtattcagctgatggctataatggaacacgcctactatgcatccttcggttatcaaataacttcgttctttgcagcaagcagtcgatacgggactcccgaggaactgcaggagctggtcgatacagctcactccatgggaatcatcgtgctgctcgacgttgttcactcacacgcctcgaagaacagcgcagatggactgaatatgtttgatgggaccgatagttgttactttcactccggtccaaggggcactcatgacctttgggatagccgactctttgcctatagtagctgggagattctccgattcctgctgtcgaatattcgttggtggcttgaagaataccgatttgatgggttcaggttcgatggtgtgaccagcatgctgtaccaccatcacggagtcgggcagggtttttccggtgactacagtgagtactttggcctgcaggtggacgaggacgccctgacatacctgatgttggcaaatcatttagtccacacgctttgccctgacagcatcaccatcgctgaagatgtctctggtatgccggccttgtgtagccctattagtcagggcggtgggggatttgattacagactggcgatggccatccccgataaatggatacagttgctgaaggaatttaaagacgaggattggaacatgggtgacattgtgtataccctcaccaacaggcgctacctagaaaagtgtattgcatatgccgagtcacacgaccaggcgctggtgggggataaatcgttagcattttggctgatggatgctgaaatgtacacaaatatgtctgttctcacccccttcactcctgtcatcgaccgcggtatccagctgcataagatgattcgactaatcacacacggactgggaggcgagggctacctgaactttatgggcaatgagttcggccatcctgagtggctagatttccctcggaagggaaataatgagtcctaccattatgccaggcgccagttccatctgaccgacgacgatctgctgaggtacaagttcttgaacaactttgaccgggatatgaatagattggaggagcgctatgggtggttggccgccccccaggcgtatgtctccgaaaagcacgaaggcaacaaaatcatagcttttgagagggcaggccttctgttcatatttaatttccacccatctaaaagctatactgattacagagtagggaccgccctccctggcaagtttaagatcgtgcttgattccgacgcagccgaatacggtgggcatcagcggttggaccacagtaccgacttcttttctgaggcctttgagcacaatgggcgcccttactccttactggtttacatcccctcacgagtagcgctaattctacagaatgttgacttgccaaac

SEQ ID NO: 12796 - DNA, 2106 bp, synthetic construct
  misc_feature 1..2106: note = source = /note="Description of Artificial Sequence: Synthetic coding sequence"
  source 1..2106: mol_type = other DNA
atggcagccccaatgacgccggccgcacggcctgaggattacgaggcagccctcaatgccgcgctggctgacgtgcctgaattggcaagactgctcgaaatcgacccttacctgaagccttacgccgtcgacttccagcggcgttacaagcagttctcccagatcctcaagaacatcggagagaacgagggcggaatcgacaagttctccagaggatacgaatcgtttggagtgcaccgctgcgccgacggaggactgtactgtaaggaatgggcaccaggggcagagggggtctttcttaccggcgatttcaatggctggaacccattctcatatccttacaaaaaactcgactacggaaaatgggagctctacatcccgcccaagcaaaacaagtccgtcctggtcccacacgggagcaagttgaaggtggtgatcacttcaaaatcgggcgaaatcctctaccgcatctccccgtgggccaaatacgtcgtcagggagggagacaacgtgaactacgattggatccattgggacccagaacacagctacgaatttaagcattcgcggcccaaaaagccgcgctccctccggatttacgagtcccatgtgggaatctcgtcccatgaaggaaaggtggcgtcgtacaagcacttcacttgcaatgtgctgccgcggattaagggccttggatacaactgcatacagctgatggcgatcatggaacacgcctactacgcgtccttcggataccaaattacgtccttcttcgctgcgtcgtcacgctacggaactcctgaggagcttcaggagctggtggacaccgctcattcgatgggcattatcgtgcttctcgacgttgtccactcccacgccagcaaaaatagcgcggatggactcaacatgttcgatgggaccgacagctgctacttccatagtggaccgcgcgggacccacgacttgtgggacagcagactgttcgcttactcgtcgtgggaaatcctgcgcttcctgctctcaaacattcggtggtggctggaagagtaccgctttgacggttttagattcgacggagtgacgagcatgctgtaccaccatcatggcgttgggcaaggattttcgggcgactactccgaatatttcggactccaggtcgatgaggacgccttgacctatctgatgctggcgaatcaccttgtccatactttgtgcccggactccatcactatcgccgaagatgtgtcggggatgcccgctctctgctcacctatctcgcaaggaggcggaggtttcgactaccgcctggctatggcaatcccggataagtggatccagctgctgaaggagttcaaagacgaggactggaacatgggcgacatcgtgtataccctgaccaaccggcgatacctggaaaagtgtatcgcttacgctgaaagccacgatcaagccctggtgggagataaatcgctggcgttctggctgatggatgccgaaatgtacactaatatgtccgtactgaccccattcactcccgtgatcgaccgcgggatccaactccataaaatgatcagactgatcacccacggtctgggtggagaaggatacctcaatttcatgggaaatgagttcggccatccggagtggctcgattttccgagaaagggcaacaacgaatcataccactacgcccggaggcagttccacctgactgatgacgacctgctgagatacaagttcctgaataactttgatcgggatatgaatcggctcgaagaaaggtacggatggctcgccgcaccgcaggcctacgtgtcagaaaagcacgagggaaacaagatcattgccttcgaacgcgcgggcttgctgttcatcttcaactttcacccgagcaaatcatataccgactacagggtgggtaccgcccttccgggcaagttcaagatcgtcctggacagcgacgcggcggaatacgggggtcaccagcgcctcgatcactctactgattttttctccgaagcctttgagcataacggtcgcccgtacagcttgctcgtgtacattccatctcgagtggcactgatcctgcagaacgtggatcttccaaat

SEQ ID NO: 12797 - DNA, 2106 bp, synthetic construct
  misc_feature 1..2106: note = source = /note="Description of Artificial Sequence: Synthetic coding sequence"
  source 1..2106: mol_type = other DNA
atggcggcacctatgacacccgctgcccgtccggaagactatgaagccgctttgaacgctgccctagctgatgtgcccgaactggcacgcctgttagaaatcgacccttatttgaaaccatacgcagtcgactttcagcgacggtacaagcagtttagccagattctcaaaaacatcggcgaaaacgaaggtggaatcgacaagttctctagaggctatgaaagttttggtgtgcacagatgtgccgacggcggattatattgtaaggaatgggccccaggagccgagggcgttttcctgaccggcgactttaacggatggaaccccttttcttacccctacaagaaactggattacggcaaatgggaactttacatcccaccaaagcagaataagagcgtgttggtaccacatggaagtaaactcaaagtcgtgatcacctctaaatctggcgagatcctctaccggatctccccttgggccaagtatgtggtccgagaaggtgataacgtcaactacgactggatccactgggaccccgagcacagctatgaattcaagcattccagaccaaagaaaccaagatcgctcagaatctacgagagccacgtcggaataagttcccatgagggcaaggtggctagctataagcactttacctgcaatgttcttcctcgcataaaggggctggggtacaactgcattcaactgatggctatcatggaacatgcctactatgcttcgttcgggtaccagatcactagcttcttcgctgcaagctcaagatacggcacccctgaagagctgcaggagctggtggataccgcgcacagcatgggcataatcgtactgctggatgtcgtgcactcccatgcaagcaagaattcagctgatgggctcaacatgttcgatgggaccgactcgtgctactttcatagcgggcctagaggaactcacgatttgtgggatagcagactgttcgcgtatagctcttgggagatcctgcggtttctcctcagtaacatacggtggtggcttgaggagtatagattcgacggtttcagatttgatggtgtcacgagcatgctgtaccatcatcacggcgtaggccagggcttcagcggagactactctgaatattttggcctccaggtggacgaagatgctctgacttacttgatgctcgctaatcacctggtccatacactatgcccggatagcatcactatcgccgaagacgtcagcggcatgcccgccctgtgcagtccgataagccagggaggaggaggattcgactatcggctcgccatggccatcccagataagtggatacaactcctaaaggagttcaaagacgaagactggaatatgggggacatcgtctacaccctgaccaaccgtaggtacctggagaaatgtatcgcatacgccgagagccacgaccaggctcttgttggagacaagagcctggccttttggctgatggacgccgaaatgtatacaaatatgtcagtactaaccccatttacaccagtcattgacagaggcatccaactccacaagatgatccggttgattacacacggtctgggtggggaagggtaccttaactttatggggaacgaattcggacatccggaatggttagactttccccgaaaaggaaacaacgagtcttaccactatgcaaggagacaatttcatcttaccgatgacgacctgctcaggtataagtttcttaacaactttgatagagatatgaatcggctagaagagcgctacggatggctcgcagcccctcaagcctatgtgtccgagaaacatgagggaaacaagataatcgctttcgagagggcaggactgctcttcatctttaactttcatccatcaaagtcctacacagattaccgcgtgggaaccgccctcccaggcaagttcaaaattgtgcttgactctgacgctgccgaatatgggggccaccagagactcgaccatagcaccgactttttctcagaggctttcgaacacaatggtcggccttactcactgctcgtctacatcccgagcagagtcgcactgatccttcagaacgtggatttgcccaat

SEQ ID NO: 12798 - DNA, 2106 bp, synthetic construct
  misc_feature 1..2106: note = source = /note="Description of Artificial Sequence: Synthetic coding sequence"
  source 1..2106: mol_type = other DNA
atggcggccccgatgaccccagccgctcgccccgaggattacgaagctgcactgaacgccgctctcgcagatgtcccagaattggccagattgctcgagatagatccatacctgaagccctacgctgttgactttcagcgacgatacaaacagtttagccagatcctcaagaacataggcgagaatgagggtggcatcgacaagtttagcaggggctatgagtccttcggcgtccacagatgcgctgatggcgggctctactgtaaggagtgggccccaggagccgagggagtgttcctaactggagactttaatgggtggaatccatttagctacccatacaagaagctggactacgggaagtgggagctttacattcccccaaagcaaaacaaaagcgtcctcgtaccacacggctccaagctgaaggttgtgatcacgtcaaaatcgggcgagatcctctaccggatttccccttgggctaaatatgtggtacgcgaaggggacaacgtgaattatgattggatccactgggatccagagcatagctacgagtttaaacatagtcgccctaaaaagccccggtcattgcggatctatgagagtcatgtcggcatcagcagccacgagggcaaagtggcgtcctataagcacttcacctgcaacgtcctacccagaatcaaaggactggggtacaattgtatccaactgatggctatcatggaacacgcttattacgcctcctttgggtatcagatcacctcgtttttcgccgcttcttcccggtatggaactccagaggaactgcaggaattggtcgacaccgcccattccatggggatcatcgtgctcttggacgtcgtgcactctcacgccagtaagaactctgccgacggccttaatatgtttgacggaacggactcgtgctacttccacagtggtccccgagggacccacgatctgtgggacagccggcttttcgcctactctagctgggagatcctgcgttttctgctcagtaacatcagatggtggttagaggagtatagattcgacgggttccgctttgatggagtcacctcaatgttatatcaccatcacggtgtggggcagggattttcgggagattattcagagtacttcggattgcaggtcgatgaggacgccctgacttacctgatgctggcaaatcacctcgttcataccctgtgtcccgactctataacaatcgcagaagatgttagcggcatgcctgcgttgtgctccccgatctcacaggggggcggtgggtttgactacaggctagcaatggctatccccgacaagtggatccaattgctgaaggagtttaaagatgaagactggaacatgggcgacatcgtgtacacgttgacaaatcgtagatacctggagaagtgcatagcatatgcagaaagccacgatcaggctctggtcggcgacaagagcctagcattctggctgatggatgccgagatgtacacaaatatgagcgtgctcaccccctttaccccagtgatcgacagaggaattcagctccacaagatgattcgcctaatcactcacgggttgggcggagaaggctatctgaacttcatgggcaacgagtttggtcatccggaatggctcgacttccccagaaaagggaacaatgaatcttaccattacgcacgacggcagttccatctcacagatgacgatctgctgcgctacaaatttctcaacaatttcgaccgcgacatgaacaggctggaggaacggtacgggtggctcgcggctccacaggcctacgttagcgaaaagcatgaagggaataaaattatcgccttcgagagggcaggtttactgttcatttttaatttccaccccagcaagagctacacagactaccgcgttggaactgccctgccaggaaagttcaagattgtattggactcagatgctgccgaatatggggggcaccaaaggcttgaccactcgaccgacttcttctccgaagcttttgaacacaatgggcggccatattctctcctcgtgtatattccctctcgggttgcactgattctgcaaaacgtggaccttcccaat

SEQ ID NO: 12799 - DNA, 2106 bp, synthetic construct
  misc_feature 1..2106: note = source = /note="Description of Artificial Sequence: Synthetic coding sequence"
  source 1..2106: mol_type = other DNA
atggcagcccccatgacccccgccgccaggcccgaggattacgaagccgcactcaacgcggcactggcagacgtacccgagctggcccgcctgctcgaaatcgacccttacctgaagccctatgctgtcgacttccagcggcggtataaacaattttcacagatcctgaagaacatcggcgagaacgaaggagggatcgataagttttccagaggctatgaaagcttcggagtgcatcggtgtgctgatggtgggctctactgtaaggagtgggccccaggcgccgagggcgtattcctgaccggcgacttcaatgggtggaaccctttctcttatccatataagaagctggattacgggaagtgggagctatatatcccccccaaacagaataaaagcgttctggtgccacacgggtcgaaactgaaggtggtcattacctcaaaatccggggagatcctataccgaatctccccgtgggccaaatatgtggtcagagagggtgataatgttaattacgactggatacactgggatccagagcattcttacgagtttaagcattccagacccaaaaagccacggtctttgcggatctatgagagtcacgtggggatctcctctcacgaaggaaaggtcgctagctataaacattttacgtgcaatgtgctgccccgtatcaagggactcggatacaactgcatccagctgatggctatcatggaacacgcctactatgcttcctttggataccagattacgtcattctttgctgcctcttccaggtacggtacaccggaggagttgcaggagctcgtcgacaccgctcactccatggggatcatagtgctattggacgttgtgcactcccacgccagcaagaactcggcagatggattaaatatgtttgacggcacagactcctgttactttcacagcggccctcgagggacccacgatttgtgggattcgcgtctgtttgcctattcttcttgggaaattctgaggtttctgctgagcaatattagatggtggcttgaggagtatcgtttcgacggattccgatttgatggagtgacatccatgctctatcatcaccacggggtaggccagggctttagtggagactattcggagtacttcggtttacaggtggacgaggacgccctgacgtacttgatgctggccaaccaccttgtacataccctgtgcccagacagcataaccattgccgaggatgtgtccggcatgcctgccctctgttccccgatttctcagggagggggcgggttcgattaccggctcgcaatggccatccctgacaagtggatccagctcctgaaagagttcaaggacgaggactggaacatgggcgacatcgtgtataccctcacaaatcgcagatatctcgaaaagtgtatcgcctacgccgagtcacatgaccaagccctcgttggagataaaagcctcgccttctggctgatggatgcagagatgtacaccaacatgagtgtgttgaccccgtttacccccgtcattgaccgaggcatccagctgcacaaaatgattcgcctcattacccatggcctagggggtgaaggatacctgaatttcatggggaatgagtttgggcaccccgaatggttggactttccaagaaagggcaacaacgagtcctatcactatgcacgccgacagtttcatctgaccgacgatgatctgctccggtataagttcttgaacaactttgatagagacatgaatcgactggaggagcgctacggatggctcgctgctccccaagcctacgtatctgaaaaacatgaaggtaacaaaattattgccttcgagagggcagggctgctttttatttttaattttcatcccagtaagagttacacagattacagggtgggcacagcactgcctggaaagtttaaaatagttctggatagcgatgccgccgagtatgggggccaccagcggctggatcattcgactgacttcttctccgaagccttcgagcacaatggccgaccctactccctgcttgtctatatacccagcagagttgccctgatcctgcaaaacgtggacctccctaac

SEQ ID NO: 12800 - DNA, 2106 bp, synthetic construct
  misc_feature 1..2106: note = source = /note="Description of Artificial Sequence: Synthetic coding sequence"
  source 1..2106: mol_type = other DNA
atggctgccccaatgaccccagcagcacgcccggaggattacgaagccgccctgaatgcggctttggccgatgtgccggagctggcccgtttgctggagattgatccatatctgaagccttatgcagtcgattttcagcgccgctacaagcagttttctcaaattctcaagaatatcggcgagaacgaaggaggcatcgacaaatttagtcgcggatacgagagttttggcgttcataggtgtgccgatggcggcctctactgcaaggagtgggccccgggagcggagggagtctttctgaccggagattttaacggctggaatccgttcagctatccctataaaaagctggattacgggaaatgggagctgtatatccctccgaagcagaataaatcggtgttggtgccacacggatcaaagctcaaggtggtgattaccagtaagagcggggaaatcctgtataggatcagcccctgggccaagtatgtggttcgcgagggtgacaatgtcaactatgactggatacactgggacccagagcactcgtatgagtttaagcactccaggcccaagaaaccgcgaagtctgcgtatttacgagtcgcacgtcggcatttcgtcgcatgagggcaaggttgctagttacaaacatttcacctgtaacgtgctgccgaggattaagggattaggatataattgcattcagctaatggccataatggagcatgcctactacgcgtccttcggttatcaaatcacctcctttttcgccgcctcctctcgatacggtacgcccgaggaattgcaggagctggtcgacacagcgcacagtatgggcatcattgtattattggatgttgtacattctcacgcgagcaaaaatagcgcggatggtctaaacatgttcgacggcacggattcttgttacttccactcgggtccaaggggaacgcacgacttgtgggatagcaggctatttgcatactcctcctgggagatattgaggttcttgctctctaacatacgctggtggcttgaggaataccggttcgatggattccgctttgacggagtcacgtcgatgctgtatcatcatcacggagtgggccagggtttctcgggggattattcagagtatttcggccttcaggtggatgaagacgccctgacctatttgatgttggccaaccatctggtgcacaccctgtgcccggacagcatcactatagcagaggatgtcagtggcatgccagctctgtgcagccccatctcccaaggcgggggtgggttcgactatcgactagctatggctattccagataaatggatccagctgctcaaggagtttaaggatgaggactggaacatgggggatattgtttatacattaacaaaccgccgctaccttgagaaatgcatagcctatgcggagagccatgatcaggcactggttggagataaaagcctggcgttttggctgatggacgcagaaatgtacaccaacatgtccgttctcactccctttactccagttattgaccggggtatccagcttcacaaaatgatccgtctgataacccacggtctaggtggagagggatatctgaattttatgggaaacgagttcggccaccccgagtggttggatttcccccgcaagggcaataatgagtcctaccactacgcgcgtcgacagttccacttaactgacgatgatctgctcaggtacaagttcctgaataacttcgatcgcgatatgaacaggcttgaggagcgctacggttggctcgctgcaccgcaggcttacgtgtcggagaagcatgaaggtaacaagataattgcgtttgagcgagcgggtctgttgttcatcttcaattttcatccgtccaagtcgtacaccgattatcgtgtcgggaccgccctgcccggaaagttcaaaatcgtactagattccgatgccgctgaatatggaggccatcagcgcctggaccactccaccgatttcttctctgaggcctttgagcataatgggcggccctactcgctgctggtgtacatcccctcccgggtcgccttgatactgcagaatgtggacctgcctaat

SEQ ID NO: 12801 - DNA, 2106 bp, synthetic construct
  misc_feature 1..2106: note = source = /note="Description of Artificial Sequence: Synthetic coding sequence"
  source 1..2106: mol_type = other DNA
atggcggctcctatgactccagctgcccgacccgaagactatgaggccgccctgaacgccgcgctggcggacgtacctgaattggcccggcttttggagattgacccctatctcaagccgtacgctgtcgacttccagagacgatataagcaattcagccagatcctgaaaaacattggagagaatgaaggtggcatcgataagttctcccggggatacgagtctttcggggtgcaccggtgtgctgatggcggcctatactgtaaagagtgggctccaggagcagagggcgtgtttcttacgggagattttaacggatggaaccccttcagttatccttataaaaaactggactacgggaaatgggagctgtacattccacctaaacagaacaaatcagtgcttgtgccccacggcagtaagttgaaagtggtgataaccagtaaaagcggtgagatactgtatcgcatcagcccgtgggctaaatatgttgtgcgagagggcgacaatgtgaattacgattggatacattgggacccagagcactcatacgagtttaagcatagcagacccaagaagccaagaagtctgcggatttacgagtcccatgtaggaatttcttcccacgagggcaaggtggcctcatacaagcactttacttgcaatgtgctgccacgaatcaaaggcctaggatataattgtatccagctgatggcaatcatggaacacgcctactacgcatcttttggatatcagataaccagtttcttcgcagcctcgtctaggtatggcacgccagaagagctgcaggaactcgtggacactgctcactccatgggaataatagtcctgttagacgttgtccattcgcacgccagcaaaaacagcgcggacggcctaaatatgttcgacggcaccgatagttgctatttccacagcggcccaagaggtacccacgatctgtgggatagtcggttgtttgcttactcctcttgggaaattttgcggttcctgctgtctaacatcagatggtggcttgaagagtatcgtttcgatggcttcaggttcgacggcgtcacaagcatgctgtatcaccatcacggcgtgggccagggcttcagtggggactattcagaatactttgggctgcaagtcgacgaagacgcactcacatatctcatgctggcgaaccatctggtgcatacactttgccccgactccattactatcgctgaggacgtcagtggcatgccagccctctgtagtcccatctctcagggcggaggcggttttgactatcgtctggcaatggctatccctgataagtggatacagctgcttaaagagttcaaggatgaggattggaacatgggcgacatcgtgtacacacttactaatagaaggtacctggagaagtgcattgcatatgccgagtcacatgaccaggcgctcgtgggcgacaagagtctggctttttggctgatggacgccgaaatgtacacaaacatgtccgtcctgactccatttacccctgtaatcgatcggggaattcaattacacaaaatgattcgcttgattacccacggccttggcggcgaagggtacctgaactttatgggtaatgaattcggccatccggaatggttagacttcccccgtaagggaaataacgagtcctatcactacgcccgcagacaattccatctgactgacgatgacctcctgagatataaattcctgaacaacttcgaccgggacatgaacaggttggaggagcggtatggatggctggctgcccctcaggcttacgtctcggaaaaacacgaggggaataaaatcattgcttttgaacgggcgggccttctgttcatttttaacttccacccttccaagtcttacactgactacagagtcggaaccgcccttccaggaaagtttaagatcgtgctggattccgacgccgccgagtatggcggacaccagcggctggaccactcaacagactttttttcagaggctttcgaacataacgggaggccgtactcattattggtatatatcccttcacgagttgccctgatattgcagaacgtggacctccccaat

SEQ ID NO: 12802 - DNA, 2106 bp, synthetic construct; identical to SEQ ID NO: 12794
  misc_feature 1..2106: note = source = /note="Description of Artificial Sequence: Synthetic coding sequence"
  source 1..2106: mol_type = other DNA

SEQ ID NO: 12803 - DNA, 2106 bp, synthetic construct
  misc_feature 1..2106: note = source = /note="Description of Artificial Sequence: Synthetic coding sequence"
  source 1..2106: mol_type = other DNA
atggcggctcccatgacgcccgcggcaaggccagaagactatgaagcagccctaaatgccgctctcgccgatgtgcctgagctggcccgcctcctggagattgatccgtatttgaagccatacgccgtcgacttccagaggcgatacaaacaattcagccagatcttgaaaaacatcggggaaaacgaagggggtatcgataagtttagtcgtggttacgagagttttggggtgcaccggtgtgcagacggaggactatactgtaaggagtgggctccgggagctgagggcgtatttttgacaggcgacttcaatgggtggaaccccttctcttatccttataaaaagctcgattacgggaagtgggaactgtacatccctcctaagcagaacaaaagtgtgcttgtaccccatggctctaagctgaaggtagtaatcactagtaaatccggggaaatactgtatagaatctccccctgggccaaatacgtggtgcgcgaaggggacaatgtcaattatgattggatccactgggaccccgagcattcttacgaatttaaacattcacgccctaagaaacccagaagtctgcggatctatgagtctcacgtgggaatttccagtcatgaaggcaaggtggcctcttacaagcacttcacttgcaacgtcttgcctcgcatcaaggggttaggatacaattgtatccagttgatggccatcatggagcatgcatactatgcttcattcggctaccagatcacttccttctttgctgcctcctcgagatatggtaccccagaggagctccaagaactggtcgatacagcacattcaatgggaatcatagtgctgctggatgtggtacactctcatgcctcaaagaacagcgccgacggcttaaacatgttcgacggaactgattcatgctatttccactctgggcctaggggcacccatgacttgtgggactcaaggctctttgcatacagttcttgggagatacttcgtttcctgctttcgaacatcagatggtggctggaggagtatagatttgacgggtttcggttcgatggggtcaccagtatgctgtatcatcatcatggcgtcggccaaggttttagtggggattattcagaatatttcggactgcaggtggatgaagatgctctgacgtacttgatgctggccaatcatttggtccacacgctttgtcccgactctatcacaatcgccgaggacgtgagtggtatgcccgcgctctgtagtccaatctctcagggcggtggaggttttgactaccgtctcgctatggctatcccagataaatggatacaactcctgaaagaattcaaggatgaagattggaacatgggcgatatcgtgtatacactcaccaatcggagatatttggaaaaatgcattgcctatgctgaaagccacgaccaagcactcgtgggcgataagtccctggcgttttggttaatggacgctgaaatgtataccaatatgagcgtgctgacaccttttacccctgtgatcgacaggggcatccagctccataagatgattagactcataacccacggccttggtggggaaggctatctgaactttatgggaaatgagtttggtcaccctgagtggttggatttccctcggaagggaaacaacgaatcgtatcactacgctcggcgtcagtttcacttgacagacgacgatcttctgcggtataagttcctcaacaatttcgaccgagacatgaaccgcctggaggaaaggtatggttggctggccgcgccgcaagcgtatgtaagcgagaaacacgaggggaacaagatcattgccttcgaaagagccggcctgttgttcatatttaactttcaccctagcaagtcatatacagactacagagtgggaacggcgctcccggggaagttcaaaatcgtactggactctgatgcagcggagtacggagggcaccagcgactagatcacagtactgacttcttttccgaggccttcgaacataacgggcgcccttactccctgcttgtgtatattccaagtagggtcgctctcatcctacagaatgtcgatctccctaac

SEQ ID NO: 12804 - DNA, 2106 bp, synthetic construct
  misc_feature 1..2106: note = source = /note="Description of Artificial Sequence: Synthetic coding sequence"
  source 1..2106: mol_type = other DNA
atggctgcgccgatgaccccagccgcacgcccggaggattacgaggccgcgctgaacgcggctctggcggacgtgccggagctggcacgtctcctggagattgacccttaccttaagccatatgctgtagacttccagcgtcgctataaacagttctcccagatcctgaagaacatcggtgaaaacgaggggggcatcgataaattctcaaggggatatgagtcgtttggcgttcatcgctgcgcagacggcggcctgtactgtaaggagtgggccccgggggcagagggtgtgttcttgaccggcgatttcaatggttggaacccgtttagctacccgtataaaaagctggattacggcaaatgggagctttatatcccgcctaagcaaaataaaagcgtgctggtcccacatggaagtaagttaaaagtcgtgatcacttctaagagtggtgagatcctctaccgtatttcaccatgggccaaatatgtggttcgtgagggcgataatgtgaactacgattggatccactgggatccggagcacagctatgaatttaagcacagccgaccgaagaagccgaggagcctacgtatttacgaaagccatgttgggattagcagccacgaagggaaggtggcaagctataagcacttcacttgcaacgtactgcctcgaataaaaggtcttggttataactgcatccagctgatggcgattatggagcacgcgtattacgcttctttcgggtaccagatcaccagcttttttgccgcatcaagccgctacgggacgcccgaggagctgcaagagctggttgacaccgcccattcaatgggtattattgttctgttggatgttgtgcactcccacgcttctaaaaatagtgccgacggcctaaacatgttcgacgggactgattcctgctactttcattccggcccacgaggcacccatgacctgtgggattcacgcctctttgcctattcttcctgggagattctgcgcttcctgctgagcaacattagatggtggctggaagagtatcgcttcgatgggttccgcttcgacggagtaactagcatgctgtaccatcaccacggcgttggtcagggctttagcggtgattacagcgaatacttcggactgcaagtggatgaggacgcgctgacctatctgatgttggcgaaccatttagttcacaccctgtgtcctgattccatcaccatcgccgaagatgtgagtggtatgcccgcattgtgttcaccgatctcccagggtggtggtggttttgattatcggcttgcaatggcgattcctgacaagtggattcaacttctgaaagagttcaaggacgaggactggaacatgggcgacatcgtgtataccctgaccaaccgccgctatctggagaagtgtatcgcgtatgcggagtcacacgaccaagccctggtgggagacaagagcctggccttttggctgatggatgccgaaatgtacaccaacatgagcgtgctcaccccgtttaccccggtgatcgatcgaggcattcagcttcacaaaatgatccgtctgattacgcacggcctggggggagaaggttacctgaatttcatgggtaatgagtttgggcaccctgagtggctggacttcccccgtaagggcaacaatgagtcttatcactatgctcgccgccaatttcacctaacggatgatgacttgctgaggtataaattcttgaacaatttcgacagggatatgaataggctggaggaacgttacggctggctggccgcaccgcaggcttatgtgtctgaaaaacacgagggtaataaaattattgcattcgagcgcgctggtctgctgttcatcttcaatttccacccaagcaaaagctacacggactaccgcgtcggaaccgcactccctggcaaatttaaaattgtcctggattctgacgccgcggagtacggcggccaccagcgcctggatcacagcacggattttttttccgaagcttttgagcataatggacgcccgtacagcctgctggtgtatatcccaagccgcgttgctctgatccttcagaatgtggacctgccgaat

SEQ ID NO: 12805 - DNA, 2106 bp, synthetic construct
  misc_feature 1..2106: note = source = /note="Description of Artificial Sequence: Synthetic coding sequence"
  source 1..2106: mol_type = other DNA
atggcagcaccaatgacaccagccgcccgccctgaggactatgaagcagccctgaatgccgctctcgcagatgtgccagagctggcccgtttgcttgagatagatccatacctgaagccgtatgccgttgattttcagagaaggtataaacagttctcccaaattctgaagaacatcggtgaaaatgagggcgggatcgataaattcagcagggggtacgagagttttggtgtgcatcggtgtgcagatggtggcctgtactgcaaggagtgggccccaggcgccgagggagtgtttctgaccggggattttaacgggtggaacccattcagttacccctacaaaaagctggactacggcaaatgggagttgtacattccccctaagcagaacaagtcggtcctggtccctcatgggtccaaactaaaagtggtcatcacaagcaaaagcggtgaaattctgtacagaatcagcccgtgggccaagtacgtggttagggaaggcgataacgtaaattatgactggattcattgggaccctgagcatagctatgagttcaagcactcgcgaccaaagaagccacggtctctacggatttacgagagccacgtgggaatctcctctcacgagggcaaggttgccagctacaagcactttacctgcaacgtgttacctcgtattaaggggcttggttataactgtatccagctcatggcgattatggaacacgcctactacgctagtttcggctatcaaatcacctcgttttttgccgcgagttctcggtacggaacaccggaagagctgcaggaactggtagacaccgcacactctatgggcatcatcgttttgctggacgtggtccattcgcatgcgtccaaaaatagcgccgacggtctgaatatgttcgacgggaccgactcgtgctacttccacagcggtccccgtgggacccacgacttgtgggacagccggctgttcgcctatagttcttgggaaattctgaggtttttgctctcaaacatcaggtggtggctggaggagtatcgcttcgatggtttccggttcgatggggtgacatccatgttgtatcatcaccacggcgtggggcaaggctttagcggcgactattcagagtacttcgggctgcaggtggatgaagacgccctcacatacctgatgctcgcgaatcacttagtacacactttgtgtcctgactcgatcaccatcgcagaggatgtgtctggtatgccggcactatgctcgcctattagtcagggaggcggcggcttcgactatcggctggcgatggccattcctgataaatggatccagcttctgaaggagtttaaggatgaagattggaacatgggagacattgtttacactctgacaaacagaaggtacctggaaaagtgcattgcgtatgcagagtcccacgatcaggcactggtcggggacaagtccctggcattctggctgatggatgccgaaatgtacacgaacatgagtgtcctgacaccattcaccccggtgatcgacaggggcatacagctgcataagatgattagattaatcacccacgggttaggcggtgagggttacctgaatttcatgggtaacgaattcggccaccctgaatggttagactttcccaggaaggggaataatgaaagttaccattatgcccgacggcagttccatctgactgatgacgacctcctgaggtacaaatttttgaataattttgaccgggacatgaaccggctggaagagagatacgggtggctggcggccccccaggcttacgtgtcggagaagcacgaagggaacaagataatcgctttcgagagagctggccttctgttcatctttaattttcaccctagtaagagctatactgattatcgcgtgggtaccgctctcccggggaagttcaaaatcgttctggactccgacgctgctgagtatggtgggcaccaaagactcgatcactccaccgacttcttttctgaggcgttcgagcacaacggacgtccttattccctgctcgtctacatcccgagtcgggtagcactgatcctgcagaatgtcgacttaccaaac

SEQ ID NO: 12806 - DNA, 2106 bp, synthetic construct
  misc_feature 1..2106: note = source = /note="Description of Artificial Sequence: Synthetic coding sequence"
  source 1..2106: mol_type = other DNA
atggcagcaccgatgacccccgctgcccgtcccgaggattatgaggccgccttgaacgcagcgttggctgacgtgcccgagctggccagactcttggagatcgatccgtacctcaagccttatgccgtggactttcagagacggtataaacagttctcccagatcctcaaaaacattggggagaatgaaggcgggatcgacaagttctcacggggttacgaatcattcggtgtgcaccggtgtgctgacggaggcttgtactgcaaagaatgggcacccggcgcagaaggggtctttttaaccggagatttcaatggctggaatccattttcctacccgtataagaagctcgactacggcaagtgggagctctatatcccccctaagcagaacaaatcagtgctggttccacatggatccaaattgaaggtggtaatcacctccaagtccggcgagatcctgtaccgaatcagcccgtgggccaagtacgtggtgcgagagggggacaatgtgaactacgactggattcattgggaccccgagcactcctacgagtttaaacattcacggcctaagaaaccaaggtcgcttcgcatttatgagtctcacgtcggaatctcgtcccatgaaggaaaagtggcctcgtataagcatttcacatgtaacgtccttccccgtatcaaggggcttggctacaattgcatccagctgatggccatcatggagcacgcttactacgcgagcttcggatatcaaatcaccagcttcttcgcggcatcctccaggtacggcacgccggaggaattgcaggagctggtggacactgcccattctatgggtatcatagtactgttagacgtggtgcactctcatgcctcaaaaaatagtgcagacggcctcaatatgtttgatggaactgactcctgctatttccattccggtcctcgaggtacccacgacctctgggattcacgcctgttcgcatacagcagctgggagatccttagattcctgctttctaatatccgctggtggctggaggaatacaggttcgacgggttcagatttgatggtgtgaccagtatgttatatcatcaccacggggtggggcaggggttttcaggcgattatagcgaatactttgggctccaagttgacgaggacgcacttacctatctgatgctcgcaaatcacctagtgcacactttgtgcccagatagcatcaccatagccgaagacgtctccggaatgccagcactgtgtagccctatcagccagggcggcggcggctttgactaccgtttggctatggccattcctgacaagtggattcaattgctcaaagaattcaaagatgaagactggaacatgggggatatcgtttatacactgaccaaccggaggtacctagaaaagtgcatcgcctacgccgaaagtcacgaccaggcactagtgggggacaagtcacttgcattctggctcatggatgccgaaatgtacacaaatatgagcgtgctgaccccattcacacccgtgatcgatcgagggatccaacttcataaaatgatccggctaattacccatggcctcggtggtgagggctatcttaacttcatgggcaatgagttcggtcacccggaatggctcgattttccacgaaagggaaataatgagagttaccactatgctcgccgtcagttccaccttaccgatgacgacttgttacgctataagtttctgaacaattttgacagggatatgaatcgccttgaagagagatacggctggctcgcagccccacaggcatatgtgtctgaaaaacatgaggggaataaaattatcgcctttgagcgagcgggtcttctcttcatcttcaacttccatcccagcaagtcctatacagactaccgtgtaggtacggccctgcccgggaagtttaaaatcgtcctggacagcgatgccgccgagtatggtggacatcagagacttgatcacagcacagactttttctccgaggcctttgagcataatgggaggccgtatagcctactagtgtatatcccctctagagtggctctgattttacaaaatgtggaccttcctaat

SEQ ID NO: 12807 - DNA, 2106 bp, synthetic construct
  misc_feature 1..2106: note = source = /note="Description of Artificial Sequence: Synthetic coding sequence"
  source 1..2106: mol_type = other DNA
atggctgcccctatgacacccgccgcacggcccgaagactatgaggcggctcttaacgctgctctcgcagatgtgcctgaattggcccggctactcgagatcgacccatatctcaaaccttatgcagttgatttccaacgccgatataaacagttttcccaaattttgaagaatatcggcgagaacgagggtggtatcgacaagttcagccggggctatgaatcgttcggagttcaccgatgcgccgacgggggattgtactgtaaagaatgggcgcctggcgctgaaggagtgtttttaacgggagacttcaatggctggaaccctttctcgtatccttacaaaaagctcgactacggaaagtgggaactctacatccccccgaaacagaacaagtctgtgctcgtgccgcacggctccaaacttaaggttgtgatcacttcaaagtcaggcgagatcctttaccgaatctcgccgtgggcaaagtatgttgtgagggagggcgataatgtgaattacgactggatccattgggaccctgaacattcatatgagttcaagcacagcagacccaaaaaacctcgatccctccgcatatacgaaagtcacgtcggtatatcgtcgcatgagggcaaagttgcttcttataagcatttcacatgtaatgtcttacctcgcataaagggattggggtacaattgtatacagttgatggccatcatggagcatgcgtattacgctagttttggataccagattacctcgttctttgctgcctcgagtcggtacgggacacccgaggagcttcaagagctggttgataccgcacattccatgggtatcattgtattgctcgatgtggtgcattcccatgctagcaagaactccgccgatggcctgaatatgtttgacggcacggattcatgttacttccatagtggcccccgtggtacccacgatttgtgggactctagactgttcgcctatagttcgtgggagatcctgcggtttcttctttccaatattagatggtggttagaggagtacaggttcgatggattccggttcgacggcgtgaccagcatgctataccaccatcatggggtcggccagggcttttcgggtgactacagcgaatacttcggtttacaggtcgatgaagacgcccttacatatctgatgctagcgaatcacttagtccataccctctgtcctgatagcattaccattgccgaagacgtcagcggcatgcccgctctctgctccccaatctcgcagggagggggggggttcgactatcggttggccatggcgatcccggataagtggatccagctcctcaaggagttcaaggatgaggactggaacatgggcgatatcgtttatacgcttaccaatcgtaggtatctagaaaagtgtatagcttacgcggaaagccacgaccaggccctcgtcggtgacaaaagtttagctttctggcttatggatgcagagatgtatactaatatgtcggtgctgactccattcactccggtgattgatcgcggcatccagctccataagatgatccggctgattacccacggtttggggggtgaaggttaccttaatttcatgggtaatgaattcggacatccggagtggttggattttccaaggaaaggaaacaacgagtcgtatcattacgctcgaaggcagtttcaccttactgacgatgacctgcttcgctataagtttctcaacaatttcgatcgtgacatgaaccgactcgaagaacgatacggctggttggcagcgccgcaggcctacgtgagtgagaagcatgagggtaacaagatcattgctttcgagagagctggtttgctattcattttcaatttccatccctcgaagtcttatacagactaccgcgttggcacggctctccccggcaagttcaagatcgtgctcgacagcgacgcggcagagtacggcggtcatcagcgcctggatcatagcacagattttttctcggaggcatttgaacacaacgggaggccttactcgcttctcgtgtacatcccttcccgtgttgcactcatcctgcagaatgtcgacctgccaaat

SEQ ID NO: 12808 - DNA, 2106 bp, synthetic construct
  misc_feature 1..2106: note = source = /note="Description of Artificial Sequence: Synthetic coding sequence"
  source 1..2106: mol_type = other DNA
atggcagcgccaatgacccccgccgccagacctgaagattacgaagccgctctgaacgctgccctcgccgacgtgccagaattagcccggttactggagattgatccttacctgaaaccctacgcggtcgattttcagagacgttacaagcagttctcacaaatcctgaaaaacataggtgagaacgaggggggcattgacaaattttcccgcggttacgaatcattcggagtccatagatgcgcagatggaggtttgtactgtaaagaatgggctcccggagccgagggcgtgtttctgaccggcgatttcaacgggtggaacccattctcatacccgtataaaaagttagactatggaaaatgggagctgtacattcctccgaagcagaacaagagcgttctggtcccccacggctccaagctgaaagtcgtcataacctctaagtctggggagattctgtatcgcatcagtccctgggctaagtatgtcgtccgggagggcgacaacgtgaattacgattggatccattgggatcccgaacactcttatgagttcaagcattcccggcctaagaaaccccgttcattgcggatttacgagagtcatgtggggatttcctcacacgagggaaaagttgcctcttacaagcactttacatgtaacgtgctcccacgcattaaaggccttggctacaattgcatccagctgatggcgattatggagcatgcctattatgcaagcttcggataccagatcacatccttcttcgcagctagctcccggtatgggactccagaagaacttcaggaactggttgacacagcccattcgatgggtatcatcgtcctcttggatgtggtccactcccacgcctctaagaactctgccgacggactaaatatgtttgacggaacagatagttgctacttccattcagggcccaggggtactcacgacctgtgggatagccggctgtttgcctactcgtcctgggagattttgaggtttcttctgagtaatatcagatggtggctggaagagtacaggttcgatgggtttagatttgacggtgtaacatcgatgctgtaccatcaccacggcgtggggcagggctttagtggtgattattctgagtatttcggactgcaggtggacgaggacgccctcacctatctgatgctggcaaatcatttagtgcacacactctgccccgattcgattaccatcgctgaggacgtttctgggatgcctgctctctgctcgcccatctctcagggcgggggcggctttgattaccggctcgccatggcgattccggataagtggattcagctcctgaaagagttcaaggatgaagactggaatatgggcgatattgtatacactctcacaaatcgaaggtatctggagaagtgcatagcctacgccgagtctcacgatcaggcattagtgggagacaagagtctggccttctggctgatggacgccgagatgtacacaaacatgtctgttctcaccccattcacccccgtgatcgaccgcggcatacagcttcacaaaatgatccggctgatcacccacgggttgggaggagaagggtacttgaatttcatggggaacgagttcggtcacccagagtggctggacttcccccggaaagggaacaacgaatcttatcactacgcacgcaggcagtttcatctgactgatgacgatctcttgaggtataaatttctgaacaacttcgacagagatatgaacagactcgaagaacggtatggctggctggccgccccccaagcatacgtgtcagagaaacacgaaggcaacaagattattgctttcgaacgggccggcctgctgttcatctttaacttccacccaagtaaaagctacaccgattacagggtcgggactgctctcccaggcaagtttaaaattgtcctggactccgacgccgctgaatacggtgggcatcagagactcgatcattcaacagacttctttagcgaggccttcgagcataacggacggccatactcactgcttgtgtatattcctagtagagtggcattaattcttcagaatgtagacttacctaac

SEQ ID NO: 12809 - DNA, 2106 bp, synthetic construct
  misc_feature 1..2106: note = source = /note="Description of Artificial Sequence: Synthetic coding sequence"
  source 1..2106: mol_type = other DNA
atggctgctcctatgacacccgctgcccgtcctgaggattatgaggccgccctgaatgccgcactggcggacgtacccgagctggccaggcttctggagattgacccctacttgaaaccatatgcagttgactttcagaggagatataagcagttctcgcagatcctcaagaatattggcgagaacgagggcggcattgacaaattttctcgaggatacgagtcgttcggagtgcacagatgtgctgatggggggttatactgcaaagaatgggctccaggagctgaaggcgtttttctaactggagatttcaatgggtggaatccattctcatatccctacaagaagctggattacgggaagtgggagttgtatatcccgcctaagcagaataaaagtgtcctcgtgccacatggttctaaactcaaggtggtgattacgtccaagagtggtgaaattctatatagaatttccccatgggcaaagtacgtagtgagagagggggacaacgtgaactatgactggatccactgggatcccgagcattcttatgagttcaagcactcccggcctaaaaaacccaggagcttacggatttacgaatcccacgtcgggatctcttcccacgaaggcaaagttgcctcttacaagcactttacttgtaacgtactcccaaggatcaaaggtctgggatacaactgcatccaactaatggcaattatggagcatgcatactacgcctcttttggctatcagatcactagctttttcgcggctagttctagatacggaacccccgaagagctccaagagctggtagacacggcccattccatgggaattatcgtgctgctggacgtggtgcattcccatgcatctaaaaactccgctgatggtttgaacatgttcgacggcacggatagctgttacttccattctggccccaggggcacacacgacctgtgggattcaagactgtttgcctacagctcctgggagatcctcagattcctgttgagtaacatccggtggtggctcgaggaataccggtttgacggattcagatttgacggcgtgactagcatgctctatcaccatcacggggtggggcaggggttttctggagattactccgagtatttcggcctgcaggtggacgaggatgccctcacctatctcatgttagcaaaccacctggtgcatactctctgtcctgacagcattacgatcgccgaagatgttagtggaatgccggccctctgttcacccatatcccaagggggcggaggcttcgactacagactggctatggccatccccgacaaatggatccaacttctgaaggaatttaaagacgaagactggaacatgggagacatcgtgtacacattgaccaatcgtcggtacctcgagaagtgcatcgcttacgccgaaagtcacgaccaggcactggtaggggataaatcccttgccttttggctgatggatgccgaaatgtataccaatatgtccgtcctcacacccttcactccagtgatagaccgcggtattcagttacataagatgattcgtctgatcacacatgggctgggcggtgagggctatctaaattttatggggaacgaattcgggcaccctgagtggctggacttccctcgaaaaggtaataacgagtcttatcattatgcccggcggcagtttcatctaacagacgacgatctgttgcgctacaagtttctgaataactttgaccgggacatgaaccgtttggaagaacgctatggatggctggcagccccacaggcctatgtcagtgagaagcatgaggggaacaagataatcgcctttgaaagggcaggactgctgtttatttttaactttcacccttccaaatcctataccgattatagggtaggaacggcgctgcccggaaaatttaagatcgtgctggattcggatgcagccgaatatggcggacatcagagactagatcacagcacggatttcttctctgaagctttcgagcataatgggcggccctactctctgctggtgtatattccatctcgcgtggctttgatcctccagaacgtagatctacccaac

SEQ ID NO: 12810 - DNA, 2106 bp, synthetic construct
  misc_feature 1..2106: note = source = /note="Description of Artificial Sequence: Synthetic coding sequence"
  source 1..2106: mol_type = other DNA
atggcggcacctatgaccccagctgctagaccagaggattacgaagccgctctcaacgctgctcttgcagatgtgccagaattggctagactccttgagatcgacccttatctcaagccttacgcagttgactttcaaagacgctacaagcaattctctcagattctgaagaacattggcgaaaatgaagggggaatcgataaattttcgcgcggttacgaatcctttggagttcaccggtgcgctgacggagggctatattgcaaggaatgggcacccggagcagaaggagttttcttgacgggggatttcaacggctggaaccctttttcgtacccatataagaaacttgactacgggaaatgggaattgtacattccaccaaagcagaataagtctgttctggttccccatggttcaaagcttaaggtagttataacatcgaaatctggtgaaatcctgtaccgaatatccccttgggcaaagtatgtagtgagggaaggtgataacgtgaactatgattggatccattgggatccagaacatagttacgaattcaaacattcaaggcctaagaaacctagatcactcaggatctacgagtcccatgtcggtatcagttcgcacgagggcaaagttgcatcatataagcattttacctgtaacgttcttcctaggattaaggggcttggatacaactgcatacagttgatggcaatcatggaacatgcatattatgcttcattcggttatcaaataacaagcttctttgctgcatcaagtcgttatggcacccctgaggaactccaggaacttgttgataccgcacactcgatgggtattattgttttattggacgtcgtgcactcgcatgcatctaaaaactccgcagacggacttaatatgtttgatggtactgattcttgctacttccattcggggccgcgtggaacgcacgatctttgggattctagactgttcgcttactcctcgtgggagatcttgcgttttctgctaagtaatatcagatggtggctcgaagagtataggtttgatggtttcagattcgatggggttacttccatgctttatcatcatcacggtgtcggacaaggattctcaggtgactactcagaatacttcggattgcaagtagacgaagatgccctcacttatttaatgctcgctaatcatctggtgcatacactctgtccagattctatcacgatcgcagaggatgttagtggtatgcctgctttgtgcagtcctatttcccagggaggcggtggatttgattataggctagctatggccatccccgacaaatggatacaacttttgaaagagtttaaggatgaggattggaacatgggtgatattgtttacacgcttactaaccgtaggtacttagaaaagtgcattgcttacgccgaaagtcatgatcaggcgttagttggtgataagtcactggctttttggttgatggatgccgagatgtacactaacatgtccgttcttacaccatttacacctgttatagatcgcggaatacaattgcataagatgatcaggctcattacccatgggcttgggggcgagggctacttgaacttcatgggtaatgaatttggacacccagagtggcttgatttcccaaggaaagggaacaatgagtcttatcattacgcacggcgacaatttcacctgaccgacgatgatcttctcaggtataagtttttgaacaattttgatagggatatgaacaggctggaagaaaggtatggatggttggctgcacctcaagcctatgtatctgaaaaacacgaaggtaataagatcatcgcatttgagcgagccggtctactgtttatctttaatttccacccaagcaaatcatacacggactaccgtgtgggtactgctttaccaggtaaattcaaaattgtgctcgattcggatgcagcagagtacggtgggcatcaaaggcttgatcatagcactgattttttttcagaggcctttgagcacaacgggagaccatattcattgttggtgtatattcccagccgagttgctctgattcttcaaaatgttgatttgccaaat

SEQ ID NO: 12811 - DNA, 2106 bp, synthetic construct
  misc_feature 1..2106: note = source = /note="Description of Artificial Sequence: Synthetic coding sequence"
  source 1..2106: mol_type = other DNA
atggctgcccctatgacacctgctgctaggcccgaagactacgaggcagctcttaacgctgcccttgccgacgtccccgagttggccagactcttggaaatcgacccttacctgaagccttatgccgtcgatttccagcgccgctacaagcagttttcacagatcctgaagaatattggcgagaacgagggtggtatcgacaagttttctcgcggttacgagtccttcggcgtgcaccgctgcgccgatggaggactgtattgtaaggagtgggctcctggtgccgaaggtgtcttcctgaccggtgattttaacggatggaatccttttagctacccctacaaaaaattggactatggcaaatgggagctgtacattcctccaaagcagaacaagtctgtattggtgccccacggcagtaagctcaaagtggtgatcacttccaaatccggcgagatactgtatagaatctctccctgggctaagtacgttgtccgcgagggtgacaacgttaactacgattggatccattgggaccctgaacattcttacgagttcaagcactcaagacctaaaaagcctcgcagccttagaatttatgagtcccatgtgggtatcagtagtcacgaaggcaaggtcgcctcttataaacatttcacttgtaacgtgctgcctaggatcaagggtctgggttacaattgcatccagctgatggccattatggagcatgcttattacgcttcattcggataccaaatcacctctttcttcgccgccagctcccgctacggcaccccagaggaactgcaggagctggtcgacactgcccacagtatgggaatcattgtcttgctcgacgttgtgcatagtcacgcttccaagaattctgctgacggcttgaacatgtttgacggtaccgattcttgttatttccactccggtcccagaggtacccacgacttgtgggacagccgccttttcgcttattcttcctgggagattcttcgtttccttctctcaaatatcaggtggtggctggaggaatacaggtttgacggatttcgttttgatggcgtaacctcaatgttgtaccatcatcacggtgtcggacaaggattcagtggcgactacagcgagtacttcggtctgcaggtggatgaggacgctctgacctacctgatgctcgccaaccacctggtccatactctttgtcctgacagtatcaccatcgccgaagatgtgagtggaatgccagctctgtgtagcccaatctcacagggtggcggcggattcgattatcgcctggccatggccatacccgataagtggattcagctgctgaaagagttcaaggatgaagattggaacatgggtgacattgtttacacattgaccaaccgtcgttatctggagaaatgcatcgcctatgctgagtcccacgatcaagctctcgtcggtgacaagagccttgcattctggctgatggacgcagaaatgtataccaacatgagcgtgttgaccccattcaccccagtcatagacagaggtatccagttgcacaaaatgatccgcttgatcacccacggactgggcggcgaaggatatctgaattttatgggtaacgagtttggtcaccccgaatggttggatttcccccgcaaaggtaataacgaatcctaccactacgcccgtcgtcagtttcacttgaccgacgatgaccttcttaggtataaatttttgaacaacttcgaccgcgacatgaaccgccttgaggagagatacggatggttggccgccccccaagcatacgtttccgaaaagcacgaaggcaacaaaatcattgcatttgagcgtgctggtctgctcttcatattcaacttccacccatccaagtcttataccgactatcgtgtaggaactgccctgcctggaaagttcaagatagttttggatagcgatgccgccgaatacggtggccaccaacgcctcgaccattctacagacttcttctcagaagcttttgagcacaatggaaggccctactcattgctggtgtacatcccatcacgtgtcgccctgatcttgcagaatgttgacctgcctaat

SEQ ID NO: 12812 - DNA, 2106 bp, synthetic construct
  misc_feature 1..2106: note = source = /note="Description of Artificial Sequence: Synthetic coding sequence"
  source 1..2106: mol_type = other DNA
atggcagccccaatgacccccgccgcccgacccgaggattatgaggctgcactaaatgccgccctggccgacgtgccggagctggctagactgctggagatcgatccctatttgaagccatatgcagtggactttcagcggaggtacaaacaatttagccagatcctgaagaacataggggagaacgagggcggcatagataagttttccaggggatacgaatccttcggcgttcatcgatgtgccgacggaggtctgtactgcaaggagtgggcccccggtgctgagggagtgtttctgactggcgactttaacggttggaaccccttctcttatccctacaaaaagttagattatggaaagtgggagctgtacatacccccgaagcagaacaagtcagtacttgtgccccacggatcaaagctcaaggttgttattacaagcaagagcggggaaattctttacaggatttctccttgggctaagtacgtcgtcagagagggggacaacgtgaattacgactggatacattgggacccagagcactcatacgaattcaagcactcccgaccaaaaaaaccacggtccctcaggatttatgagagccacgtcggaatcagctctcacgaaggcaaagtcgcatcatataagcatttcacatgcaatgtgctgcctcgaatcaaggggctcggttataattgtatacaactcatggctataatggaacacgcctactatgcctcctttgggtaccagatcacatcattcttcgccgcatccagcaggtatggaacgccggaggaactgcaggaactggtggacaccgctcactctatggggatcatcgttctgctcgacgtggtgcattcccatgctagcaagaactccgccgatggactcaatatgttcgacggcacagactcctgctacttccatagcggacctagggggacccatgacttgtgggacagccgactgtttgcttacagttcttgggagattctgcgatttctactgtctaatattagatggtggcttgaggaatacaggtttgacggtttccggttcgatggtgtgacaagtatgctgtatcaccaccacggtgtgggtcagggtttctccggggactattccgaatactttggcttacaagttgacgaagatgccctgacgtatcttatgctcgcgaatcatttagtccacactttatgccctgacagcattacaatcgcggaagatgtatccggtatgcctgccctgtgtagtccgatatcacaggggggcggcggattcgattaccgacttgctatggctattccggataaatggattcagctactgaaggagttcaaggatgaagattggaacatgggcgacatcgtgtacaccctgactaacaggaggtacctggaaaaatgtattgcttatgctgagtctcatgaccaggctcttgtcggagacaaatccctggctttctggctgatggatgcagaaatgtataccaacatgagtgtgctaacaccttttacccctgtgatagaccgaggcatccagctgcataagatgattcgattgattacccacggattgggcggcgaagggtacctgaattttatgggaaatgagttcgggcatcctgaatggctggatttccccagaaaaggcaataatgagtcctatcactatgcgcgaagacagttccacctgactgatgacgatctgctacgatataaattcctgaataacttcgatagagacatgaatcgccttgaagagcgatacgggtggcttgcagcgccccaggcttatgttagtgagaagcacgaaggcaataaaatcatagcatttgaacgggctgggttgctctttatcttcaattttcatccttcgaaaagttacaccgactaccgagtggggacagccctcccgggtaagtttaagatcgtcctggattctgacgccgccgagtacggagggcatcagcgcctagaccattctacagattttttctcggaagcctttgagcataacgggaggccttatagtctgcttgtgtacataccttcacgtgtagctttgatcctgcaaaatgtggatctgcccaac

SEQ ID NO: 12813 - DNA, 2106 bp, synthetic construct
  misc_feature 1..2106: note = source = /note="Description of Artificial Sequence: Synthetic coding sequence"
  source 1..2106: mol_type = other DNA
atggcggctcctatgacaccagcagctcggcccgaggattatgaggctgctctcaacgcagcgctcgccgatgtcccagagctggccagactcctcgagatcgacccttatctgaagccgtacgccgtagactttcagagaaggtataagcagttcagtcagatcctaaagaatatcggcgagaacgaaggagggatcgacaaatttagccgcggctatgagagctttggtgtccaccgatgtgctgacggaggcctgtactgcaaagaatgggcccctggcgctgagggtgtctttctcacaggggacttcaacggatggaacccctttagctatccctacaagaagctggactatgggaaatgggagttgtatatcccacctaaacagaataaaagtgtacttgtccctcacggaagcaagctgaaagtagtgatcacaagtaaatctggagaaatattgtacagaatcagcccttgggccaagtatgtggtacgcgagggcgacaacgtgaattatgattggatacactgggatcctgagcactcgtacgagtttaagcattcccgaccaaagaaacctcgcagcctaagaatctatgagtcacatgttggaatcagctcacacgagggcaaagtggcgtcctacaaacactttacttgcaacgtcctccctcgaattaaaggcctgggctataattgcatccaacttatggccataatggagcacgcctactacgcttcattcgggtaccagattacatcgttcttcgctgcctcttcaagatacggtacaccagaagagctccaggagcttgttgataccgcccacagcatgggaataattgtattgcttgacgtggtgcatagccacgccagcaagaattcagcggatggcctaaatatgttcgacggaaccgactcttgctatttccactctgggcccaggggtacacacgacctctgggattctcggttgtttgcctattctagttgggagatcctgaggtttctgctcagtaatataagatggtggcttgaggagtaccgttttgacgggttcagatttgacggggtgactagtatgttatatcaccatcacggggtggggcagggcttctccggggactacagtgaatactttggattacaagtggatgaggatgcactgacctacctaatgcttgccaatcacttagttcacacactgtgtccagattcaatcaccattgcagaggatgtgtcagggatgcccgccctgtgttcccctataagccaggggggcggcggttttgactatcgcttggccatggctattcccgataagtggatacagctcctgaaggagttcaaggacgaggattggaatatgggggacatcgtctacaccctcacaaaccggcgctacttagaaaagtgcattgcttatgcggaatcccacgatcaggcactcgtcggtgataagagcctggccttttggctaatggatgccgaaatgtatacaaacatgtctgtgttgactccctttaccccagtgatcgatagaggcattcaactgcacaagatgatccgtctgatcacacacggcctgggaggggaaggttacctgaattttatgggcaacgaatttggccatcctgagtggttggacttccctcgtaagggtaacaatgaaagctatcattacgcacgccggcaatttcacctcaccgacgacgatctgcttcggtacaaattcctgaataattttgatcgggatatgaacaggctagaggagcgctacggatggctggctgcaccccaggcttatgtgtccgaaaaacacgagggcaacaaaatcatcgccttcgaacgcgccggcctcctttttatctttaattttcacccaagtaagagttatacagattatcgcgttggtaccgcactacccggcaagtttaagattgtcctggactctgacgctgccgagtatggtggacaccagcgactcgaccactctactgacttcttcagcgaagcatttgagcacaatgggaggccgtactcgctcctggtctacattccatcaagagtggcgctcatactgcagaatgtcgatctcccgaac

SEQ ID NO: 12814 - DNA, 2106 bp, synthetic construct
  misc_feature 1..2106: note = source = /note="Description of Artificial Sequence: Synthetic coding sequence"
  source 1..2106: mol_type = other DNA
atggcagcccctatgacccccgctgcccggcccgaggactatgaagctgccctcaatgccgccctggctgatgttcctgaactagcccgattactggaaatcgatccctacctgaagccctacgccgttgacttccagaggcgatacaaacagttttctcaaatactgaagaatattggagaaaacgagggcgggatcgacaaattttcccgaggctatgaatcctttggcgtgcacagatgcgctgacggcggactgtattgcaaggagtgggccccaggcgctgaaggcgtcttcctgaccggtgattttaatggctggaaccctttctcctacccatacaagaaattagactacggaaagtgggaactttatatacctcctaaacagaacaaatcagtcctggtgcctcacggaagcaagctgaaggtggtcattaccagtaaaagtggggaaatactgtatcgcatatctccatgggctaagtatgtcgtccgtgaaggagacaacgtaaactatgactggatccattgggacccagaacatagctatgaattcaaacactctcggcccaagaagcctaggagtctccggatctacgagtcccacgtgggcatcagcagccacgaagggaaagttgccagttataaacactttacatgtaatgtcctaccccgcataaagggtctgggctataactgcatccagttaatggccatcatggagcacgcatactatgcttcatttggctatcagattacttcctttttcgccgcatcctcccggtatggaacccctgaggagctacaggaactggttgataccgctcactcaatgggcatcattgtgctgctagacgtggttcatagccacgccagcaagaacagtgctgatggcctcaatatgtttgacggtacagactcttgttactttcactctgggccccgcgggacacatgatctgtgggattctcgcctgttcgcctattcaagttgggaaatcctgagattcctcctgtccaatattcgctggtggctcgaggaatatcgtttcgatggctttcggttcgacggggtgaccagcatgctctatcaccaccatggggttggccagggcttttccggcgactatagcgagtatttcggtctgcaagtggacgaagatgccttaacttatctaatgctggcaaatcatctggtgcacacactatgccctgactctataactatagccgaggatgtgagcggtatgcccgctttgtgtagcccaatcagccagggaggaggaggtttcgactaccgcctcgccatggctatccctgacaagtggattcaactgctgaaggaattcaaggacgaagattggaatatgggcgacatcgtctacactctgactaaccgcaggtacctggagaagtgtatcgcctatgcagaaagccacgatcaggccctggttggcgataagagcctggctttctggctaatggatgccgagatgtataccaacatgagtgtgctgaccccatttaccccagtgatagataggggtatccaactccataaaatgatcagacttataacacatgggctgggcggggaggggtacctaaatttcatgggtaatgagtttggccatcctgaatggcttgacttcccccgaaagggcaataacgaatcttaccactacgccaggcgccagtttcacctcactgatgacgatctgctaagatataagttcctcaataattttgacagggacatgaatcgcttagaagaacgttatggatggctagccgctccacaagcttatgtgagcgaaaagcatgagggcaataaaataattgcctttgagcgagctggtctgctgtttatcttcaatttccaccctagcaagtcctacactgactatcgtgtgggaaccgctttacccgggaagttcaaaatagttctggatagcgatgctgctgagtacggcggccaccagcggctggatcattcaaccgattttttctccgaggcatttgaacataatggtcggccatacagcctgctagtgtacattcctagtagagtggcattgatactgcagaacgtagacctaccaaat

SEQ ID NO: 12815 - DNA, 2106 bp, synthetic construct
  misc_feature 1..2106: note = source = /note="Description of Artificial Sequence: Synthetic coding sequence"
  source 1..2106: mol_type = other DNA
atggcggctcctatgacacctgcggcgcggccggaagattacgaagctgctcttaacgccgcgttggcggatgttcctgaactagcaagacttcttgaaattgacccatatttgaagccatatgcggttgattttcagcgaaggtacaaacaattttctcaaatcctgaagaatatcggtgaaaatgaaggaggtattgataagttttctcgaggatatgaaagtttcggcgttcatcgctgcgcggatggcggactgtattgcaaagagtgggcccccggcgcggagggtgtgttcctgactggcgacttcaatggttggaatccattttcttatccatataaaaagcttgattatggcaagtgggaattatacattccgccgaagcagaacaaatcggtcctcgtgccgcacgggtcaaaactcaaagtcgtaattacatccaaatcgggggagatcttatatcgaatctcaccttgggcaaaatatgtagttcgtgaaggggataatgtcaattatgattggattcattgggacccggaacatagctatgaatttaaacactcgcggccaaagaaaccgagatccttacgcatttatgagtcgcatgttggaatctcttcccatgaaggaaaagtggcctcctataaacatttcacatgcaacgtgctgccgcgaatcaaaggcttaggctacaattgcattcaacttatggcaattatggagcatgcctactacgcttcttttggctaccagattacaagcttctttgccgctagctctagatacggcacaccagaagagttacaggaactggttgacactgctcacagcatgggcatcattgtgttacttgatgtcgtgcactcgcacgcaagtaaaaactctgcagatggcctgaacatgtttgacggaacggacagttgctactttcattcaggaccccgaggcacccacgatttgtgggattcacgtttatttgcttacagcagctgggaaattcttagatttctcttatcgaacatcaggtggtggttggaagagtaccgctttgacggattcaggttcgacggagttactagcatgctctaccatcaccatggagtcggtcagggttttagcggcgattattcagaatattttggccttcaggtggatgaggacgctcttacatatctgatgctggcaaaccatttggtacatacgttatgtccagattcgattactattgcagaagacgttagcggtatgcctgcattatgtagcccgatttcgcagggcggcggaggtttcgattaccgcctcgcgatggcgattcccgataaatggattcagttacttaaagagtttaaggacgaagattggaacatgggcgacatcgtatacacattaacgaatagaagatatctggaaaagtgcatagcgtatgcagagtcccacgaccaggctttggttggagacaaaagcctggctttttggcttatggatgcagagatgtacacaaacatgagcgtgcttacgccgtttacaccggtaatcgatcgcgggattcagttgcataagatgatccgcttaatcacacatggccttggcggggagggttacctaaactttatggggaatgaattcggtcacccggaatggcttgactttccgcgcaaggggaacaatgagagctaccattatgcccggcgccagtttcaccttaccgatgatgaccttttaagatacaaatttttgaacaatttcgaccgtgacatgaatcggctggaagagcgctatggatggcttgctgctcctcaggcctacgtttccgaaaaacatgaaggtaacaaaataattgcgtttgaaagagcaggccttcttttcatctttaatttccatccatctaaatcatacacggattaccgtgtcggcaccgcgttgcccggcaaattcaaaatcgtgctggacagtgacgcagccgaatacggcggacatcaacgcttggaccatagcacagattttttttctgaggcgttcgaacacaatggccgtccgtatagtctccttgtttatattccttccagagtagcgcttatccttcagaacgtggatctgccgaat

SEQ ID NO: 12816 - DNA, 2106 bp, synthetic construct
  misc_feature 1..2106: note = source = /note="Description of Artificial Sequence: Synthetic coding sequence"
  source 1..2106: mol_type = other DNA
atggccgcccccatgactccagcggccagaccggaggattatgaagctgccctcaacgctgccctggctgacgtcccagaactggcaaggcttctggaaattgacccctatctgaaaccctacgcagtggactttcaaagaagatacaagcaattttctcagattcttaaaaacatcggagaaaatgagggaggcatagacaagttcagcagaggctacgaatcattcggcgtacataggtgcgccgacggcggattgtattgtaaggagtgggctcccggtgctgagggagtgttcttgacgggagatttcaacggctggaacccgttctcttacccctataagaagctggactacggcaagtgggaactgtatattccccccaagcaaaataaatcagtgctggtgccccacggttccaagcttaaggtcgtgatcacgtccaagtcaggcgaaatcctctacagaatcagcccctgggccaagtatgtagtccgcgaaggcgacaacgtcaattatgattggattcattgggaccctgagcattcctatgaattcaagcacagcaggccaaagaagcctaggtctctccgcatctacgagtctcacgttggcatcagcagccacgagggcaaagtcgctagttacaaacactttacgtgcaacgtgttgcctcgcattaagggcctgggctacaactgtatacagcttatggccattatggagcacgcctactacgcatcattcggatatcaaatcaccagcttttttgcggcatcatctaggtacggcactccagaggagttgcaagagctcgtcgataccgcgcactctatgggaatcattgttctccttgacgtggtgcatagccacgcaagcaaaaactctgccgacggtctcaacatgttcgacggtactgactcctgctactttcactccggcccccgcggaacacacgatttgtgggatagcagactgttcgcttactccagctgggagatcttgaggttcctcctcagtaacattcgctggtggcttgaagagtacagattcgacggctttaggttcgatggcgttacctctatgctgtatcatcatcacggcgtaggtcaaggattcagtggcgactatagtgagtactttggattgcaagtggacgaagatgcgctgacatacttgatgctggctaatcatctggttcataccctctgtcctgattcaatcaccattgcagaggatgtatccggaatgccagctttgtgcagcccaatctctcagggcggaggtggctttgactatagactggcgatggccattccagataaatggatccagctgcttaaggaatttaaggacgaggattggaacatgggagatatcgtgtacactcttacaaataggaggtacctggaaaaatgtatcgcttacgctgaatctcacgaccaggccttggtaggagacaagtcactcgccttctggctcatggacgccgaaatgtataccaacatgagtgtgttgactccctttacaccggtgatcgacaggggaattcagctccacaagatgatcaggctgataacccatggcctcggtggagaaggataccttaacttcatgggaaatgagttcggccacccggagtggctcgatttccctcgcaagggtaacaatgaatcctaccattacgcgcgccgccaatttcacctgactgacgacgatctgctgcgctacaagtttctcaacaactttgacagagatatgaacaggctcgaagagcgctacggctggctcgccgcaccccaggcatacgtgagcgagaagcacgagggcaacaaaattattgctttcgaacgcgctggcctccttttcatcttcaatttccatccgtccaaatcatataccgattaccgcgtaggcacggcgctcccaggcaagttcaagatcgtgctcgactctgacgcggccgagtatggaggccatcagagactcgatcatagcacagacttcttctccgaggccttcgagcacaacggcagaccctatagtctcttggtgtatatcccctctagagttgctctcatactgcaaaacgtggaccttcctaac

SEQ ID NO: 12817 - DNA, 2106 bp, synthetic construct
  misc_feature 1..2106: note = source = /note="Description of Artificial Sequence: Synthetic coding sequence"
  source 1..2106: mol_type = other DNA
atggcagcgccaatgactccggctgctcgccctgaagattacgaggcggccctgaacgccgctcttgccgatgttcccgaactagctcgcctcctcgagatcgacccctacctgaaaccgtatgccgtggactttcagaggcgttataaacagttcagccagattctaaagaacatcggcgagaacgagggcggtatcgataagttcagccgaggctacgaatcctttggagtgcaccgctgcgctgatggagggctatattgcaaggagtgggcgccaggtgccgagggcgtgtttcttaccggtgacttcaatgggtggaatcccttcagttatccttataaaaagttggactacggtaagtgggaactgtatatcccccctaaacaaaataagtccgtgctagtgccccacggcagtaagttgaaggtggtcattacttctaaatcaggcgaaatcctgtacagaatatccccatgggccaagtacgtcgttcgagaaggcgataacgtaaattatgattggatccactgggaccccgaacattcttacgaattcaagcatagcagaccaaagaagccccgttctctccggatctacgagtcacacgtgggaatatcctcacatgaggggaaggtcgccagttacaagcacttcacctgcaatgttctgcccaggataaaggggctggggtataactgcatccagctcatggcaataatggagcacgcctactacgccagcttcggctaccagatcacttcgttcttcgctgcctcttccaggtatggtactcccgaggaactgcaggaactggtggatacggctcattcgatgggcattattgtgttgctggacgtggtgcattctcatgccagcaagaactccgctgatgggcttaacatgttcgacggcacagattcctgttattttcacagcggcccacgaggcactcacgacctatgggacagccgactgttcgcttattcgagctgggagatcctgcgatttctgcttagtaacatccgttggtggctcgaggaataccgctttgacggtttccgctttgacggcgtgacctcgatgctataccaccatcacggcgtggggcagggcttctccggagattactccgagtacttcggtctgcaagtggacgaggatgcattgacctacctgatgttagcaaaccacctcgtccacacgttatgccctgactcaattaccatcgctgaggatgtctcagggatgccagccctgtgttctcccatcagccagggaggaggaggttttgattacagactggccatggccattcccgataaatggattcaactcctcaaggagttcaaagacgaggattggaacatgggtgatattgtgtacactctgactaaccgcagatacttagagaaatgcattgcatatgcagaaagccatgatcaggctttagttggggacaaatctctggccttttggctcatggacgcggaaatgtacactaacatgtccgtactgactccattcacccccgtgatcgatcggggtatccagcttcacaagatgatcagactgatcacacacgggcttggtggcgaggggtacctgaatttcatgggaaacgagttcgggcatccagagtggctcgattttcctcgaaaagggaataatgaatcttatcattacgccagaagacaattccatttgacagacgacgatctgctaaggtataagtttctgaacaactttgaccgggatatgaatcgcctcgaggagaggtacgggtggctggctgctccccaggcttatgtaagtgagaagcatgagggcaataaaataatcgcctttgaaagggccgggcttcttttcatctttaacttccatccatctaaatcctacacggactacagggtgggcacggcattgccagggaagttcaagatcgtcctggattcagacgcagccgaatacggagggcatcaaaggctggaccactccacagacttcttttccgaagccttcgaacacaacgggcggccatacagtctgctggtttacattccttcgcgggtggcactgatcttgcagaatgtcgacctgccaaac

SEQ ID NO: 12818 - DNA, 2106 bp, synthetic construct
  misc_feature 1..2106: note = source = /note="Description of Artificial Sequence: Synthetic coding sequence"
  source 1..2106: mol_type = other DNA
atggccgcccctatgactcccgccgcccgccctgaggattatgaggccgctctcaacgctgccctcgcagatgtgcctgaacttgcaaggctgctggaaattgacccctatctaaaaccttatgctgtggatttccagcggcggtataaacaattctctcaaatcctcaaaaatattggggaaaatgaaggagggatagacaaattctcacgcgggtatgaaagtttcggagttcatagatgcgctgacgggggactgtattgtaaagagtgggcccctggagcagaaggagtctttttgacaggggatttcaacgggtggaaccccttctcttacccctataaaaaactagattacgggaagtgggaactctatatcccgcccaaacagaacaagtccgttcttgtaccccacgggtcaaagctgaaagtcgtcattacatctaaaagtggagaaatcctttatcgcatatcaccctgggcaaaatacgttgtcagggaaggagataacgttaattatgattggatccactgggatcccgagcattcctacgaattcaaacattctcgccctaaaaaacctaggtcccttagaatctacgagagtcatgttgggatatctagtcatgaaggaaaagtagcttcctataaacactttacttgtaatgttctccctagaatcaaaggactcggatataactgtatccagttaatggccataatggaacatgcttactatgcttccttcgggtatcagatcacttccttctttgcagcctcaagtcggtatgggactcccgaagaactccaggaactggttgatacagcacatagtatgggaataattgtactcctcgatgtggtacattctcacgcaagtaaaaacagtgccgacgggcttaacatgtttgacggaacagattcttgttattttcactctgggccccgcgggactcatgatctgtgggattcacgcctcttcgcctactcttcatgggaaatattacgattcctactgtctaatatcaggtggtggctggaagaatacagattcgatggatttaggttcgatggagtaacatctatgttgtatcatcaccatggggtgggacagggattctcaggggattactccgaatacttcggactgcaggtcgatgaagatgcattaacatatctgatgctcgcaaatcatctggtgcacacactttgtccagattccatcactatagctgaagatgtgtctggaatgcccgcactgtgctctcccatttcgcaaggaggaggggggtttgactaccggcttgcaatggctataccagataaatggattcagctcctgaaagaatttaaagacgaagactggaatatgggggatatcgtttacacattgactaatcggagatatctggaaaagtgcatagcatacgctgagtctcatgatcaggcgctggtgggagataaatcactcgcattttggcttatggatgccgaaatgtacactaatatgtcggtgcttacaccctttactcccgtaatcgacagagggatacagttacataaaatgattcgcttaatcacacatgggctgggaggagaagggtatcttaatttcatggggaacgaatttgggcaccctgaatggctcgacttcccaagaaaagggaataatgaatcttatcattatgcacggagacagttccacctgacagatgatgacctgcttcggtacaagtttctcaataatttcgatcgagatatgaatcgactcgaagaacgttatgggtggctagcagctcctcaggcatacgtgtctgaaaaacacgaaggaaataaaatcatcgcttttgaacgggccgggctactcttcatattcaacttccatccctccaaatcttatactgattacagagtcggaacagctctaccgggaaaattcaaaatcgtgctagatagtgatgcagctgaatatggggggcatcagagactggaccacagtactgatttcttttcggaagcttttgaacacaacggaaggccatactcattgctcgtgtatatcccctcaagggtggcattaatcctgcagaacgtcgacctcccaaat

SEQ ID NO: 12819 - DNA, 2106 bp, synthetic construct
  misc_feature 1..2106: note = source = /note="Description of Artificial Sequence: Synthetic coding sequence"
  source 1..2106: mol_type = other DNA
atggccgcccctatgaccccagctgcacgcccggaagactacgaagctgccttgaacgcagccctcgcggacgtacccgagctggcacggcttctggagattgatccttacctgaaaccgtatgccgtagactttcagcgccggtataagcagttttcccagatacttaagaacatcggagagaatgaggggggtatcgataaattctcaagagggtatgagtcattcggggtgcaccgctgtgccgacggggggctgtattgtaaggagtgggcgccaggcgcggaaggagtgtttctgacaggagatttcaatggatggaaccctttctcttatccgtacaagaagttggattatggcaagtgggagctgtatatcccccccaagcaaaacaaatctgtcttggtgccacatggatctaagcttaaggtggtgattacctccaaatcaggcgaaatcctctacagaataagtccttgggccaaatacgttgtgcgggagggggataatgtcaactacgattggatccattgggaccccgaacacagctatgagtttaaacacagcaggcctaagaaaccgcgctctttgcggatctacgagagtcatgtcggcatctcctcacacgagggcaaagtggcatcatacaagcattttacgtgtaatgtgctccctagaatcaagggcctgggttataactgcatccagttgatggcgatcatggagcatgcttattacgcttcattcggctaccagattaccagttttttcgcagcctcctcacggtacggaacacccgaggagcttcaggaactggtcgatacggctcacagtatgggcattatcgtgctgctggatgtagtccacagtcacgccagcaagaacagcgccgacggcctcaatatgttcgatggtactgacagctgttactttcatagtggcccacgcggaacccatgatttgtgggactcccgcctgttcgcatatagcagctgggaaatcctgagattcctgttgagtaacattaggtggtggctggaagagtaccgattcgacggattcaggtttgacggagtcaccagcatgctgtaccatcaccacggggtgggacagggtttctccggggactattctgaatattttgggctgcaggtcgatgaagatgccctgacttatctcatgctcgccaatcatttggtgcacacactctgccctgattcaattacaatcgccgaggacgtgtcaggcatgcccgccctgtgtagccccatcagtcagggcggtggaggatttgactaccgcctggcaatggctattcccgataaatggattcagttgctgaaagagttcaaagacgaggattggaatatgggcgatatcgtatatactctgacaaacagacgatatctggaaaagtgcatcgcgtacgccgaaagtcacgaccaggcgttggtaggcgataagagccttgcattttggctcatggatgccgaaatgtacactaacatgagtgtgttgactccatttactcctgtcatagataggggcattcagctgcataaaatgatccggctcatcacccacggcctgggaggcgagggttaccttaacttcatgggtaatgagttcgggcaccccgaatggttggacttcccacgcaaaggtaacaacgagtcatatcactacgcccggagacagtttcacctgaccgacgatgacttgcttagatataagtttctgaacaattttgaccgggatatgaacagattggaagagaggtacggttggctggcggccccccaggcttatgtgagcgagaaacatgagggaaataagatcatcgcatttgagagagctgggttgctctttatcttcaactttcatccatctaaatcttacaccgactatcgcgtggggacagcacttcctgggaagtttaagatcgtcctggacagtgatgccgcagagtacggaggccatcagcggttggaccactccacagatttctttagcgaagctttcgagcacaacggcaggccatatagcctgctcgtgtatattccgtctagggtggctctcatacttcagaacgtggacctccccaac

SEQ ID NO: 12820 - DNA, 2106 bp, synthetic construct
  misc_feature 1..2106: note = source = /note="Description of Artificial Sequence: Synthetic coding sequence"
  source 1..2106: mol_type = other DNA
atggcagctccgatgacaccagccgcacgacctgaagactacgaggccgccctgaacgcagcgttagctgacgtgcccgagctggcacgtctgctcgagattgatccctatctcaaaccttacgcagtcgattttcagcgcagatataaacaattctcccagattctgaaaaatataggcgaaaatgaaggtggaatcgataagtttagcagagggtatgagtcttttggcgttcatcggtgtgcggatggtggcctctattgtaaagaatgggcccccggggcggaaggcgtatttctgaccggcgattttaacggttggaaccctttttcctacccatataaaaaattggattacgggaaatgggagctgtatattccaccaaaacaaaacaaaagtgttttggtgccacacggatctaagttgaaagtggtgataacttcaaaatcaggcgagatcctgtacagaataagtccatgggccaagtacgtggttcgcgagggggacaatgtcaattatgactggatccattgggatccagagcactcctatgaatttaagcacagcaggcccaagaagccacggagcctcagaatttatgagagtcacgttgggatctcttcgcatgaaggcaaggtcgcatcttacaaacacttcacgtgcaatgtgttgcctcgaattaagggcctgggctacaattgcatccagcttatggccataatggagcacgcttactacgcctctttcggataccagattaccagttttttcgctgcgagttcacggtacggcactcccgaagaacttcaggagctggtggacaccgcccattcaatgggcatcatcgtgctgttggatgtggtgcactcgcacgcttctaaaaactccgctgatggcctgaatatgttcgatggaaccgattcttgctactttcatagtgggccgagggggacccacgacctgtgggatagcaggctgtttgcctattctagctgggaaatcctgaggtttttgctttccaacattcggtggtggctcgaggagtatcggttcgatggcttcagatttgacggtgtcacgtccatgttgtatcaccaccacggggtggggcagggattcagtggcgattacagcgagtattttgggcttcaggtagacgaggatgccctgacatatctaatgctggctaatcatcttgtgcacacactttgcccagactccatcactatcgccgaagacgtgtcgggaatgcctgccctgtgctccccgatcagccagggcgggggcggttttgactacaggctggctatggcaatcccagacaagtggatacagctgctgaaagagttcaaggacgaggactggaatatgggtgatatcgtatatactctgactaatcgacgctatctggaaaagtgcattgcttacgcagagtcacacgatcaggctctcgtaggtgataaatctctggccttctggctcatggacgctgagatgtatactaatatgtccgtccttacgccattcacccccgtaatcgaccgtgggatccagttacataagatgatcagactcatcacccatggtctggggggcgagggctatctgaatttcatggggaatgagttcggccacccagagtggttggatttccccagaaaggggaacaacgagagttaccactacgcccgtcggcagttccacctcaccgatgatgatcttttaaggtataagtttcttaataattttgatagagacatgaatcggttggaggagcgctatggctggctggctgcaccccaggcgtacgtatcagagaaacacgagggaaacaaaatcatcgcctttgagcgcgctggcttgctgttcattttcaactttcacccctcgaagagctataccgactacagagtgggcactgccttacctggcaagtttaaaatcgttcttgatagtgatgccgccgagtacggtggccatcagcggctcgaccatagtactgacttcttttctgaggcctttgagcacaatggtagaccttactcactgttagtgtacattccatccagggtggcattgattctccaaaacgttgatctgccgaac

SEQ ID NO: 12821 - DNA, 2106 bp, synthetic construct
  misc_feature 1..2106: note = source = /note="Description of Artificial Sequence: Synthetic coding sequence"
  source 1..2106: mol_type = other DNA
atggccgcacccatgactccggctgctcgacctgaggactacgaggccgccctgaacgctgccctggctgatgttccagagctggcccgcctgcttgagattgatccctacctgaagccttacgctgtggactttcagagacgctacaaacaattttctcagatcttgaagaatatcggagagaatgagggaggaatcgacaagttcagccgcggatacgagtctttcggtgtgcacaggtgtgcagatggcgggctgtactgcaaggagtgggccccgggtgctgagggtgtatttctgactggcgattttaacggatggaatcccttcagttacccatacaagaaactggattacggaaagtgggaactctatattccgcccaagcagaacaagtctgtgttggtgccacacggaagtaaattgaaggtggtgatcacatctaagagtggggaaatcctgtatcgcattagcccctgggctaagtacgtggtacgagaaggggacaacgtgaattacgattggatccattgggatccagaacacagctacgagttcaaacacagtcggcccaaaaagccccgctcactgcggatctacgaaagccatgtggggatctcaagtcatgaggggaaagtcgccagttacaaacattttacttgtaacgtactgccccggatcaaaggcttgggatacaattgcatccagttgatggctatcatggagcatgcctattacgcttcctttggctatcagattactagtttcttcgccgctagttccaggtacgggacccctgaggagctgcaagagttggtggatacggcccactctatgggaattatagtgctgctggatgtggtgcatagccacgcgtccaagaattcagccgacgggcttaacatgtttgatggcaccgatagctgctattttcatagcggcccgcgcgggacacatgatctctgggattctagactgtttgcctacagtagttgggagatcctcagatttctcctgagcaacattagatggtggctggaggagtacagatttgacggattcaggttcgatggggttacatccatgctttatcaccaccacggagtcggacaagggttctccggcgattacagcgagtattttgggctccaggtggacgaagacgctttgacatacctcatgctggctaaccacctggtccatactctttgtccagattccatcaccattgccgaagatgtgtccggcatgcccgctctctgttcacccatttcccagggcgggggcggctttgattacagactcgcaatggctattcctgacaaatggattcagctgctcaaggagtttaaagatgaagattggaatatgggagatattgtgtataccctgacaaacagacggtatctggagaagtgcatagcatatgccgagagccatgatcaggccttggtgggtgataagtccctggccttctggctcatggacgcagagatgtatacgaatatgagtgtgctgacacctttcacaccagtcatcgatagggggatccagctgcacaagatgataaggcttattacgcatggcttgggcggcgaggggtatttgaatttcatgggcaacgaattcgggcaccctgagtggctcgattttccccgaaagggaaataatgagtcataccactacgcccgcagacaattccatctgacagatgacgatctcctgcgatataagttccttaataatttcgaccgcgacatgaacaggctcgaggagcgctatggatggctggccgctccacaggcttatgtgtctgagaagcacgaaggcaacaagatcattgcatttgagagggcgggacttctttttatcttcaactttcatccgtcaaaatcttacactgattatagagtcggaaccgctcttccaggcaagtttaagatcgttcttgattccgatgcagccgagtatggcggacaccagcgactcgaccactctaccgatttcttcagcgaagccttcgagcacaacggacggccttactcactcttggtgtacattccttccagggtggctctcatcctgcaaaacgtggatctccccaat

SEQ ID NO: 12822 - DNA, 2106 bp, synthetic construct
  misc_feature 1..2106: note = source = /note="Description of Artificial Sequence: Synthetic coding sequence"
  source 1..2106: mol_type = other DNA
atggccgcccctatgactccagccgccagacctgaagactacgaggcggccctgaatgcagctcttgccgacgtgccagagctcgcgcggctcctagaaattgatccatacctaaaaccctatgccgtggacttccaacgcagatacaaacagttctcccagatcctcaaaaatattggagagaatgagggcggaatagacaaattctccagagggtatgaatctttcggcgtgcatcgctgcgccgacggcgggctgtattgcaaggagtgggcacctggcgctgaaggagtgtttctgactggcgatttcaatggatggaatcctttttcctatccatacaagaaactggattatggaaaatgggagctgtatatcccaccaaaacagaataagtcagtgcttgtcccgcacggctccaagctgaaggtagtaataacaagtaaatcaggggagattttatatcgtatttcgccctgggctaaatacgtggtccgggagggcgataatgtaaattatgactggatacactgggatccagaacactcttacgaattcaaacactccagaccaaaaaagccacgatctttaaggatctacgagtcccatgtgggtattagctcgcacgaagggaaggtggcctcctataaacacttcacctgcaatgtgttaccccgcattaaaggactgggatataactgtatccagctgatggctatcatggaacacgcgtattatgcttcattcggataccagattacatctttctttgctgcttcaagcagatatgggacccctgaagaactgcaggagctggttgacactgcacactccatgggcattattgtgttgctcgacgtggtgcacagccatgcatccaagaactccgccgatgggctgaatatgtttgacgggaccgatagctgttactttcactccggaccacgcgggacacatgatctctgggattctcgtcttttcgcctactctagctgggagatcctgcggtttctgctcagcaacatacggtggtggctggaagagtaccggttcgatgggttccgctttgatggagtaacatcgatgctgtaccatcatcatggtgtgggacaaggtttcagcggcgactactcagaatatttcggactgcaggtggacgaggacgcacttacctaccttatgctggcaaatcatctcgtgcatacactgtgccctgattccatcacaattgctgaagacgtgtcgggtatgccagccctgtgcagtccaatatcccaaggcggtggcggttttgattaccgcctggccatggctattcctgacaaatggatccaactcttgaaggagttcaaagatgaagattggaacatgggcgatatcgtctacacgcttacaaacaggcggtacctagagaaatgtatagcttacgccgagtcccatgaccaggcccttgttggcgataaatcgctggcattctggctgatggacgccgaaatgtacacaaacatgagcgtcttgactccttttaccccagttattgatagaggcattcagcttcataagatgatcagactgatcactcatgggcttggcggggagggttacctgaatttcatgggaaacgaattcgggcacccagaatggctggactttccacggaagggtaacaacgagagctatcactatgccaggcggcagtttcatctgacagacgacgatcttctgaggtataaatttctcaacaacttcgatcgggacatgaatagacttgaagaacgatatgggtggctcgcagcgccccaagcatatgtaagcgagaagcacgaaggcaataaaatcattgcatttgaaagggccggattactatttatcttcaattttcacccctctaaatcctacacagattaccgcgtcggtactgcgctccctggaaagtttaagattgtgctcgatagcgacgctgccgagtacgggggtcatcagcgtctcgaccatagcacggacttcttctccgaggcttttgagcataatgggcggccctacagtttgttagtttacattccatcgcgagttgccctcatcctgcagaacgttgatttacccaat

SEQ ID NO: 12823 - DNA, 2106 bp, synthetic construct
  misc_feature 1..2106: note = source = /note="Description of Artificial Sequence: Synthetic coding sequence"
  source 1..2106: mol_type = other DNA
atggccgcacctatgactccagccgcccggcctgaagattatgaggcagccctgaatgccgctctagcagacgttccagagttggctcgcttgcttgagatcgacccgtatttgaagccatacgccgtggacttccagcgccgatacaagcaattcagccagatcctgaagaacatcggcgagaatgaaggcggcatagataaattctcccgcggatatgaatcctttggagtccacaggtgtgctgacggtggcctgtactgtaaggagtgggccccaggagcggagggggtctttctgaccggcgattttaacggatggaatccctttagctacccctataaaaagttggattatggaaagtgggagctgtacattccccctaaacagaacaagtccgtcctggtgccacatggctctaagctgaaggtagtgattacatcaaagtctggagagattctttatcgcatttccccctgggctaaatacgtcgtgcgggaaggcgataacgtgaattatgactggatccattgggaccccgaacactcctacgaattcaagcatagcagacctaagaaaccccgcagcttgcgaatttacgaatcgcacgtgggcatttccagccacgaagggaaggtggccagttacaagcacttcacctgcaacgttcttcctcgcattaaagggttgggttacaactgcattcagctgatggccatcatggagcatgcctactacgcatcatttggctatcagattacctccttcttcgctgcaagctcccggtatggcacccctgaggaactgcaggaactggtggacaccgcccactcaatgggcattatcgtcctgctggacgtagtccactctcatgctagcaaaaacagcgcggacggcctcaacatgttcgatggcactgacagctgctactttcattcaggtccccggggcacgcacgacctgtgggattctagactgtttgcctatagctcatgggagattctgcggtttctgctatccaacatccgctggtggctggaagaataccgattcgatgggtttaggttcgacggggtgacttccatgctgtatcatcatcatggggtaggtcaagggttctccggtgactatagcgagtacttcggcttgcaagtggacgaagacgccctcacatacctgatgcttgccaaccacctggtgcataccctgtgtcctgactccattacgatagccgaggatgtgagtggaatgccagcactctgcagtccaatttctcagggcggaggcggctttgactatcggctcgccatggcaatccctgacaagtggatacagttgctcaaggaattcaaggacgaagattggaacatgggcgatatagtgtacaccttaaccaatcgcagatacttagaaaaatgcattgcctacgccgagagccatgatcaagctctcgttggggataagtctctggccttttggttaatggacgctgaaatgtataccaatatgagcgtacttacgcccttcacccccgtcatagatcgggggatccagcttcacaaaatgatcagactgataacccacggtttgggcggcgagggataccttaattttatgggtaacgagttcggtcacccggaatggcttgacttcccccggaaggggaataacgaaagttatcactacgcccgcaggcagtttcatctgaccgatgacgacctcctgcgctataagtttctcaataattttgatcgggatatgaaccggcttgaggagaggtacgggtggctggctgcaccgcaggcctacgtgagtgagaaacacgaaggcaataagatcattgcttttgaacgtgccggcttgctgtttattttcaatttccatccttccaaatcttataccgattacagagttggcactgctttacctggtaaatttaaaatcgtgctggacagtgacgccgcagagtacgggggacaccagaggttggaccactctacggatttcttctctgaggccttcgaacataacggcaggccctattcactacttgtgtatatccccagcagagttgccctcatactacagaatgtggatcttccaaac

SEQ ID NO: 12824 - DNA, 2106 bp, synthetic construct
  misc_feature 1..2106: note = source = /note="Description of Artificial Sequence: Synthetic coding sequence"
  source 1..2106: mol_type = other DNA
atggccgctcccatgacccccgctgcaagaccggaagattatgaggcagccctgaacgctgccctcgctgacgtgcctgagttggcccgactgctcgagatcgatccctacctgaagccttatgcagtagactttcagaggcgctacaagcagttttcccagattttaaagaatatcggggaaaatgaaggaggaattgataaattttctcggggctacgaaagctttggtgtgcaccgttgcgctgacggaggcctctactgtaaggagtgggctccaggcgcagagggtgtgttccttaccggcgatttcaacggatggaatcccttctcttacccttacaagaagctggactacggcaagtgggaactttacatcccccctaaacagaacaaatcagtgttggtcccgcacggatccaaactgaaagtggtgattaccagcaaatcgggagagattctttacaggatctcgccttgggccaaatacgtcgtccgggagggggataacgtgaattatgactggatccactgggatcctgagcattcctacgaattcaagcatagccgccccaagaagccacggtccctgcggatctatgagagtcacgtagggatctcatcccacgagggcaaagtggctagctacaagcattttacctgcaacgtactgccccgaataaagggcttgggatacaattgtatccagctcatggcaattatggagcacgcctactacgcgagtttcggctatcagatcacgagcttttttgccgctagctcccgatatggcacccccgaagagttgcaggaattggttgataccgctcacagcatgggcattattgtgctactcgatgtcgtgcattctcatgcctctaaaaactctgcggacggactgaatatgttcgacggcactgatagctgttatttccattctggcccgagaggtacgcatgacctatgggacagcaggctctttgcctacagctcgtgggaaatattgcgttttcttctttctaacataaggtggtggctggaggaatataggtttgacggcttccgatttgatggggtgacttccatgctgtaccaccatcacggtgtgggtcaaggattctctggcgactatagcgagtatttcggcctacaggtcgatgaagatgcgttgacttatctcatgttggctaaccaccttgtccatactttatgtcccgacagcattacaatcgcagaggacgtgagcggaatgccggcgctttgttctccaatttcacaaggaggaggaggattcgactaccggctggccatggcaatcccagacaagtggatccagctgcttaaagaattcaaggacgaagattggaatatgggagatatagtatacacactgacgaacagaaggtaccttgaaaagtgtatagcttatgcagaatcccatgaccaggccttagttggcgataagagtctcgctttttggctcatggacgccgaaatgtataccaacatgtcggttttaactccctttactcccgttatcgatcgcggaatccagcttcacaaaatgatccggttaattactcatgggctgggcggtgagggttatctgaacttcatgggaaacgaattcgggcaccctgagtggcttgacttccctagaaaaggaaacaacgaaagctaccattatgctcggagacagtttcatttgactgacgatgacttgctgcggtataagttcctgaacaacttcgaccgcgatatgaacaggctggaggagaggtatgggtggctggccgcaccccaggcgtatgtcagcgagaagcatgagggcaacaagattattgcgtttgagcgtgccggcctgctgtttattttcaatttccacccttcgaagtcctacacagactaccgggttggcactgcgctgcctgggaagtttaagattgtcttagactccgatgcagcggagtatggagggcatcagcgcttggaccatagcactgatttcttctctgaggcctttgaacacaacggaaggccttacagcctgctggtgtatatccctagccgagtcgcactaattctccaaaatgtcgatttgcctaac

SEQ ID NO: 12825 - DNA, 2106 bp, synthetic construct
  misc_feature 1..2106: note = source = /note="Description of Artificial Sequence: Synthetic coding sequence"
  source 1..2106: mol_type = other DNA
atggcggccccaatgactcctgccgcccgtcctgaggattacgaagctgcccttaacgccgcacttgccgacgttcccgagctggcaaggttgcttgagatcgatccttatttgaagccttatgccgtagatttccagagaagatataagcagttttcccagattctaaagaacattggagaaaatgagggaggcattgacaaattcagcagaggctatgagtcattcggtgtgcacaggtgtgccgatggcgggctctactgtaaagaatgggcgccaggagcagagggtgtattcttgaccggcgatttcaacggctggaaccctttctcgtatccatacaaaaagctggattacggtaagtgggaactttatattccacccaagcagaataagtccgtcctcgttcctcacgggagcaaattgaaagtcgtcattacttctaaaagcggcgagatactttatcgaataagtccatgggccaagtacgttgtccgagagggcgacaatgtcaattatgattggatacactgggaccctgaacattcttatgaatttaagcactcacgccccaaaaagccccgaagtctgaggatctacgagtcccatgtcggaatttcatcccacgaagggaaagtcgcctcttacaaacactttacctgcaacgttttaccaaggattaagggcctcggatataattgtatacagctcatggctatcatggagcacgcctactacgctagctttgggtaccaaataaccagtttctttgccgctagctctcgatacggcacacccgaagagctgcaagagctcgtggatacggcgcacagcatggggattatcgtgctgcttgacgtcgtgcatagccatgcttcgaaaaattcggcggatgggctgaacatgtttgacggcacagattcatgctattttcatagtggtcctaggggcactcatgatctgtgggactcaaggctttttgcatacagttcttgggaaatcctgcgttttctgctgtcaaacattagatggtggctcgaggagtataggtttgacggcttccgatttgatggcgtgaccagcatgctgtaccaccatcacggcgtcggccaaggatttagcggagactattccgaatacttcgggttacaagtagatgaggacgccctcacttatctcatgctggcgaaccacttagtgcacacattatgtcctgattcaataacaatcgctgaggacgtctctggtatgccagccctgtgctccccaataagccagggagggggcggttttgactacaggctggcaatggccatccctgacaagtggatacagcttctaaaagaatttaaggacgaagactggaatatgggagatattgtgtatacactgacaaaccgacgatatctggagaaatgcatagcttatgccgaaagccacgatcaggcgttagtaggcgacaagtctctggcattttggctgatggacgccgagatgtacacaaacatgtcagttcttactccattcacaccggtaattgatcgaggcatccaactgcacaagatgatccgactgattacccatggattggggggggagggctatctgaacttcatgggtaatgagttcgggcaccccgagtggctcgacttcccccgaaaagggaacaatgaatcataccactacgcacgaagacagttccacctgactgacgatgacctccttcgatataaatttctcaataactttgaccgagatatgaatcgtttagaagagaggtatggttggctggcggccccacaggcatacgtgtccgaaaagcatgaaggcaacaagatcatagccttcgagagagctggtttactatttatatttaattttcatccctccaaaagctacactgactaccgagtaggaacagcattgcctggaaagttcaaaatagtccttgattctgacgccgcagagtatggaggtcatcagcgactggatcatagcacagacttcttcagtgaagcatttgaacataacggccgcccttactctttgctggtttatatcccttctcgagttgccctcatcctgcagaacgtggatttaccgaac

SEQ ID NO: 12826 - DNA, 2106 bp, synthetic construct
  misc_feature 1..2106: note = source = /note="Description of Artificial Sequence: Synthetic coding sequence"
  source 1..2106: mol_type = other DNA
atggcggcgccgatgacgccggcggcgcgaccggaagattatgaagcggcgttaaatgcggcgctagcggatgtaccggaattagcgcgattattagaaatagatccgtatttaaaaccgtatgcggtagattttcaacgacgttataaacaattttcgcaaatactaaaaaatataggtgaaaatgaaggtggtatagataaattttcgcgtggttatgaatcgtttggtgtacatcgttgtgcggatggtggtttatattgtaaagaatgggcgccgggtgcggaaggtgtatttttaacgggtgattttaatggttggaatccgttttcgtatccgtataaaaaactagattatggtaaatgggaactatatataccgccgaaacaaaataaatcggtattagttccgcatggttcgaaactaaaagtagtaataacgtcgaaatcgggtgaaatactatatcgtatatcgccgtgggcgaaatatgttgtacgagaaggtgataatgtaaattatgattggatacattgggatccggaacattcgtatgaatttaaacattcgcgaccgaaaaaaccgcgatcgttacgaatatatgaatcgcatgtaggtatatcgtcgcatgaaggtaaagttgcgtcgtataaacattttacgtgtaatgtactaccgcgaataaaaggtttaggttataattgtatacaactaatggcgataatggaacatgcgtattatgcgtcgtttggttatcaaataacgtcgttttttgcggcgtcgtcgcgttatggtacgccggaagaactacaagaactagttgatacggcgcattcgatgggtataatagtactattagatgtagtacattcgcatgcgtcgaaaaattcggcggatggtttaaatatgtttgatggtacggattcgtgttattttcattcgggtccgcgaggtacgcatgatctatgggattcgcgtctatttgcgtattcgtcgtgggaaatactacgttttctattatcgaatatacgttggtggttagaagaatatcgttttgatggttttcgatttgatggtgtaacgtcgatgctatatcatcatcatggtgtaggtcaaggtttttcgggtgattattcggaatattttggtttacaagttgatgaagatgcgttaacgtatctaatgctagcgaatcatctagtacatacgttatgtccggattcgataacgatagcggaagatgtttcgggtatgccggcgttatgttcgccgatatcgcaaggtggtggtggttttgattatcgactagcgatggcgataccggataaatggatacaactattaaaagaatttaaagatgaagattggaatatgggtgatatagtttatacgttaacgaatcgacgttatttagaaaaatgtatagcgtatgcggaatcgcatgatcaagcgttagtaggtgataaatcgttagcgttttggctaatggatgcggaaatgtatacgaatatgtcggttttaacgccgtttacgccggttatagatcgtggtatacaactacataaaatgatacgattaataacgcatggtctaggtggtgaaggttatctaaattttatgggtaatgaatttggtcatccggaatggctagattttccgcgaaaaggtaataatgaatcgtatcattatgcgcgtcgacaatttcatttaacggatgatgatctactacgttataaatttttaaataattttgatcgtgatatgaatcgactagaagaacgatatggttggctagcggcgccgcaagcgtatgtatcggaaaaacatgaaggtaataaaataatagcgtttgaacgtgcgggtttactatttatatttaattttcatccgtcgaaatcgtatacggattatcgtgttggtacggcgctaccgggtaaatttaaaatagttttagattcggatgcggcggaatatggtggtcatcaacgactagatcattcgacggattttttttcggaagcgtttgaacataatggtcgaccgtattcgctattagtatatataccgtcgcgtgtagcgttaatactacaaaatgtagatctaccgaat

SEQ ID NO: 12827 - DNA, 2106 bp, synthetic construct
  misc_feature 1..2106: note = source = /note="Description of Artificial Sequence: Synthetic coding sequence"
  source 1..2106: mol_type = other DNA
atggccgccccaatgacccctgcagcccgccctgaggattatgaagccgccctaaacgcagccctggcagatgtccctgagctggcacgacttctagagattgacccatacctgaagccgtacgccgtggactttcagaggaggtacaaacagttctcccagattctgaagaacattggtgaaaatgagggaggaatcgacaagttcagtcgagggtatgaatcgttcggggtgcacaggtgtgctgacggcgggttgtattgtaaggaatgggcacctggcgccgagggagtgtttctgactggcgacttcaacgggtggaaccctttctcatacccgtataaaaagctcgactacgggaaatgggaactctacatcccccctaagcagaacaaatccgtgctcgtgccacacggctcgaagctcaaagtggtaatcacttccaaatcgggcgagattttgtatagaattagcccctgggctaaatatgtcgtacgtgagggtgataacgtgaactatgactggattcattgggatccagagcacagttacgaattcaaacattccagacctaaaaagccgaggtctctgcggatttacgagtctcacgtgggcatcagcagccacgagggcaaggtggcgagctataaacactttacttgtaacgtcttaccacgaatcaaaggcctcggatataactgcatccagcttatggccatcatggaacacgcatactacgctagcttcggataccagataacgagcttctttgccgccagctcccgctatggcaccccagaggagttgcaggagcttgtggatacagcacacagcatgggaatcatcgttctgctggatgtggtgcatagccatgcctctaaaaactctgcagatgggctgaacatgtttgatggcaccgactcatgctacttccactccggccctcgaggcactcacgacctgtgggatagccgactttttgcgtactcttcttgggaaattcttcgcttcctgctctcaaatatcagatggtggttggaagagtaccggttcgatggcttcagattcgatggagtcacctcgatgctttaccaccaccacggagtcggccaaggattctccggagactactccgagtacttcggcctccaagtagatgaggatgccctgacatacctgatgctagcaaatcacctcgtgcatactctctgtccagattcaattaccattgccgaggatgtgtcaggtatgccggctctttgctcccctatcagccagggtggtggaggttttgactatcgactcgcgatggccatcccagacaagtggattcagctgttgaaggaattcaaagacgaagattggaatatgggcgatatagtttacacattgacaaatcgcagatacctggagaaatgtatcgcttatgctgaatcccatgaccaggctctggtaggcgacaaatcactggccttttggttaatggacgccgaaatgtatacaaacatgtcggtcctgaccccctttaccccggtcatcgacagaggaatccagctgcacaaaatgatcaggttaataactcacggcctgggcggcgaaggctaccttaatttcatgggcaacgaattcggccatccggaatggctcgacttccccaggaaggggaataacgagagctaccactacgcccggagacagtttcatctcaccgatgacgatctgcttcgctataagttcctgaacaattttgacagggatatgaaccgcctggaagagagatatgggtggttggccgccccgcaggcttatgtgagcgagaagcacgaaggaaataagattattgcctttgagcgggcggggctgctgttcatctttaactttcatccctccaaaagttacacagactatagagtcggtacggccctgccaggaaagtttaaaattgtgttggactccgatgcagccgaatacggtgggcaccagaggctggaccatagcactgacttcttttcagaggcctttgagcacaatggccgaccctatagcctattggtgtacattccctctagagtcgcgcttatcctccaaaatgtggacttacccaat

SEQ ID NO: 12828 - DNA, 2106 bp, synthetic construct
  misc_feature 1..2106: note = source = /note="Description of Artificial Sequence: Synthetic coding sequence"
  source 1..2106: mol_type = other DNA
atggcagcccctatgacccctgccgctcgcccagaggattatgaagccgccctaaacgcggctcttgccgacgtccccgaactggcaaggctcctggagattgatccctatctgaaaccttacgccgtggactttcaaaggaggtacaaacagttttctcaaattctaaaaaacatcggcgagaatgagggcggtatagacaaattttcacggggctatgagtccttcggtgtccataggtgcgccgatggcggcctgtactgtaaagaatgggcgcctggggcagagggcgtctttctgacaggggacttcaacggctggaatcccttttcatatccctacaagaaattagactacggtaagtgggagctgtatatacctcctaaacagaacaaaagtgtgctggtccctcatgggtccaagctaaaagtcgtgatcacgtctaagtcaggggaaatcctttataggatctctccttgggccaagtatgtcgtcagagagggagacaatgttaactacgattggatccactgggaccccgaacactcctacgagttcaaacattctcgtcccaagaaacccaggtcgttgagaatttatgaatcccacgtgggaatctcctctcacgagggaaaggttgctagctacaagcacttcacctgtaatgttctcccaaggatcaaaggccttggttataactgcattcagctgatggcgatcatggaacacgcttattatgcatcttttggataccagattacttcattcttcgcagcaagctctcgttacggaacacccgaagagttgcaggaactggtggataccgcgcattcaatgggtatcatcgtgctgctagacgtagtccattcgcatgcgtccaagaactctgctgacggactgaatatgttcgatgggacagactcctgctactttcattctggccccagagggacccatgatctgtgggatagcagactgttcgcctactcctcctgggagattcttaggtttttgctgagcaacattaggtggtggcttgaagaataccgttttgatgggtttaggtttgatggtgtgaccagcatgctttaccatcatcatggagtggggcaaggcttcagtggtgactattctgagtactttggcctgcaggtggatgaggatgccctgacgtatctcatgctggccaatcatctggtgcatacgctttgtcccgattcaattaccatagcagaagatgtgagtggcatgcctgccctctgcagtccaatcagccaggggggagggggctttgactaccgcctggccatggccatcccagataaatggatccaactcttgaaagagttcaaagacgaggattggaatatgggagatatcgtttataccctcactaatagaagatacctggaaaagtgtattgcgtacgctgaatcacatgaccaggcactggtaggagataagtcactagctttttggcttatggatgctgaaatgtacaccaacatgtctgtgctgacccctttcacgccagtcatcgaccgcggcatccaattgcataaaatgatccgccttatcacccacgggctaggcggcgaagggtacctcaactttatgggcaatgaatttggtcaccctgaatggctagactttcccaggaaggggaacaacgaaagttaccactacgccaggcggcagtttcatctgacagatgatgatttgttgcgttacaagtttctaaacaactttgatagggatatgaaccggctggaggagagatacggctggctcgccgcccctcaggcatacgtttcagagaaacacgagggcaacaagataatagcatttgagcgggctggactactgttcatcttcaatttccaccctagcaaatcatacacagattatcgagttgggaccgcacttcccggcaagttcaagatagttctggactccgacgcagctgaatacggtggccatcaacggctcgaccactcaacagacttcttctccgaggcatttgagcataatggacgcccctactccctgctggtgtatataccatcacgcgtcgctttgatactgcagaatgtagatttacccaac

SEQ ID NO: 12829 - DNA, 2106 bp, synthetic construct
  misc_feature 1..2106: note = source = /note="Description of Artificial Sequence: Synthetic coding sequence"
  source 1..2106: mol_type = other DNA
atggcagcgcccatgacccccgctgcccgccctgaggactacgaggcagctcttaacgctgccttggcagatgtcccggaattagctagactattagagattgatccctatctgaagccctacgcggtggacttccagagacgctacaagcagttctcccagatactcaagaacatcggcgaaaatgagggaggcatagataagttctccagagggtatgaatcttttggcgttcatagatgcgcggatggcgggctgtattgcaaagagtgggctcccggagctgaaggcgtgtttctgacgggtgatttcaacggttggaatcccttcagctacccgtataagaagctggattatggtaagtgggaattgtatattccaccaaagcagaataagtcggtgctggtcccccacggcagcaagcttaaggtggtcattacatcaaaatccggagaaatcttgtatcggatcagtccatgggcaaaatatgtggtccgagaaggggacaacgtcaactacgactggattcactgggatcctgaacactcttacgaattcaagcactcacgccccaagaagccaagatcgctccgcatctacgagtcacatgtcgggatttcttcccacgaggggaaggtggcatcatacaaacactttacatgtaatgtgctccccagaatcaaaggactaggatataactgcatccaacttatggcgattatggagcacgcttattacgcatcattcgggtaccaaattacaagtttttttgccgcaagctcacgctacggcactcccgaagaactgcaggagttagtcgacacagcccattctatgggaatcatcgtgttacttgatgtggtccactctcacgcgagcaaaaatagtgccgatggactaaacatgtttgacgggacggactcctgctacttccatagtggtccacgcggaactcacgacttgtgggactctcggctcttcgcatactcaagttgggaaatcctcaggtttcttctctctaacatccgctggtggttggaggaatacaggttcgacggcttccgattcgacggggtcacctccatgctgtatcaccaccacggagttggacaggggttcagcggggactacagtgaatacttcggcctgcaggtcgatgaagacgccctcacctacttgatgcttgctaaccacctggtgcacactttatgccctgattctatcacgattgccgaggacgtttcgggtatgccagctctgtgtagtccgatttcccagggaggcggcggttttgactatcgtctagccatggccatccctgacaagtggattcagctgctgaaagaattcaaagatgaggattggaatatgggagacatcgtgtatacacttactaatagacgctatctggaaaaatgcatcgcctatgccgagagccacgaccaggccctcgttggagacaagagtcttgcattttggctgatggatgcagagatgtacacgaatatgagcgtcttgaccccattcacaccagttatcgataggggcatccagctgcataagatgatccgccttattactcatggcttaggcggagagggctaccttaacttcatgggcaatgagttcggacaccccgaatggttagatttcccacgaaagggaaacaacgagtcctatcattatgcacggagacagtttcacttaaccgatgacgacctcctgcgttacaaattcctcaacaacttcgacagagatatgaacaggttggaggagaggtacggctggctggctgctcctcaggcctacgtgtcagagaagcacgagggtaataaaattatcgccttcgaaagggctggtctgttgttcattttcaatttccatccctccaaatcttacacggattaccgtgttggcacggccttgcctggcaaatttaagatcgtgctcgacagtgacgccgctgaatacggagggcatcaaagactcgatcacagtacagacttcttttccgaggcattcgaacataatggcaggccctacagtctgctcgtttacataccctcccgggtagccctgattctgcagaatgtggacctccccaat

SEQ ID NO: 12830 - DNA, 2106 bp, synthetic construct
  misc_feature 1..2106: note = source = /note="Description of Artificial Sequence: Synthetic coding sequence"
  source 1..2106: mol_type = other DNA
atggctgctccgatgactccggctgcaagacccgaggactacgaagcagcacttaatgccgccctggcagatgtgcccgagttggctcggttgctcgagatcgatccctacctgaagccatacgctgtggactttcagcgcagatacaagcaattcagtcaaatcctaaaaaacattggtgaaaacgaaggcggcatcgataagttttcccgtggctatgagagctttggcgtccaccggtgtgctgacggaggcttgtactgcaaggagtgggcacccggagctgagggcgtgttcctgactggtgatttcaacggctggaaccctttctcttacccttacaaaaagctggactatggcaagtgggaactttacatcccccctaagcaaaataagagtgtgttagtccctcacggaagtaagcttaaggtggtgatcacctcaaaaagcggggagatactatacaggatctctccgtgggctaagtacgtggtacgagagggggataatgtcaactacgactggatacactgggatcctgagcactcttacgaatttaagcacagccggccaaaaaaacctcggtcactgagaatctacgaatcccacgtagggatcagttctcacgaaggaaaagtggcttcatacaagcactttacctgcaacgttctgccacggatcaaaggcctggggtacaactgcattcagttaatggccatcatggaacacgcctattacgcctcttttggctaccaaataacttcattcttcgccgcaagttcccgatacggcacccctgaggagctgcaagagctcgtcgatactgcgcatagtatgggaatcattgttctgttggacgtagtgcactcccatgcatccaagaactctgcagacggcctcaatatgtttgacggcaccgactcctgttactttcacagcggtcctagaggtactcatgatctgtgggacagtcggctgtttgcttactcctcttgggagatcttgcgattcctgctgtctaatatcagatggtggcttgaggaatacaggttcgacggatttcgattcgatggcgtgactagtatgctctaccaccaccacggggtaggacaggggttttcgggcgactactctgaatactttggtttgcaggtggacgaagacgcactaacttacctgatgttagccaaccacctagtgcacacattatgcccagacagtattactatcgctgaggacgtgtccggaatgccggccctgtgttcccctatctcccagggtggcgggggctttgactatcgacttgccatggccatccccgataagtggatccaactgctgaaagagtttaaggatgaagactggaatatgggcgacatcgtctatacattgacaaatagaaggtaccttgaaaaatgcattgcttacgcggagagtcatgatcaggctctggtcggcgataagtctttagcattctggctgatggatgcagagatgtacactaatatgagcgtgcttacgccttttaccccagtgatagacagggggatacaactgcacaagatgattcgactgataactcatggtctaggcggagagggttatctaaatttcatgggcaacgagtttggccacccagaatggctagactttcctcgtaaaggaaacaatgagtcctaccactacgccaggcgacaatttcacctgacagacgacgatttgctgcggtataaatttctcaacaattttgaccgggatatgaatcgcctggaggagagatacggttggctggccgcaccgcaggcctacgtaagcgagaaacatgagggaaataagattatagccttcgagcgggcgggtctcctttttatcttcaactttcatcctagtaagagttacacagattacagggtgggcactgcgctcccaggcaagttcaagatcgtgctggacagtgacgccgccgaatacggcggacaccagagactggatcattctactgatttcttctccgaagcctttgagcataatggacgcccttatagtcttctggtatatatcccctcacgagtggccctcatactgcagaacgtggacctccctaac

SEQ ID NO: 12831 - DNA, 2106 bp, synthetic construct
  misc_feature 1..2106: note = source = /note="Description of Artificial Sequence: Synthetic coding sequence"
  source 1..2106: mol_type = other DNA
atggctgcccctatgacccccgctgccagacccgaggattacgaggcagccctgaatgccgccctggccgatgtccccgagctggccaggctgcttgaaatcgatccgtacttgaaaccctatgcagtcgactttcaacggcgctacaagcagtttagccagatcctaaagaacatcggggaaaacgaagggggcattgacaagttctcacgcggatacgaaagttttggagttcatagatgcgccgatggtggactttattgcaaggagtgggcacctggcgcagaaggcgtatttctgacaggggattttaatggatggaatcccttctcatatccctataaaaagctggactatggcaaatgggaactgtatatcccccctaaacagaacaagtcagtgctcgtgccacacggctcaaaattaaaggtggtcatcacaagcaagtcgggagagatcctgtacagaatctcaccctgggcaaagtatgttgtccgggaaggagataacgtgaactatgattggatccactgggaccctgagcactcctacgagtttaagcacagcagacctaaaaagcctagaagtcttcggatctacgagtcacacgtgggaatctcgtctcatgagggaaaagtcgccagttacaaacatttcacttgtaacgtgcttccaaggataaaaggattaggttacaactgcatacagcttatggctatcatggaacacgcttattatgccagcttcgggtaccaaattacttccttttttgccgcctcttccaggtatgggactccagaggaactgcaggaattggttgacacagcccattccatgggcataatcgtgctgctcgacgttgtgcattcacacgcttccaaaaactccgcagacggacttaacatgttcgacgggactgacagctgttacttccactccggaccccgaggaacccatgacctgtgggactcccgcctctttgcttacagttcctgggaaattctccgattcttgctgtctaatatcagatggtggctggaggaatatcgctttgacggtttccgattcgacggggtgactagcatgctctatcaccaccacggcgtgggccagggtttcagcggagactactcggaatacttcgggcttcaggtcgatgaggacgccctgacctacctgatgttagccaaccacctggtgcacacactgtgtcctgacagtatcactatcgctgaggacgtctccggaatgcccgccctatgcagccccatctcccagggaggcggcgggtttgactaccgactggcaatggccatcccagacaagtggatccagctcctgaaggagtttaaagatgaggactggaatatgggagacatcgtgtatacactgaccaatcggcgctatctggagaagtgtatagcctatgccgaaagtcacgatcaggccctggtgggggacaaatctctggctttctggctgatggacgctgagatgtatacaaatatgagcgtcctgactcccttcacgcccgtaattgatcgagggatacagttgcacaagatgatacggctgattacccacgggttgggtggcgaaggctacctgaatttcatgggaaatgagttcggacatcctgaatggctggacttcccgagaaagggaaataatgaaagctaccactatgctcggagacaattccacctcacggacgatgatttacttaggtataaatttctaaacaacttcgacagagacatgaatagactggaggaacgatacggatggctggccgcaccacaggcgtatgtttcagagaagcacgaaggcaacaagatcattgccttcgagcgcgccggcctgcttttcatattcaacttccatccaagcaaatcttacacggactaccgggtgggcacagccctacctgggaagttcaagatcgtccttgactcagacgcagccgagtatggcggacaccagcgtctggaccattcgaccgatttcttttcagaggccttcgaacataacggacgcccttacagtctgcttgtctacattcctagtcgggtggccttaatcctgcaaaatgtggacctccctaac

SEQ ID NO: 12832 - DNA, 2106 bp, synthetic construct
  misc_feature 1..2106: note = source = /note="Description of Artificial Sequence: Synthetic coding sequence"
  source 1..2106: mol_type = other DNA
atggccgcgcccatgacgccggctgccaggcctgaggactacgaggctgccctgaacgcagccttggctgatgtgcctgagctggcgcgtctgctggagatcgacccctatttgaagccctacgccgttgacttccagcgccggtacaagcagttcagccaaatcctcaagaacattggtgagaatgagggtggtattgataagttctcccggggctacgagtccttcggagtccaccgttgcgccgatggtggattgtactgtaaggagtgggccccaggtgctgagggtgtctttttgaccggtgactttaacggttggaaccccttctcgtatccttataagaaactcgactacggaaagtgggaactgtacattcctccgaagcagaataaaagcgtcttagtccctcacggatctaagctcaaggtcgtgataacctcaaaaagcggagagatcctctaccgcatttctccctgggcgaagtacgtggtacgcgaaggcgacaatgtgaactacgactggatccactgggacccagaacactcatatgagtttaagcattcccgacctaagaaaccgcgcagcctgagaatctacgagagccatgtcggtatctcctcccacgagggcaaggtcgccagttataagcacttcacctgcaacgtgcttccccggatcaaaggccttggatacaactgtattcagcttatggcgatcatggagcatgcgtactacgcttctttcggctaccagatcaccagcttcttcgctgcgtcaagccggtacggcacgcccgaggagttacaggagctcgtcgacacagctcacagtatggggatcattgtcctcctggatgttgttcactcccatgcctccaagaactccgccgacggcctgaacatgttcgatggcacggactcctgctatttccatagtggtccgcgcgggactcacgatctctgggattcccggctttttgcctacagttcctgggagatcctgcgtttcctgctgtccaatatccggtggtggttggaggagtacaggttcgacggcttccggtttgacggcgttacctctatgctctatcaccatcacggcgtgggtcagggtttctctggcgactattcggagtattttggacttcaggtggatgaggatgctctgacttacctcatgctggccaatcacctcgtccataccctgtgcccagatagcatcactatcgccgaggatgtttcaggcatgccggccctttgctccccgatcagccagggaggcggtggtttcgactaccgtcttgcgatggccattcccgacaagtggatccagctgctgaaggagttcaaggatgaggactggaacatgggtgacatcgtctacaccctcactaatagacgctatttggaaaagtgtatcgcttacgctgagtcccacgaccaggccctggtcggtgacaagtcccttgctttctggctgatggatgcagagatgtacaccaacatgtccgttctcactcctttcacccctgttattgatcgcggtattcagctgcataagatgatccgcctgatcacccacggccttggtggcgaaggttacctgaacttcatgggtaatgagttcggtcacccggaatggttggacttccctaggaagggtaacaacgaatcgtaccactacgctaggagacaattccaccttacggacgatgacttgttgcgttacaagtttctcaacaacttcgaccgcgacatgaaccgtctggaggaaaggtacggctggctcgccgccccccaggcctacgtgagcgaaaagcatgagggaaacaagatcatcgctttcgagcgagccggtttgctgttcattttcaacttccacccgtcgaagagttacacggattaccgcgtcgggaccgccttgcccggcaagttcaagatcgtcttggactccgacgccgccgagtatggtggacaccaacgcttggaccattccaccgacttcttcagtgaggctttcgaacataacggtcgcccgtactctttgttggtttatatcccctcgagagtggctctcattctccaaaacgtggacctacccaac

SEQ ID NO: 12833 - DNA, 2106 bp, synthetic construct
  misc_feature 1..2106: note = source = /note="Description of Artificial Sequence: Synthetic coding sequence"
  source 1..2106: mol_type = other DNA
atggctgcacccatgactccagccgcccggcccgaggattacgaagctgctttgaatgcagctttggccgacgtgccggaactagcccggcttctcgagatcgacccatacctcaagccctacgccgttgattttcagcgccggtataagcagttctcccagattttgaaaaacattggagaaaacgagggaggaatagataaattcagtcgggggtacgaatccttcggtgtacatcgatgtgccgatggcgggctgtactgtaaggagtgggcgcctggcgcggagggagttttcctgacgggagacttcaacggttggaatccatttagctacccatacaaaaaactggattacggtaagtgggaactttacatcccccctaaacagaacaaaagtgtgttagttccacatgggagtaagcttaaggtggtcatcacatctaagtcaggcgagatcctatatcggatttctccatgggcgaaatacgtggttagagaaggcgacaacgttaactacgattggatccattgggacccagagcactcctatgagtttaagcattccagaccaaagaaacctcggtctctacggatatacgagtcccatgtggggattagctctcacgaaggaaaggtagcctcttacaagcattttacgtgtaacgtgcttccacgcatcaagggactcgggtacaattgtattcagttgatggctatcatggagcatgcctactacgccagttttgggtaccagatcacttctttctttgctgcgagcagtcgatacggaacacccgaagagctgcaggagctggtagacactgctcacagcatgggcatcatagtactcctcgatgttgttcacagtcacgcgagcaaaaatagcgccgatggcctcaacatgttcgatggcacagacagctgttattttcattcggggccgcgcgggacacacgatctctgggattcaaggctcttcgcctattcctcatgggagatccttagatttttactgagcaacattcgctggtggctcgaagagtaccgttttgatggctttagatttgatggtgtcacctctatgttgtatcaccatcacggcgtcggccaaggcttctcgggcgattattccgaatacttcggcttgcaggtcgacgaagacgctttgacctatttgatgttggcaaaccatcttgtgcacactttgtgtccagactcgattactatagcggaagatgtcagcgggatgcctgctctgtgttcgcctatatctcagggtgggggcggattcgattataggctggctatggctatccctgacaagtggatacagctgctaaaagagttcaaagacgaagactggaacatgggggacattgtgtacaccctgacgaataggcggtacctagagaagtgcattgcatatgcagaatcacatgatcaggctttagtgggggataagtccctggccttttggctgatggacgccgaaatgtatacgaatatgtcggtactgacacctttcactccagtgattgatcgtggcatacaactccacaagatgataaggttgattactcacgggctgggaggagaggggtatctgaatttcatggggaatgagttcggacatccagaatggctcgactttccgcggaaagggaataatgagtcctaccattacgctcgtagacagttccacctaactgacgatgatctgttgcgctacaaattcctcaacaactttgaccgtgatatgaatcgcctggaggagcggtatggatggctggcagccccccaggcatacgtgtcagagaaacacgaggggaataagataattgcattcgagcgtgccggtctgctcttcatttttaattttcatcccagcaagagttataccgactaccgcgtgggaaccgcactgcccggcaagtttaagatcgtccttgactcagacgccgctgaatacggagggcaccaacggctggatcactctactgattttttttccgaggcgttcgagcacaatgggaggccgtactctttgctcgtttatattccaagtcgcgtggctttaattctgcagaacgtcgatctgccaaac

SEQ ID NO: 12834 - DNA, 2106 bp, synthetic construct
  misc_feature 1..2106: note = source = /note="Description of Artificial Sequence: Synthetic coding sequence"
  source 1..2106: mol_type = other DNA
atggccgcccctatgacccctgccgcccgccccgaggattatgaagctgcacttaatgctgctctggcagatgtccctgaactggctagactgctggagatcgacccctacctcaaaccttacgcagtggactttcagaggagatataagcagttttcacaaatactaaagaacataggggagaatgaagggggcatcgataaatttagcagggggtatgaatccttcggggtgcataggtgtgctgatggtggcctgtactgcaaggagtgggctccaggagccgagggggtatttctgaccggagacttcaacgggtggaaccctttctcctacccttataaaaaactggactatggcaagtgggaactctacattccacccaagcaaaacaaatcagttcttgtgccacacgggagcaagctcaaagtggtgatcacctccaaatctggcgaaatcttatataggatatcaccgtgggccaagtatgtcgtacgcgaaggagataacgtaaactacgactggatccactgggacccagaacatagctatgaattcaagcattcccgcccaaaaaagcccaggtcactgcggatttacgagtcacatgtcggcatctcaagccatgagggaaaagtggcatcttacaaacattttacctgcaacgtgctgccccggatcaagggtcttgggtacaactgcatacagcttatggcgataatggaacatgcctattatgcttctttcggctatcagatcaccagtttctttgcggcttcatcccggtatgggacccctgaagaacttcaggaactggtggatactgctcacagtatgggcatcatcgtgctgctcgacgtcgttcactcccacgccagtaagaactctgctgatggcttgaacatgtttgacgggactgattcatgttactttcacagcgggccccggggcacccacgatttgtgggacagtaggctctttgcgtatagctcatgggagatactgaggtttctgctaagcaacatccgctggtggctggaggagtataggtttgacggatttaggtttgacggcgtcacgagtatgttgtaccaccaccatggcgtggggcaaggtttctcgggagactatagcgaatactttgggctgcaagtagacgaggacgccctgacctacctgatgctggccaatcacctagtgcatacactgtgtccagattcaattaccatagccgaggacgtgagcggcatgccagctttgtgcagtccgatttcacagggcggaggtggctttgattaccgactagccatggctattcccgacaaatggatccagctcctcaaggagtttaaagacgaggactggaacatgggcgatattgtctacacactgaccaacagaaggtaccttgagaagtgtatcgcctacgccgaaagtcacgatcaggccctggtgggagacaaaagtctcgccttctggcttatggacgccgaaatgtatacgaacatgtctgttttgactcccttcacccccgtgattgaccggggcatccaactacacaaaatgattaggttaattacacatggattggggggggagggctacctgaatttcatggggaatgaattcgggcatccagagtggctcgatttccctagaaagggaaataatgagagctatcactatgctcgtaggcaatttcatctgacggacgatgatttgctccggtacaagtttctgaataatttcgaccgagacatgaaccgactggaagaacggtatggatggctggctgctccgcaagcctatgtgagcgagaagcacgaggggaacaaaattattgccttcgagcgcgcagggctactgttcatctttaattttcacccgtccaaatcatacacggattaccgggttgggactgccttgccaggaaagttcaagatcgtgcttgactccgatgccgctgaatacggcggccaccagcgattagaccattccacagattttttctccgaggctttcgaacataatggcagaccttatagtctacttgtatatattccttccagagtggcgcttatcttacaaaacgtggatttgcctaac

SEQ ID NO: 12835 - DNA, 2106 bp, synthetic construct
  misc_feature 1..2106: note = source = /note="Description of Artificial Sequence: Synthetic coding sequence"
  source 1..2106: mol_type = other DNA
atggctgcgccaatgacacccgctgcccgacctgaggattatgaggctgccctcaacgctgcactcgccgacgtccccgaactggctagactgctagagatcgacccttaccttaagccatatgccgtcgatttccaacggagatacaagcagttcagtcagattctgaaaaacattggcgagaatgagggaggcatcgacaaattttcccggggttatgaatcttttggagtccatagatgtgcagatggcggactctactgtaaggagtgggcacccggcgcggagggcgtgttcctcactggggactttaatggatggaaccctttcagctatccttataaaaagctggattacgggaagtgggaactctatatcccaccaaagcaaaacaaatctgtacttgtgcctcatggctcaaagcttaaggttgtgattacgtccaagagcggtgaaattctgtatcgaatttccccttgggcgaagtatgtagtgcgagaaggggacaacgttaattatgactggatccactgggaccccgagcattcctacgaattcaaacattcacgcccaaagaaacctcggtcactccgaatctacgagagccacgtaggcatttcttcacacgagggtaaggtcgcaagctacaaacattttacttgtaacgtgctacctagaataaaaggactcggatacaattgcattcagttaatggctattatggagcacgcctattacgcttcctttggctaccagataacatctttcttcgccgcatcctcacggtatgggaccccagaagagctgcaggaactggtggatacagcccacagcatgggaatcatcgttctgttagatgtggtacactcacacgcttctaaaaattctgccgacggtctaaatatgttcgacgggaccgatagttgctattttcacagcggtccccgaggtacacacgacctgtgggactcaaggctatttgcctattcctcctgggagatactgcgattcctcctaagcaacatacggtggtggctcgaggaatatcgttttgatggcttccgttttgacggcgtcacaagcatgctatatcaccaccatggagttgggcagggcttcagtggagactactctgagtatttcgggctccaggtggatgaggacgccctgacctatctgatgctggccaaccacctcgtgcacaccctgtgtcccgacagcattaccatcgccgaggacgtctccggtatgcccgccctatgttccccgatctctcagggggggggtgggtttgattaccggctggcgatggccattccggataagtggattcaacttttaaaggaatttaaggatgaggactggaacatgggcgacatagtttataccctgaccaatcgaaggtatcttgagaagtgcattgcctatgctgagagccatgatcaggcattggtgggagataagagtttggccttctggcttatggatgcagaaatgtacacaaatatgtcagtccttactcccttcacgccggtcattgacaggggcatccagctgcacaagatgattcgcctcattactcacgggttaggaggagaaggttacctcaacttcatgggcaatgagtttggccatcctgagtggctcgattttccgagaaaaggaaataacgaaagttatcattatgcgaggaggcagttccatctgaccgacgacgacttgctccggtataagttcctcaataactttgaccgggatatgaataggctggaggagaggtacgggtggctcgctgcgccccaggcgtatgtgtcagagaagcatgaggggaataaaattatcgcatttgaacgggcaggcctgctgtttatttttaacttccacccaagcaagagctacactgattaccgggttgggactgcactgcccggtaagttcaagatagtcctcgactctgatgctgcagagtatggaggccatcagagactggaccatagcacggattttttttccgaggcctttgagcacaacgggagaccatactccctacttgtctacatcccttcacgggttgcgctcattttgcaaaacgttgatttacccaat

SEQ ID NO: 12836 - DNA, 2106 bp, synthetic construct
  misc_feature 1..2106: note = source = /note="Description of Artificial Sequence: Synthetic coding sequence"
  source 1..2106: mol_type = other DNA
atggcagcaccgatgactcctgccgcgagacctgaagactacgaagcagcgctgaacgccgccctggcagatgtgcctgagctggcccggttgttggaaatagacccatatttgaagccctacgcagtcgattttcagagacgatacaaacagttctcccaaatcctgaagaacatcggggaaaacgaaggtggcatagataaattctctaggggttatgaaagcttcggcgtccatcgttgcgccgacggtggattgtactgcaaggaatgggctcctggagccgagggcgtgttcctgaccggggatttcaacggctggaatcccttcagctacccctacaagaaactggattatggtaagtgggagctatatattccacccaaacagaacaagagtgtgctcgtgcctcatggttctaagctcaaagtagtcatcactagcaagtcaggggaaatcctgtatcgtatcagcccctgggcgaaatacgtggttagggaaggcgataatgtcaattacgattggatccactgggaccccgagcatagctacgagtttaagcactctaggccgaagaagcctaggtccctccgcatttacgaatcacatgtgggcatttctagccacgaaggcaaggtcgcgtcatataaacatttcacatgcaatgttctgccacgaataaagggtctagggtacaactgtatccagttgatggccatcatggaacatgcttactatgcgtctttcgggtatcaaatcacaagcttctttgcggcatccagcagatacggaacgccagaagagctgcaggaacttgtcgacactgctcactcgatggggattatagtattacttgacgttgtgcactcacacgccagtaaaaacagtgcagatggcctgaatatgttcgatggtactgattcctgttacttccatagcggtcccagggggacccacgacctgtgggatagccgtctgtttgcttatagctcttgggagattctgagatttctgttaagtaacatccgctggtggctagaggagtacagatttgatggtttccgtttcgacggggtgacgagtatgctttatcaccatcatggggtgggccagggcttcagcggagactatagcgagtattttggacttcaggttgatgaagacgccctcacttatctcatgcttgccaaccatcttgtgcacactctgtgtccagattccattactatcgcagaggatgtctctggaatgcccgcactatgcagccccattagtcagggggggggtgggttcgactatagactggctatggccatacccgacaaatggatccagctgctgaaggaattcaaagatgaagactggaatatgggcgatatcgtatacacgctgacaaatagacgctatctggagaagtgcatcgcctacgcggaaagccatgatcaggcgctggtgggggacaaatctctggccttttggctgatggacgcagaaatgtatacaaacatgagtgtcctcacacccttcactcccgtcatagatagaggaattcagctgcacaaaatgattagattgatcacgcatggtttaggtggcgagggctacctgaatttcatgggcaacgagtttggccacccagagtggctggacttcccacgtaaagggaataacgaatcataccactacgccaggagacagttccatcttacagatgatgacctgctgagatataagttcctgaacaattttgatcgcgacatgaatcggctcgaggagagatacggttggctggcggctccccaagcttacgtgtcggagaaacacgaaggcaacaaaattatagcatttgagcgagccgggcttctgttcatcttcaacttccatcccagtaaaagctacacagattacagggtaggaactgctctgcccggaaagttcaaaatcgtcctagatagtgatgcagctgaatatgggggtcatcaaaggctggatcattccacagatttcttctcagaggcgtttgaacacaatgggaggccctacagcctccttgtttatatcccttctagagtggcacttatcctgcaaaatgtggatttgccaaac

SEQ ID NO: 12837 - DNA, 2106 bp, synthetic construct
  misc_feature 1..2106: note = source = /note="Description of Artificial Sequence: Synthetic coding sequence"
  source 1..2106: mol_type = other DNA
atggcagctccaatgaccccagccgcccgccccgaggactatgaagcggccctcaacgctgctcttgcagatgtcccagaattggcccggcttttggaaattgatccttacctcaagccctatgccgttgactttcagagaagatataaacagtttagccagattctgaagaatatcggtgaaaatgagggcggcattgacaagttttctcgtggctacgagtcttttggagttcaccgctgtgcagacggcggcttgtattgcaaagaatgggcacccggggctgaaggcgtcttcctcacaggcgactttaatggctggaacccatttagctatccatataaaaagcttgactacgggaagtgggaactatacatcccacctaagcaaaacaagagcgtcctggtgccccacgggagtaaattgaaggtggtaatcacatcaaagtctggggagatcctttaccggatcagtccttgggccaagtacgtcgttcgagagggagacaacgtgaactacgattggatccactgggaccccgaacactcatacgaattcaaacacagcagaccaaaaaagccacggtctctgcggatttatgagtcccacgtgggaattagtagccacgaagggaaggtggcttcctataagcacttcacctgtaatgtcctaccacgcatcaaggggctcggatacaattgtatccagctcatggcaataatggagcacgcttactacgcctcatttggttaccagataactagtttctttgctgcttcttccaggtatggcacaccagaggaactccaggaactggtggatactgcccatagcatgggtatcattgttctgctggacgtcgtccacagccacgcatcaaagaactccgcagacgggctgaatatgttcgatggcactgattcatgctattttcatagcggtccacgaggtacccacgatctctgggatagccgattgttcgcatatagctcttgggagatactgaggtttttattgtccaatatccgttggtggctggaagagtatcgtttcgacggcttccgctttgatggagtgaccagcatgttgtatcatcatcatggcgtcggccagggctttagtggagattatagcgagtatttcgggctccaagtggatgaagacgccttgacctatctgatgttggccaatcacctcgtacacactctgtgtccggacagcattaccattgctgaggatgtaagcggtatgccagctctgtgttcccctatcagccagggggggggaggatttgactacaggctcgcaatggctatccccgataagtggatccaactactaaaagaattcaaggatgaagactggaacatgggtgatattgtgtacactctgactaacaggcggtatttggagaagtgtatcgcttacgcggagtcccatgaccaggcgttggttggagataaatcgctcgccttctggctgatggacgccgaaatgtacaccaatatgtccgtgcttacaccctttactcccgtgatcgatagaggaatccagctgcataaaatgatcaggctgataactcatgggttgggcggcgagggttacctgaacttcatgggaaatgagttcggacatccagagtggctcgacttcccccggaagggcaacaatgaatcctatcactatgcccggagacaattccacttgacggacgatgacctcttgcgctataaatttctgaataacttcgatcgggatatgaatcgactcgaggagcgatatggttggctagcagctccgcaggcgtatgtttcggagaagcatgaagggaataagataattgcatttgagcgggccggtctgctgtttatattcaatttccacccatcaaaatcgtacacagactacagggttggcaccgccttaccaggcaaatttaagatcgtgctggattctgacgctgccgagtatgggggccaccaaagactcgaccattccactgattttttctcggaggcgttcgagcataatggcaggccatatagcttgttggtgtatattcctagccgggtcgctctaatcctgcagaacgtggacctgccaaac

SEQ ID NO: 12838 - DNA, 2106 bp, synthetic construct
  misc_feature 1..2106: note = source = /note="Description of Artificial Sequence: Synthetic coding sequence"
  source 1..2106: mol_type = other DNA
atggctgctcccatgacaccagcagccaggcctgaggattatgaagcggccttgaatgcggcactggctgacgttcctgaactcgcccggctacttgagatcgacccgtacctgaaaccgtacgctgtggactttcagaggagatataagcagttctcccagatcttaaagaacatcggagaaaacgagggtggaattgacaagttttcacgcggctacgagtcctttggggtccatcggtgtgctgacggcggtctgtactgcaaagaatgggccccaggcgctgagggtgtgtttctgacgggcgattttaacgggtggaacccattctcatatccatataagaaactcgactacggcaaatgggaactgtacatacctcctaaacagaacaagagtgtgttggttccacatggttctaagcttaaagtggtgattacatccaagtctggagagatcttgtaccgcatttcgccttgggccaagtacgtcgtccgtgaaggcgataacgtgaactacgactggatccactgggacccggaacattcttacgaattcaagcattctagaccgaagaaacctagatccctgcgcatatacgagtctcacgtgggtatcagtagccacgagggcaaagtggctagttacaagcacttcacctgtaacgtgctccctcgcatcaaaggcctgggctacaattgtatccaactcatggctatcatggagcatgcctactatgcctccttcggctatcaaatcaccagctttttcgctgcgtcaagtcgctatggtaccccggaagagctacaagagcttgtagacacagcacacagtatgggcatcattgtccttcttgacgttgtgcattcgcatgcatctaaaaactcagcggatggactgaacatgttcgatggaaccgattcctgttactttcactccggtccgcgcggaacgcatgacctctgggatagtcgcctcttcgcctacagttcttgggagatcttgcgcttccttctgtcaaatattcgctggtggcttgaggaataccgatttgacgggtttaggtttgatggcgttaccagcatgctttatcaccaccacggcgtggggcagggctttagcggcgattacagtgagtacttcggactccaggtggatgaggacgccctaacttacctgatgctagccaaccatcttgtgcacaccttgtgcccagactccataactattgctgaggatgtaagtggcatgccagccctatgcagccccatctcccagggaggcggcggattcgactaccgcttggctatggctatccccgacaaatggattcagttattgaaggagttcaaagatgaggattggaatatgggagacatcgtgtacacactgaccaatcggcggtatctggagaagtgcattgcatatgcagaatcccacgaccaggcattggtgggcgacaagtcgttggcattttggttgatggatgccgagatgtataccaacatgtccgtcctcacgcccttcacacctgtcatcgataggggcatccagctgcataagatgatcaggctcatcacccacggtttgggtggcgaaggttatctcaattttatggggaatgaatttgggcatcctgagtggctggactttcctcggaagggcaataacgaatcataccactacgcccggcgacagtttcatttgactgatgacgacttgctcagatataaatttcttaacaactttgaccgggatatgaatagactggaggagcgatatggctggttagcagcgcctcaggcctatgtctccgagaaacatgaaggtaacaaaattatagccttcgagcgcgctggcttgttgtttatctttaacttccacccgtccaagtcgtacaccgactaccgagtcggtaccgcactacctggaaagtttaaaatagtcctggactcggacgccgccgaatacgggggacaccagcgactggatcattcaaccgatttctttagtgaggcatttgaacacaacgggagaccctactctctactggtctatattcccagtagggtcgccctaattttacaaaatgtggatctgcccaac

SEQ ID NO: 12839 - DNA, 2106 bp, synthetic construct
  misc_feature 1..2106: note = source = /note="Description of Artificial Sequence: Synthetic coding sequence"
  source 1..2106: mol_type = other DNA
atggctgctccaatgacacctgcagcaagaccagaagattatgaagctgctcttaatgctgcccttgctgatgtaccagaattagctagacttcttgaaattgatccttatttaaaaccatatgctgtagactttcaaagaagatataaacaattttctcaaattttaaaaaatataggagaaaatgaaggtggaatagataaattctcaagaggttatgaaagtttcggagtacacagatgtgcagatggaggtttatattgtaaagaatgggcacctggtgctgaaggagtttttttaacaggagattttaatggatggaatccattttcatatccatataaaaagcttgattatggaaaatgggaattatacattccaccaaagcaaaacaaatcagttttggttccacatgggtctaaattaaaggtagtaataacttctaaatcaggtgaaatattatatcgtattagtccttgggcaaaatatgttgtaagagaaggagataatgttaattatgattggattcattgggatccagaacatagttatgaatttaaacattcaagacctaaaaagccaagatctcttagaatatatgaaagtcacgttggaattagttctcatgaaggaaaagttgcttcatataagcatttcacatgtaatgttttaccaagaattaaaggtcttggatataattgtatacaattaatggccattatggaacatgcttattatgcttcttttggatatcaaattactagtttttttgcagcttcatcaagatatggaactccagaagaacttcaagaattggttgatacggctcactcaatgggaatcattgttttattagatgttgtccattcacatgcaagtaaaaattcggcagatggattaaatatgtttgatggaacagactcttgttatttccatagtggacctagagggactcatgatttgtgggactcaagacttttcgcttatagtagttgggaaattcttagatttcttctttctaatattagatggtggttagaagaatatagatttgatggatttagatttgatggagtaacttctatgctttatcaccatcatggagttggacaaggattttcaggagattattccgaatattttgggttacaagttgacgaagacgcattaacatatttgatgttggctaatcatttagttcatactttatgtcctgactctataacaattgctgaagacgtatcagggatgcctgcattatgttcaccaatttcacaaggagggggtggatttgattatagattagcaatggccattccagataaatggattcaattgttaaaggaatttaaggatgaagattggaatatgggagatattgtatatacattgactaatagaagatatttagaaaaatgtatagcatatgcagaaagtcatgatcaagctcttgttggagataaatcattagcattttggcttatggatgctgaaatgtacactaatatgagtgttcttacaccatttacaccagttattgatagaggaattcaattacataaaatgattagacttattactcatggattgggtggagaaggatatcttaatttcatgggaaatgaattcggacatcctgaatggttggatttcccacgaaaaggaaataatgaatcatatcattatgctagaagacaatttcatttaactgatgacgatttattaagatataaattcttaaataacttcgatagagatatgaatagattagaagaaagatatggatggttagctgctcctcaagcttatgtatctgaaaaacatgaaggaaataagattattgctttcgaacgtgcaggattattatttatattcaattttcatccaagtaaatcatacacagattatagagttggaacagcattaccaggaaaatttaagatagttctagattctgatgcagcagaatatggaggacatcaaagacttgatcattcaacagattttttttctgaagcatttgaacacaatggtagaccatattcacttttagtttatattccaagtcgtgtcgctcttatacttcaaaatgtagacttaccaaat

SEQ ID NO: 12840 - DNA, 2106 bp, synthetic construct
  misc_feature 1..2106: note = source = /note="Description of Artificial Sequence: Synthetic coding sequence"
  source 1..2106: mol_type = other DNA
atggctgctcccatgacaccggcggctagacccgaggactatgaggcggccttaaatgctgcactggctgacgtgcctgaacttgcccgtttgctggaaatagatccttatcttaagccttacgctgttgacttccaacgccgatacaagcagttctctcaaattctgaagaacattggagagaacgagggcggtatagacaagttttctagaggatatgagtcatttggggtacacaggtgcgcagacggaggcctgtattgcaaagagtgggcacccggcgccgagggggtgttcttgaccggcgatttcaatggttggaacccattttcctacccctataagaaattggattatggaaagtgggaattgtacatccctccaaaacagaataagtccgttcttgtcccacatggatcaaagttaaaggtggtgatcacaagtaaaagtggggagatactgtatcggatcagtccatgggctaaatacgtggtacgagaaggcgacaatgtaaattacgactggattcactgggatcctgagcatagctacgaattcaagcattcgaggcccaagaaacccaggtctctccggatctacgagagtcacgtgggtatcagcagccacgaaggcaaggtagcctcttacaaacacttcacttgcaacgtgctaccacgtataaagggcctcgggtacaactgcatccagctgatggctattatggaacatgcctactatgccagctttgggtaccagatcactagctttttcgccgccagttcccgctacggaactccggaggaacttcaggagttagtcgacactgcacactccatgggcatcattgtcctcctggacgtagttcactctcacgcctctaagaatagtgccgatggtctgaacatgttcgacgggacagactcttgctattttcatagtggtcctagaggcacgcatgatctttgggactcccgtttgtttgcttattcttcatgggaaatattacgttttctactaagtaacatacgctggtggctggaggagtacagattcgatggattcaggtttgatggcgtcacatcgatgctgtatcaccaccacggtgtcggccaaggattttccggagattattccgagtacttcgggctgcaggtagacgaggatgcacttacctacctgatgctggctaaccatctcgtacatacactttgcccggatagtatcactattgcagaggacgtgtcaggtatgcctgctctatgttcgcctatcagtcagggaggagggggcttcgactatcgcttagccatggccattcctgacaaatggatccagctgctcaaagagtttaaagatgaagattggaatatgggtgacatcgtgtacactctgacaaaccgacggtacctagagaagtgtatcgcatacgcggaatcccacgaccaagctctggtgggcgacaaatcgctggcattttggctgatggatgcggagatgtacaccaatatgtcggtgctcaccccatttacccctgtcatcgatagggggatccagctgcataaaatgatccgcttgatcacccacggcctgggaggggaggggtatttaaattttatgggcaacgaattcgggcatcctgaatggcttgacttccctcgcaagggaaataacgaaagctaccattacgcgaggcgacaattccatcttactgacgatgacttgctgcgctacaagttccttaacaattttgatcgcgacatgaatcgtctggaggaaagatatgggtggttagctgcgccacaggcttatgtgagtgagaaacacgaggggaataagatcatcgctttcgagagagctggtttgctgtttatcttcaatttccacccatccaagagctacacagactacagggttggcaccgccctaccaggcaaatttaaaatcgtccttgacagcgatgcagccgaatatgggggacatcaaaggctggaccactcaacggacttttttagcgaggcgttcgagcacaatggccgcccatacagccttcttgtgtacattcctagccgggtagcccttattctgcaaaacgtcgatctcccaaac

SEQ ID NO: 12841 - DNA, 2106 bp, synthetic construct
  misc_feature 1..2106: note = source = /note="Description of Artificial Sequence: Synthetic coding sequence"
  source 1..2106: mol_type = other DNA
atggccgcccccatgactcccgcagcccgaccagaagactacgaagccgcacttaacgccgctcttgccgatgtccccgaattggctcgcctcctagaaatagacccatatctaaaaccttatgccgtggatttccagcggaggtacaagcagttctcccagatactaaaaaacattggagagaacgaaggggggatcgataaattttcgagagggtatgaatcattcggggtgcatagatgtgcggatggaggattgtactgtaaggagtgggctcccggagccgagggggtatttctgactggggatttcaacgggtggaatccattctcttatccttataaaaaactagattatgggaaatgggaactatatataccacccaagcagaacaaatcagtcctcgtacctcatggatcaaaactcaaggtggttataacaagtaaatctggagagattctctatcgaatctccccatgggcaaagtatgttgtcagggagggagataacgtaaactatgattggattcattgggatcccgaacactcctatgagttcaaacactcgagacccaaaaaaccacggtccctcaggatctatgaatcacatgtgggaatttcctcccatgaaggaaaagtggcatcttacaaacattttacatgtaatgttctgccccggatcaaagggctcggatataattgcatccagttgatggcaattatggaacatgcatattatgcttctttcgggtatcagatcacatctttctttgctgcctcctctcggtatgggactcccgaggaacttcaggagctggtagatactgcccattctatggggatcattgttctgctcgacgttgtgcactcacatgcctctaaaaattccgccgacggactcaatatgttcgatgggacagattcatgctacttccactcggggccaaggggaacgcacgatctgtgggattctcggctttttgcctattcatcttgggagatcctccggttcctgctctctaatatcaggtggtggctcgaagagtatcgattcgatgggtttcggttcgatggggtaactagtatgttataccaccatcacggggtggggcaggggttcagtggagactattcggaatactttggattgcaagtagacgaggatgctctcacatatctgatgttagcaaatcacctagtacatacactctgtccagattctatcacaatagcggaagatgtgtccggaatgccagctctatgttcccccatttctcagggagggggagggtttgattataggctggctatggccataccagataaatggattcagctactaaaagaattcaaagacgaagattggaatatgggggatatcgtttatactctcacaaaccggaggtatttggaaaaatgtatagcctatgctgagtcccacgatcaggcactggtgggggataagtccctggctttctggttaatggacgccgaaatgtatactaatatgtcagtgcttactccgttcacacccgtaattgataggggaatccagttacacaaaatgataaggctgataacacacgggctaggaggagaaggatatctcaacttcatgggaaacgaatttggacaccccgaatggctcgatttcccccggaaagggaacaatgaatcctatcattatgcacggcgacagtttcatctcacggatgatgatctacttcgatataaattcctgaataatttcgatcgggatatgaacaggcttgaagagagatacgggtggttggctgcccctcaggcttatgtctctgaaaaacatgaagggaacaaaatcatcgccttcgaaagagccgggctactctttatctttaacttccatcccagtaaatcatatacagactatagggtggggactgcactgcccgggaaattcaagatagtgctcgattctgacgccgcggagtacggaggacaccagagactggatcattctactgatttcttctccgaagcttttgaacacaacggacgaccctatagtttgctggtgtatatcccttctagggtagctctcatcctgcaaaacgtagatctccccaat

SEQ ID NO: 12842 - DNA, 2106 bp, synthetic construct
  misc_feature 1..2106: note = source = /note="Description of Artificial Sequence: Synthetic coding sequence"
  source 1..2106: mol_type = other DNA
atggcagcacctatgacaccagccgcaagaccggaagattacgaagctgctcttaatgctgctttggctgatgtgccagagcttgcacgtcttcttgaaattgatccttatcttaaaccgtatgccgtcgacttccaacggcgttataaacaattttcgcagatcttgaaaaacataggagaaaacgagggaggcatagataaattctcgcgtggatatgagtcattcggagtccatagatgtgcggatggaggattatattgcaaagaatgggcacctggagctgagggggtgttcttaactggcgacttcaatggatggaatcctttctcatatccatacaaaaagttggattacgggaaatgggaattgtatattcctccaaagcaaaacaaatctgtcctcgtcccacatggatctaagttgaaagttgtgattacctcaaaaagcggagagatattgtacagaatctctccctgggcaaagtatgttgttagggagggtgataatgttaattatgattggattcactgggaccctgagcattcatatgagttcaagcattctcgaccaaagaaaccaagaagtttgcgaatctatgaaagtcatgtcggaatctcttctcacgaggggaaagtagcctcatataaacattttacttgcaacgttttgccgagaattaaaggattaggatataattgcatccaactaatggctataatggaacacgcgtactacgcatctttcggatatcaaattacaagttttttcgcagctagctcgagatatggaaccccagaagagttgcaagaattagttgatacggcacatagtatgggaattatcgtacttctcgatgtggtgcatagccatgcatctaagaatagcgccgacggacttaacatgttcgacggtaccgattcgtgttacttccatagcggaccaagaggtactcacgatctttgggattctcgtttgtttgcttactcgtcatgggagattcttcgatttctgctgtcgaacattcgatggtggctcgaggagtatagattcgatggatttagattcgacggagttacttcaatgctctatcaccaccatggtgtcggacaaggattctctggtgactacagtgaatactttggtttgcaagttgatgaagatgctttaacatacctgatgttggctaatcacttggttcacacactttgcccagatagtattaccatagccgaagatgtttcaggaatgccggctttatgcagtcctataagccaaggaggaggtggttttgattacagacttgctatggctatcccagataaatggattcaattgttgaaagaatttaaagatgaggattggaatatgggagacattgtatacacactcacgaaccggcgttacttggaaaaatgcattgcatatgccgagtctcacgatcaagctttggtaggagataaatcattagcattctggttgatggatgcagagatgtataccaacatgtcggttttgactccgttcacaccggttatcgatagagggattcagctccataaaatgatccgactcatcacacacggtcttggaggagaaggatatctcaatttcatgggaaacgaatttggacatccagaatggctagattttccacgaaagggaaataatgaatcctaccattacgcccgtcgacaattccaccttaccgatgatgatcttttacgatataaattccttaataacttcgatcgggatatgaacaggctggaggaacgatatggatggctcgcggctccacaagcgtatgtatccgagaaacacgaaggaaacaaaatcatcgcatttgaacgcgcaggccttctcttcatattcaactttcacccatcaaagtcatacacggactaccgcgttggtactgcactgccaggcaaatttaagattgtattggattccgatgcagcagagtatggaggacatcagcgacttgatcattccacggatttctttagcgaggcttttgagcataatggccgaccatatagtttgcttgtatacatcccgtctcgtgttgctcttatactgcagaacgtagatcttcctaat

SEQ ID NO: 12843 - DNA, 1071 bp, synthetic construct
  misc_feature 1..1071: note = source = /note="Description of Artificial Sequence: Synthetic coding sequence"
  source 1..1071: mol_type = other DNA
atggaggaaggaatgaatgtgctccacgattttgggatccaatccacccattacctccaggtgaattatcaggacagccaggattggttcatcctcgtctcggtgatcgcagacctccgcaatgccttctatgtcctgttcccgatttggtttcacctgcaggaggccgtggggatcaaacttctttgggtggcggtcatcggagattggttgaatctcgtgttcaagtggatcctgtttggacagcggccatactggtgggtgctcgacaccgactattactcgaacacttcagtgccactcatcaaacagttccccgtcacctgcgagacgggtccagggtcaccgtccggacatgcaatggggacggccggagtctactacgtgatggtgacctccactttgtcgatctttcagggaaagatcaagccgacgtaccgcttccggtgtctgaacgtaattctgtggttggggttttgggctgtgcaactgaacgtgtgcctgtcccgcatctacctggcggcccacttcccgcatcaagtggtcgctggagtcctgtccggaatcgcggtggcggagactttctcacacatccattcaatttacaacgcgtcccttaagaagtacttcctgattaccttctttctgttctccttcgcgattggattctacctgctcttgaaaggactgggagtggacctgttgtggactctggaaaaggctcagagatggtgcgagcaaccggaatgggttcatattgacactactcctttcgcgtccctcctgaaaaaccttggtactctgttcggactcgggctggctctgaattcatccatgtacagagagtcatgtaaaggaaaactgtcaaagtggctcccattccgattgtcgtccatcgtggcaagcctcgtgctcctccacgtgtttgactcactgaaacctccgtcccaggttgaactggtgttctacgtgttgtccttctgcaagtcggcggtggtgccgctggcctctgtgtcggtgattccgtactgcctcgctcaagtcctcggacaaccacacaagaaatcgctc

SEQ ID NO: 12844 - DNA, 1071 bp, synthetic construct
  misc_feature 1..1071: note = source = /note="Description of Artificial Sequence: Synthetic coding sequence"
  source 1..1071: mol_type = other DNA
atggaggaaggaatgaatgtgctgcacgatttcggcatccagagcacacattatctgcaggtgaactaccaagattcccaagattggttcatcctggtgtcggtgattgcagatctgagaaatgcgttctacgtcctgttccctatctggtttcacctccaagaagccgtcggtattaaactgctctgggtggcagtgatcggagattggctgaatctagtctttaagtggatcctgtttggacagcgcccatattggtgggtgttggacactgattactactccaacacgtcagtcccacttatcaagcagtttccggtgacctgcgaaacaggcccaggatccccttctggacatgctatgggcaccgccggtgtctactatgtgatggtgacaagtaccttgagcattttccagggcaaaattaagcccacatatcgcttccggtgtcttaacgtgatactgtggctggggttctgggctgtccagctgaacgtgtgtctgtctcgcatctatctggctgctcatttcccgcaccaggtggtggccggtgtgctgtccggcatcgctgtagcagaaactttcagccacatccactctatatacaacgcaagcttgaagaagtatttccttatcacattttttttgttcagctttgccatcggcttctacctactgttgaaggggttaggtgtagaccttctgtggactctggagaaagctcagagatggtgtgagcagccagaatgggttcatatcgacaccacacctttcgctagtctcctcaagaacctgggtaccctgtttgggcttggcctggctctgaatagctccatgtacagagagtcctgtaagggtaagttgtcgaagtggctgccctttcggctgtcgtccattgtggcctccctagttttactccacgtgttcgacagtctaaagcccccaagtcaagtggagctcgtgttttacgtgctcagcttttgtaagtcagccgtggtcccattggcttccgtgtccgtcattccatactgcttagcacaagtcctgggtcagcctcataagaaaagtttg

SEQ ID NO: 12845 - DNA, 1071 bp, synthetic construct
  misc_feature 1..1071: note = source = /note="Description of Artificial Sequence: Synthetic coding sequence"
  source 1..1071: mol_type = other DNA
atggaagaaggcatgaacgtgctgcatgacttcggaatccagtcgactcactaccttcaagtcaattatcaagatagccaagactggttcatcttggtgtcagtgatcgccgatttgagaaacgctttctacgtgctgtttccaatctggtttcatctgcaagaagctgtgggaattaagctgctttgggtcgcagttatcggagactggctgaacctcgtgtttaagtggatcctctttggacagcggccatactggtgggtcctggacactgattactactctaacacctccgtccctcttatcaagcaatttccggtgacgtgcgagactgggccgggttcgccatcgggtcacgcaatgggaactgcaggagtttactacgtgatggtcaccagcaccctgtcgatatttcaggggaagatcaagcccacctaccggttccgctgtcttaacgtgatcctgtggctcggattctgggcggtgcagctcaacgtgtgcttgtcccgcatctacctggcggcacatttcccccatcaagtggtcgcgggagtgctgtcggggatcgctgtcgcagaaaccttctcacacatccactcaatctacaatgccagcctcaaaaagtactttctgatcacctttttcctgttctctttcgcgatcggtttctacttgctgttgaagggcctcggggtggacttgctgtggacgctggaaaaagcccagcggtggtgcgaacagccggagtgggtgcacattgacaccacccctttcgcgtcgctgctcaaaaatctggggactctgttcggcctcgggctcgccctcaacagctcgatgtacagggagtcgtgcaagggcaagctgtccaagtggctgccattcaggcttagctcgattgtggcctcgcttgtgctgctccacgtctttgattctcttaagccgccgtcacaggtggagttggtgttctatgtcctgtcattctgtaaatcggcggtcgtgccgctggcttcagtctccgtcatcccctactgcttggctcaagttctcggtcagccgcacaagaagtccctt

SEQ ID NO: 12846 - DNA, 1071 bp, synthetic construct
  misc_feature 1..1071: note = source = /note="Description of Artificial Sequence: Synthetic coding sequence"
  source 1..1071: mol_type = other DNA
atggaggaggggatgaatgtgcttcacgacttcggcatccaatccacccactacctgcaagttaactatcaggactcccaggattggttcattctggtcagcgtgatcgcggacctccggaacgccttctatgttctctttcccatatggttccatctgcaggaggctgtgggcattaagctgctctgggtggctgtgatcggcgattggcttaacctagtatttaagtggatcctgttcggacagcggccctactggtgggtgcttgacaccgattattactccaacacgtccgtgcctttgataaagcagtttccagttacttgcgagaccgggcctgggtcaccttccggacacgcaatgggaactgctggagtgtactacgtgatggtcaccagcactctttccatctttcaggggaagataaaacctacatatcgattccgctgcctgaatgtcatcctctggctggggttctgggctgtgcagctaaacgtttgtctgtcccgaatatacttggctgctcattttccacatcaggttgtggcaggggtcttaagcggaatcgccgtggctgaaaccttcagccatatccactcgatctataacgcaagtctgaaaaaatattttctgatcacttttttcctgttcagtttcgccattggattttatcttctcctcaaagggctcggggtggatctgctgtggaccctagagaaagcccagaggtggtgcgaacaacccgaatgggttcacatcgataccacaccctttgcatcgcttttgaaaaatctcggcaccctgttcggcctgggactggcactgaactcatctatgtatcgcgaaagctgcaaaggcaaactatctaaatggttgccatttaggctgtcatcgattgtcgcaagccttgttctgctgcacgtttttgattcgctgaagccaccatcgcaagtggagcttgtcttttacgtgctatcattttgcaagagtgccgtggtacctctcgcttcagtttccgtgattccttactgcctcgctcaggtcttggggcaacctcacaaaaagagcttg

SEQ ID NO: 12847 - DNA, 1071 bp, synthetic construct
  misc_feature 1..1071: note = source = /note="Description of Artificial Sequence: Synthetic coding sequence"
  source 1..1071: mol_type = other DNA
atggaagaagggatgaacgtgctgcatgacttcggcatccagtcaacccattatctgcaagttaactaccaggactcacaagactggttcatccttgtgtcagtgattgcagatctccgtaacgctttttacgtgctctttcctatctggtttcatctgcaagaggctgtcggaattaagctcctttgggtggctgtgattggtgattggctcaatctcgtgttcaaatggattctgttcggccaaagaccatactggtgggtgctcgatacggactactactcgaatacttcggtgccactgattaagcaatttccagtcacgtgtgagactggacccgggagccctagcggacacgcaatggggacggcaggcgtgtactacgtcatggtgactagcactctttcgatatttcaaggcaagattaagccgacgtatcgctttaggtgtctgaacgtcatactgtggctgggtttctgggcagtgcaacttaatgtgtgcctttcaaggatttaccttgctgcccactttcctcaccaagttgtggcaggagtgctttcgggaattgcggtggcggaaacttttagccatatccattccatctacaacgcctcgctgaagaagtactttctcatcacttttttcctgttctcattcgcaattggtttctatctgctgctgaaaggtcttggggtggatctgctctggacccttgagaaggcgcaacggtggtgcgaacagcccgagtgggtgcatatagacaccaccccatttgcatcgctgctgaagaaccttgggacgctgttcggacttggtcttgcactgaactcgtcgatgtaccgggaatcttgtaagggaaagctgtcgaaatggcttcctttccgactctcgtccattgtggccagccttgtccttctccacgtgtttgattcccttaagcccccatcgcaggtcgaattggtgttttacgtcctttcgttttgtaagtccgcagttgtcccgcttgccagcgtgtcggtgattccttactgtctggcccaggtcctcggacagccacataagaaatcactg

SEQ ID NO: 12848 - DNA, 1071 bp, synthetic construct
  misc_feature 1..1071: note = source = /note="Description of Artificial Sequence: Synthetic coding sequence"
  source 1..1071: mol_type = other DNA
atggaagagggcatgaacgttctccatgactttgggattcagtccacccactacttacaggtcaactaccaagatagccaggattggttcatattggtgagcgttattgcagaccttaggaacgctttctatgttctcttcccgatatggttccaccttcaagaggcagtcggtattaagctcctctgggtcgctgttatcggtgactggttgaatttagtcttcaaatggatcctgtttggtcaacgcccttattggtgggttctggatacagactactattcaaacacgtccgtgccgctgattaaacagtttcctgtgacctgcgaaacgggacccggatctccatcaggccacgccatggggacggccggcgtgtactatgtgatggtgacgagcactctctccatcttccagggtaaaatcaagcctacgtaccgcttccgatgcctgaatgtaatcttgtggcttggcttctgggcagtgcagctaaacgtctgcctaagtcggatttacctcgcggcgcacttcccccatcaagtggtggcaggggtgctctcaggaattgcggtggccgagaccttcagccacattcactccatctacaatgcctccctgaaaaaatatttcctgattaccttcttcctgttctcatttgccattgggttctatctactgctgaagggcctgggtgtggacctcctgtggaccttagaaaaggcgcagcggtggtgtgaacagcctgaatgggtccacatcgataccaccccttttgctagcctgctgaagaatctgggaactctcttcggcctgggtctggcgctgaattcctcgatgtatcgcgagtcctgcaagggaaagctgtcgaaatggctccctttcagactcagttcaatagtagcgtccctggtgctgctgcacgttttcgacagtcttaaaccgccctcacaagtggaactcgtgttctacgtgctgtccttctgtaagtcggccgtcgtacctctggcaagtgtttccgtgattccatattgtctggcccaagtgctgggccagccacataagaagtcattg

SEQ ID NO: 12849 - DNA, 1071 bp, synthetic construct
  misc_feature 1..1071: note = source = /note="Description of Artificial Sequence: Synthetic coding sequence"
  source 1..1071: mol_type = other DNA
atggaggagggcatgaacgttttgcacgactttggaattcaatccacccactacctgcaggtgaactaccaggatagccaagattggtttatactggttagcgttattgcggatttgcgcaatgcgttctacgtgctcttccctatttggtttcatctgcaggaagcagtcggcattaagctcctttgggtcgcagtgatcggtgactggctgaacctcgtgtttaagtggatactgtttggtcagcgtccgtactggtgggtgctggatactgattactactccaatacttcggtgcccctcattaagcaatttccagtcacctgtgaaaccgggcccggatcacccagcggacatgccatgggtactgcaggagtgtactacgtgatggtgacctcgacgcttagcatatttcagggaaagatcaagcctacttatagatttcgctgtctgaatgtgatcctttggctgggattttgggccgtgcaactcaacgtgtgcctgtccagaatatacctcgccgcacattttccccaccaggtcgttgcaggcgtgctgtcgggcattgccgtggcagaaaccttttcacatattcattcaatctataacgcttcactgaaaaagtactttctgattacctttttccttttttcgtttgctattggattctaccttctgcttaagggactgggagtggacctgctgtggactctcgaaaaagcccagaggtggtgcgaacaacctgaatgggtacatatcgataccactcccttcgcatcgcttcttaagaacctcggtacgctttttggactgggactggcactgaactcatcaatgtaccgggagtcgtgtaagggaaagctcagcaagtggcttcctttcagacttagttcgattgtggctagcctcgtgctgcttcatgtgtttgattcgcttaaacctccatcgcaagtggaactggtgttctatgtgctgtccttttgtaagtccgcagtcgtgcctctcgcttcagtatcagtgatcccttactgtctggcacaggtcttgggtcaacctcataagaaatccttg

SEQ ID NO: 12850 - DNA, 1071 bp, synthetic construct
  misc_feature 1..1071: note = source = /note="Description of Artificial Sequence: Synthetic coding sequence"
  source 1..1071: mol_type = other DNA
atggaggaaggaatgaatgtgctgcacgatttcggaatccagtcaacgcactacctccaggtgaactatcaggattcccaggactggttcattctcgtgtctgtcatcgccgatctgcggaatgcattttacgtgctgttccccatctggttccatctgcaggaagccgtgggaatcaaactgctgtgggtggcagtgatcggagattggctgaatctcgtgttcaagtggatcttgtttgggcagcggccatactggtgggtgctcgataccgactactactctaacaccagcgtgcctttgatcaaacagtttcctgtcacctgcgagacgggaccaggatccccgtccgggcacgctatgggtactgcaggtgtgtactacgtgatggtgacctcaaccttgagcatatttcaaggcaagatcaagccgacctacaggtttaggtgtctcaacgttatcctttggctggggttctgggccgtccaacttaatgtgtgcctgtcccggatctacctggcagcccacttccctcaccaggtggttgctggcgtgttgtcgggaatcgcggtggcggaaaccttttcacacatccacagcatttacaacgcatccctgaagaagtatttcctcattaccttcttcctgttttcctttgccatcggtttctatctgcttctcaaggggctgggcgtggacttgctgtggacccttgaaaaggcgcagcggtggtgcgaacagccagagtgggtgcatatcgatactaccccgttcgcctcgttgctgaagaacttgggaaccctgttcggacttgggcttgcgctgaactcatccatgtaccgcgaatcctgcaagggcaagctctccaagtggctgccatttagactgtcgtccatcgtcgcctcgctggtgctgctgcacgtgttcgactcgctgaagcctccttcccaggtggagctggttttctacgtgctgagcttctgcaaaagcgctgtggtgcccctggcttcagtgagcgtgatcccgtactgcttggcccaggtcctgggccaaccacacaaaaagagcctg

SEQ ID NO: 12851 - DNA, 1071 bp, synthetic construct
  misc_feature 1..1071: note = source = /note="Description of Artificial Sequence: Synthetic coding sequence"
  source 1..1071: mol_type = other DNA
atggaggaaggcatgaatgtgcttcacgactttggaatccagtcaactcactacttgcaggttaattatcaggattcacaagactggttcatcctagttagcgtgattgcagacctccgcaacgctttttatgtgctgtttcctatatggttccatttacaggaggcggtcggtatcaaactgctatgggtggcagttatcggagattggttaaacttagtgtttaagtggattctatttggacaaaggccttactggtgggttttggacaccgactactattctaacacatcggtgccgctgataaaacagttcccggttacttgcgaaacgggccctggcagtccctctggtcacgcaatggggaccgccggtgtgtactatgtcatggttacaagtaccctgtcaattttccagggtaagatcaaaccaacctacagattccgttgcctcaacgtcattctctggttgggattctgggccgtccagctcaatgtttgtctcagccgaatctacctggctgcacacttcccccaccaggtcgtcgctggggtcctctcagggatcgcagtggccgaaaccttctctcacattcattccatctacaacgccagcttaaaaaagtattttctgataacttttttcctattctcgttcgctatcggcttctaccttttactaaagggcctgggggtggatctactttggacacttgaaaaagcacagcgttggtgtgagcagcccgaatgggtccatatcgataccactcccttcgctagccttctgaagaacctcgggactctgttcggtctgggcctcgccctgaactcctctatgtacagagaatcatgtaaggggaagctgtccaagtggcttcctttccggctgtcttccatcgtggcgagtctcgtgttgcttcacgtgtttgattcattgaagccaccgtctcaggtggagttagttttctacgttctctccttctgtaaatccgccgtggttcccctcgcttctgtttcagtcataccgtactgcctagcacaggtactgggccagccacataaaaagtctcta

SEQ ID NO: 12852 - DNA, 1071 bp, synthetic construct
  misc_feature 1..1071: note = source = /note="Description of Artificial Sequence: Synthetic coding sequence"
  source 1..1071: mol_type = other DNA
atggaggagggcatgaacgtgttgcacgatttcggcatccaaagcacacattatctgcaggtgaactaccaggactcacaggactggttcatcctggtaagtgtgatagctgacctccgcaacgcattttatgtgctgttccctatctggtttcacctgcaggaggcagtgggcatcaaactgctgtgggtggctgtcatcggcgactggcttaaccttgtcttcaaatggatactgtttgggcagcgcccatactggtgggtgctggatacggactactacagtaacacctctgtgcctcttatcaaacagttccctgtgacatgtgaaaccggaccggggtccccatctggacatgctatgggaaccgccggcgtgtattatgtcatggtcactagtacactgtccatcttccaaggcaaaattaaaccaacctataggttccggtgcctgaacgtaatcttgtggctgggcttctgggcggtgcagttgaatgtctgcctgtctcgcatctacctggctgctcatttcccccatcaagtggtcgcgggcgtcctgtcagggatcgcagtggctgaaacattctctcacatacacagtatctacaacgcatctctgaagaaatattttttgattacttttttcctgtttagctttgccatcgggttctaccttctgctgaaaggcctgggagtggacctcctgtggacgcttgaaaaagctcaaaggtggtgcgagcagccagaatgggtccacatagacacaaccccgtttgcatcactgctgaaaaacctgggtaccctcttcggacttggcttggctttgaactctagcatgtacagggaatcctgcaagggcaaactttccaagtggctgccatttagactgtcaagtatcgtggcttcactcgttctgctgcacgtcttcgactctctgaagccgcctagccaggtggagcttgtcttctacgtcctgtccttttgtaagagcgctgtggtgcctctcgcctccgtgtctgttatcccctattgcctcgcccaggtgctgggtcagccacacaagaaatctctc

SEQ ID NO: 12853 - DNA, 1071 bp, synthetic construct
  misc_feature 1..1071: note = source = /note="Description of Artificial Sequence: Synthetic coding sequence"
  source 1..1071: mol_type = other DNA
atggaagaaggaatgaacgtgctgcatgactttggcattcagtccactcattacctgcaagtcaactaccaagactcccaggattggtttatcctggtcagcgtgatcgcagacctcaggaacgccttctacgtgttgtttccgatctggttccatctccaagaggcagtcggaatcaagctgttgtgggtggcggtgatcggagattggctgaatttggtgttcaaatggatcctgttcggacagaggccatactggtgggtcctggacaccgattactattcgaatacctccgtcccgctgatcaaacaattcccggtgacttgcgaaaccggaccaggatccccctcgggacacgctatgggaactgcgggagtctactacgtgatggtgactagcaccctctcgatctttcagggcaagattaagccaacttaccgcttccggtgccttaatgtcattctctggctcggtttctgggccgttcaactgaatgtctgcttgtcgcggatctacctggcagcgcacttcccgcaccaggtggtcgccggagtcctctcaggcatcgcagttgcggaaacctttagccatatccatagcatctacaatgcttccctcaagaaatactttcttatcaccttcttcctcttctccttcgccatcggcttttacctgctgctgaaaggattgggcgtggatctgttgtggaccctggaaaaggcgcagaggtggtgcgagcagccggagtgggtgcatatcgacactacgccattcgcatcactgctcaagaatctgggcactctgttcggactcggcctggccctgaattcatcgatgtaccgcgagtcctgcaagggaaagctgtcgaagtggctgccgtttcggctgtcatccatcgtcgcgtcgctggtgctgctgcacgtgttcgactcccttaagcctccgtcgcaggtcgagctcgtgttctacgtgctctcattctgcaaatcggctgtggtgcctctcgcatccgtgtcggtgatcccgtactgtctggctcaggtcctgggacagccgcataagaaaagcctt

SEQ ID NO: 12854 - DNA, 1071 bp, synthetic construct
  misc_feature 1..1071: note = source = /note="Description of Artificial Sequence: Synthetic coding sequence"
  source 1..1071: mol_type = other DNA
atggaggaaggaatgaacgtgctgcacgacttcggaattcagagcacgcattacctgcaagtgaattaccaggacagccaagattggtttatcctcgtctccgttatcgccgacttgcggaacgccttctacgtcttgttcccgatttggttccacctccaagaagcagtgggaatcaaactgctgtgggtcgccgtgatcggcgattggctgaatctcgttttcaagtggatactcttcggacagcgaccgtactggtgggtgctggacaccgattactattccaatacctccgtgcctctgatcaaacagtttccggtcacttgtgaaaccgggccgggctcgccatcggggcatgcgatgggcaccgctggtgtttactacgtcatggttacctccacccttagcatctttcagggaaagatcaagccgacttacagattccgctgcctgaatgtgatcctgtggctcggattctgggccgtgcagctgaacgtgtgcctgagccggatctaccttgcagctcacttcccccaccaagtggtggccggggtgctgagtggtatagctgtggccgaaaccttctcacatatccattccatctataacgcctcactgaagaagtacttcctgattactttcttcctgttttccttcgccattgggttctatctgctgctgaagggacttggagtcgatctcctctggactctggaaaaggcccaaaggtggtgcgaacagcctgagtgggtgcacatcgacactactccgttcgcgtccctcctgaagaacctcggcacgctgtttgggttgggattggctcttaactcctccatgtaccgagagtcgtgtaaaggaaaactctcaaagtggctcccgttccggctgtcatcaatcgtcgcaagtctcgtacttctgcatgtgttcgactccctgaaaccgccctcgcaggtggagcttgtcttttatgtcttgtcgttttgcaagtccgccgtggtgcctctcgcgtctgtctcggtcatcccgtactgcctcgcgcaggtgttgggccaacctcacaagaaatccctc

SEQ ID NO: 12855 - DNA, 1071 bp, synthetic construct
  misc_feature 1..1071: note = source = /note="Description of Artificial Sequence: Synthetic coding sequence"
  source 1..1071: mol_type = other DNA
atggaggagggaatgaacgttctccatgattttgggattcaatccacccactacctgcaagtgaattatcaggactcgcaagattggtttattctcgtttccgttatcgccgatctcagaaacgccttctacgtcctgtttcctatttggtttcatcttcaggaagcagttggaataaagctgttgtgggtggcagtcattggtgattggcttaatcttgttttcaaatggattcttttcggacagcgcccttactggtgggtgcttgacaccgactattactcgaacacgtcggtccccctgataaagcaatttccagtgacttgcgaaacgggtcctggaagtccgagtggacatgcaatggggactgctggcgtgtactacgtgatggtcacttcgaccctctccatctttcaaggaaagataaaaccaacttaccgatttagatgtctcaacgtgattctctggcttgggttttgggctgtccaactgaacgtgtgcctgtcacggatttaccttgcagcccattttcctcaccaagtggtggcgggtgtgctcagcggaatcgcagtggcagaaaccttcagccacatacattcgatctacaacgcctcgcttaagaagtactttctgatcacgttttttctcttttcattcgcgatcggattctacttgctgttgaaggggctgggcgtggatctgctgtggactctcgagaaagctcagcggtggtgtgaacagcctgaatgggtgcatattgacacgaccccttttgcatctcttctgaaaaatctgggcaccttgtttggactcggtcttgcactgaattcctcgatgtacagagaatcctgtaaaggtaaactttcaaagtggcttccattccggctttcctccattgtcgcttccctggtgcttctgcatgtattcgattccctgaagcctccttcacaggtggagcttgtgttctacgtgctctccttttgtaagtctgcagttgtcccactggcatctgtgagtgtcatcccgtactgccttgcccaagtcctggggcagccacacaaaaagtcactt

SEQ ID NO: 12856 - DNA, 1071 bp, synthetic construct
  misc_feature 1..1071: note = source = /note="Description of Artificial Sequence: Synthetic coding sequence"
  source 1..1071: mol_type = other DNA
atggaggagggcatgaacgtcctccacgattttggaatccagtcgacccactacctccaagttaactatcaagattcacaagattggtttatactcgtctcagttattgcagatttgagaaatgcattctatgtgctgttccctatatggtttcacctccaagaagcagtcggaatcaaacttctgtgggtggctgtgatcggagactggctcaatctcgtgttcaagtggattctctttgggcagcgaccttactggtgggtgcttgacactgactactattcaaatacgtctgtgcctctgattaagcagtttccagtcacttgcgaaactggtccgggctccccctcgggtcacgcaatgggaactgcaggggtgtactacgtgatggtcacgagcactctgtccatctttcaaggcaagatcaagcctacctacagattccggtgtcttaacgtgatcctgtggctggggttttgggctgttcagctcaacgtgtgtctgagccgcatttaccttgcggcgcacttcccacatcaagtggtcgcaggtgtcctttccggaatagcggtggccgaaacgttttcgcacattcactcaatttacaacgccagccttaagaaatactttctcataaccttcttcctcttttcctttgccattggattctacctcctgctgaaggggctcggagtggacttgctgtggacccttgaaaaagcccagcggtggtgtgaacaaccggaatgggttcatatcgatacgactcccttcgcgagccttctcaaaaacttgggaactttgtttggacttggtctggcacttaatagctcaatgtacagagagtcatgcaagggtaagctgtcgaaatggctgcctttccgtctgtcctcgatcgtcgcatcgctggtgcttcttcatgtgtttgattccttgaaacccccaagccaggtggagctcgtgttttacgttctctcattttgtaagtcagctgtggtgccactggcatcggtgagcgttatcccttactgccttgcacaagtgcttggacagccacataagaagtcgctg

SEQ ID NO: 12857 - DNA, 1071 bp, synthetic construct
  misc_feature 1..1071: note = source = /note="Description of Artificial Sequence: Synthetic coding sequence"
  source 1..1071: mol_type = other DNA
atggaagaaggaatgaacgtgttgcacgacttcggcatccaatccacccactacctgcaggtgaattatcaggattcccaggactggttcatcctggtgtccgtgatcgccgaccttcgaaatgccttttacgtcctatttcccatttggtttcatttacaggaagcggtgggcatcaaactgttgtgggtcgctgttattggggactggcttaacctggtgtttaaatggattctcttcggccagaggccatactggtgggttctagacaccgattactactccaatacctcagtccctctaattaagcagttcccggtgacttgcgagacaggacccggcagcccgagcggtcatgccatgggtacagccggcgtatattacgtgatggtgacctccaccctttccatatttcaagggaaaatcaaacctacttatcgtttcagatgtcttaatgtgattctttggctgggattttgggcagtgcagttgaacgtctgtttatcccgaatatacctggcagcacactttccacatcaggtggtggcaggagtgctgagcggaattgccgtagcggaaaccttcagccatatccacagtatttacaacgccagtctgaaaaaatactttttaatcacgttctttctgttcagcttcgctattggcttttatctgctacttaagggcttgggggtggacctcctctggacacttgagaaggcacagaggtggtgcgaacaaccagagtgggtacacattgacacgaccccatttgctagcctcctcaagaatttaggaaccttgttcggcttgggactcgctctcaatagtagcatgtacagggaaagctgtaaagggaagctctccaagtggctgccttttcggttgtcctccattgtggcttcgttggtcctgctgcacgtctttgatagcctgaagccaccaagtcaggtggagctggttttctacgtgctgtccttttgtaaatctgctgttgttcccctggccagcgtgtccgtcattccgtactgtttggcccaggtgttggggcagccccacaaaaaaagtctg

SEQ ID NO: 12858 - DNA, 1071 bp, synthetic construct
  misc_feature 1..1071: note = source = /note="Description of Artificial Sequence: Synthetic coding sequence"
  source 1..1071: mol_type = other DNA
atggaggaaggaatgaacgttctgcacgatttcggtattcagtcgacgcactaccttcaagttaattaccaggactcgcaagattggttcattctcgtgtcagtcatcgctgacctgcgtaacgccttctatgtgttattccccatttggttccatctgcaggaggctgtggggattaaactcctgtgggtggccgtgatcggagactggctcaacctagtgtttaaatggattctcttcggacagaggccttattggtgggttttggacacagactattactctaataccagcgtgcccctgatcaaacagttccctgtgacttgtgaaactgggcccggatctccaagtgggcacgcaatgggaacagccggtgtgtactacgttatggtgaccagcacgctttcgatatttcagggcaaaatcaaacccacctacagattccgctgtttgaacgtgatcttgtggttagggttttgggctgttcaactgaatgtgtgcctgagcagaatttatctggcggcacacttccctcaccaagtggtagccggtgtcctaagcgggatcgccgtcgcagaaacgttttcccacattcacagcatctataatgcgtccctgaagaagtacttcctgattacattcttcctcttttcatttgcgatcggcttctacctgttgctgaaaggcctgggagtggacttactgtggactctggaaaaggcacagagatggtgtgaacagcctgagtgggtgcacatagacactacccccttcgcctccctgctgaaaaatttggggacactgttcggcctcgggttggccctaaacagtagcatgtaccgggagagctgtaaaggcaagctgagtaagtggttacccttccgcctgtctagcatagtcgcttcgctcgtgctattacacgtctttgatagcttaaaaccgccctctcaggtcgagttggtattctacgtgctctcattttgcaaatcagcagtcgttccgcttgcaagtgtctccgtcatcccttactgcctagcgcaggtactcggccagcctcataagaagtccttg

SEQ ID NO: 12859 - DNA, 1071 bp, synthetic construct
  misc_feature 1..1071: note = source = /note="Description of Artificial Sequence: Synthetic coding sequence"
  source 1..1071: mol_type = other DNA
atggaggaaggtatgaatgtactccatgactttggcattcagtccactcattacttgcaggtaaactatcaggatagtcaagattggtttattttagtatcagtaatagccgacttgcggaacgctttctacgttttattccccatttggttccatctgcaggaagcagtcggcataaagctcctctgggtggccgtgatcggagattggctgaacctcgtattcaagtggatacttttcggccaacgcccatactggtgggttctggatacagattactatagtaatacttccgtgcctctgatcaaacagtttcccgtgacctgtgaaactggcccaggaagcccttccggccatgccatgggaactgccggagtctactatgtgatggtcaccagcaccttgagtattttccagggtaagattaaaccaacctatcgcttcagatgcctgaatgtgatactgtggttagggttttgggctgtgcagttgaacgtgtgtttaagcaggatctaccttgctgcccacttcccgcaccaggtagtcgctggtgtactctctggcatcgctgtggccgagacctttagtcatatccactccatttataacgcgtcactaaaaaagtactttctcatcaccttcttcctttttagttttgcgattggcttctacctgctgctgaagggcttgggagtggacctcctgtggacgttggaaaaagcccagagatggtgcgagcagccagagtgggtgcacatcgataccacaccttttgcgagcctattgaagaacctgggcaccctttttggactcgggctggccctgaactctagtatgtatagggagtcatgcaaagggaagctttcgaaatggctccccttcagactctcctccattgtcgcgtcacttgtcctcttgcatgtgtttgattccctcaaacccccgtcgcaggtggagctggttttctacgtactctctttttgtaaatccgctgtggttcctttagccagcgtgagtgtgatcccctattgtctagcccaggtcttagggcagccacacaagaagagcctg

SEQ ID NO: 12860 - DNA, 1071 bp, synthetic construct
  misc_feature 1..1071: note = source = /note="Description of Artificial Sequence: Synthetic coding sequence"
  source 1..1071: mol_type = other DNA
atggaagaggggatgaacgtgctacacgatttcggtatccagtctacacactacctgcaggtgaattatcaggattcccaggattggttcatattggtttctgtcatagcggacctaagaaacgcgttttacgtgctcttccctatatggtttcacttgcaggaagctgtgggtataaaactgctatgggtcgccgtaattggagattggttgaaccttgtgttcaaatggattctgtttggtcagcgcccatattggtgggtgctcgatactgattactattccaacacttccgttcctctgattaaacaattcccagtgacatgtgagactggacccggatccccatcaggccacgcaatgggcacagctggtgtttattatgtcatggtgacatcaacactatcaattttccagggaaaaataaagccgacctatagattccgctgtctcaatgtgattttgtggctgggattctgggccgtgcagttgaacgtgtgcctgtcacggatctacctggcagcgcatttcccccatcaggtggtagcgggtgtgctgtcgggaattgctgtagcagagactttcagtcatatccactccatctataatgctagccttaagaaatactttctgattacctttttcttgttcagctttgcaatcggattctacctgcttctgaaggggcttggcgtcgacctcctgtggaccctcgagaaggcgcagcgctggtgtgagcaaccagagtgggtgcacatagacactactcccttcgcctcactactgaaaaacttgggcactctgtttggccttggcctcgccctgaattcctccatgtatcgggaatcatgcaaaggcaagcttagcaaatggctcccattcaggctatcttcaatcgttgctagtctcgtgttactacatgtgtttgacagtctcaaacctccctcgcaggtggagctcgtgttttatgtgctgagcttctgcaagagcgccgtggttccccttgcgtctgtgagtgtgataccatactgcctggcacaggttttgggccaacctcacaagaaatcactg

SEQ ID NO: 12861 - DNA, 1071 bp, synthetic construct
  misc_feature 1..1071: note = source = /note="Description of Artificial Sequence: Synthetic coding sequence"
  source 1..1071: mol_type = other DNA
atggaggagggcatgaatgtgctccatgactttgggatacagtccacacattatctgcaggtcaactatcaggactcacaggactggtttatcctggtgtcagttatcgccgatctgcggaacgcattctacgtgctgtttccgatatggttccacctccaggaggcagtgggaataaaactgctgtgggtggcagtcatcggggattggcttaacctcgtgttcaaatggattttattcggacagagaccctattggtgggtgttggacacggactattacagtaacacctctgtacccttaatcaaacagttccctgtaacatgcgagacgggacccggctctccatctgggcacgcaatgggtacggcaggggtgtactatgtaatggttaccagtacactaagcattttccagggcaagattaagccaacctatagattcagatgcctgaatgtcattctgtggctcggtttctgggcggttcagctgaacgtttgtctatccaggatctaccttgccgcacatttcccacaccaagtcgtggccggcgtgctcagcggcatagctgtggccgaaacattcagtcacatccattcaatttacaacgcgtctctgaaaaagtacttcctgattactttttttttgtttagctttgccattgggttctacctccttctcaaggggctgggtgtcgatctcctgtggacactcgaaaaggcccagcggtggtgcgaacagcctgaatgggttcacattgataccactccgtttgcgtctctgttaaagaacctaggcacgctgtttggcttagggctggcactgaactcctcgatgtatcgagagtcttgcaaggggaaactcagtaaatggcttccctttagactatcatcgattgtggccagcctggtgctgcttcacgtttttgactccctgaaacctccttcccaggtggaactcgtcttctacgtgttgtctttctgtaagagtgccgtcgtcccattggccagcgtctcagttatcccatattgtctcgcccaagttttgggacagccgcacaaaaagagtttg

SEQ ID NO: 12862 - DNA, 1071 bp, synthetic construct
  misc_feature 1..1071: note = source = /note="Description of Artificial Sequence: Synthetic coding sequence"
  source 1..1071: mol_type = other DNA
atggaagaaggtatgaacgttcttcacgacttcggcatccagtcgactcattacttgcaggtgaattaccaagactcacaggattggtttattctggtgtcggtcattgccgatctgcgaaacgctttctacgtgctgtttcccatctggttccatcttcaggaagcagtggggatcaaacttctttgggtagcggtgatcggagattggttgaacctggtgttcaagtggatcttgtttggacagcgcccttactggtgggtcctggatactgattactactccaatactagcgtgccgttgataaagcaatttccagtgacctgtgaaaccggtcctggatcgccctccggtcacgccatgggaacggccggcgtatactacgtgatggtgaccagcacgctctcgattttccaaggcaagataaaacctacttacagatttcggtgcctcaacgtgattctttggctgggattttgggcagtgcaactcaatgtgtgtctcagccgcatttaccttgccgctcattttccacaccaagtcgtggccggagtcttgtctggtatcgcggtagcagagactttttcacacattcattccatttacaacgcgtcgcttaagaaatactttctgattacgttcttccttttctcttttgcaattggattttacttgcttcttaaaggtcttggagtcgatctgctgtggacccttgaaaaggcgcaaagatggtgtgaacagccggagtgggtccacattgacacgaccccttttgcatcccttcttaagaatctgggcactctctttgggcttgggttggctctcaacagctcaatgtaccgtgagtcgtgtaaaggaaagctgagcaagtggcttcctttcaggcttagttccattgtggcatcgctggtgctccttcatgtctttgactccctgaagcctccatcccaagtcgagctggtgttttatgtgctttcgttttgtaagtccgcagttgttcccctcgcatccgtcagcgtgataccctattgcctggcacaggtccttggacaaccacataagaagagcctc

SEQ ID NO: 12863 - DNA, 1071 bp, synthetic construct
  misc_feature 1..1071: note = source = /note="Description of Artificial Sequence: Synthetic coding sequence"
  source 1..1071: mol_type = other DNA
atggaagaaggtatgaacgtcctccacgattttggaattcaatcgactcactatctgcaggtgaattatcaagattcgcaagattggttcatccttgtgagcgtcatagctgatctgcgaaacgctttttacgtgctgtttcctatttggtttcatcttcaggaagcagtcggtattaagctcctttgggtggcggtgatcggagattggctgaatttggtgttcaagtggatcctttttggacagcgcccatactggtgggtcctcgatactgactactactcgaacacttctgtgccactcataaaacaattcccagtcacgtgtgaaaccgggccgggttcaccatcaggtcacgcaatgggaactgccggagtgtactacgttatggtgacgtcgaccctgtccatctttcaaggcaagatcaagcccacctatcgttttagatgtctcaacgtgattctgtggcttggcttttgggcggtgcagctgaacgtgtgcctgtccagaatctacctggcggcacatttccctcatcaagtggtggcaggagtgctttcaggcatcgccgtggccgaaaccttttcgcatatacatagcatctacaacgcgtcgcttaagaaatactttctcataaccttttttctgttttcctttgcgattggtttttaccttctccttaagggtctgggtgtcgatctgctctggactctggaaaaggcacagaggtggtgtgagcagcccgagtgggtccatattgataccacgccatttgcatctcttttgaagaacctgggcactctgtttggactgggcctggctcttaattccagcatgtacagggagtcctgcaagggaaaactgtcgaaatggctcccttttagactttcatcgatcgtcgcttcgctggtcctgcttcatgtgttcgactccttgaaaccaccttcgcaggtggaacttgtgttttacgtgctctcgttctgcaagtcagcagtggtgcctctggcttctgtgtcggtgattccttactgcctggcccaagtccttggtcaaccacataagaaatcgttg

SEQ ID NO: 12864 - DNA, 1071 bp, synthetic construct
  misc_feature 1..1071: note = source = /note="Description of Artificial Sequence: Synthetic coding sequence"
  source 1..1071: mol_type = other DNA
atggaggaaggaatgaatgtgctgcatgacttcggtatccagagtacccattacctccaagttaactaccaagactctcaagattggtttatcctggtatcagtgatcgctgatttgcgcaatgccttctacgtcctcttccccatctggtttcacctgcaggaggctgtaggaataaagttgctgtgggtggcagtaattggcgactggctgaacctcgtctttaagtggatcctcttcggtcagagaccctattggtgggtgctggataccgattactactctaatacttccgttcccttgataaagcagttcccagttacatgtgagacaggccccggaagtccctctggtcatgcaatgggtactgctggcgtttattacgtaatggtgacctctactttgagcatcttccaaggaaagatcaaacccacataccgttttcgctgcttgaacgtgatcctctggctgggtttctgggctgtgcagttgaatgtctgtttgagccgcatttacctggcagctcacttcccccaccaggtcgtggcaggtgttttgtccggaatcgctgtggctgagacattctcacacatacactccatatataacgcctcactgaaaaaatacttccttataaccttcttcctcttcagcttcgctattggcttctacctgttgctcaagggacttggtgttgatctgctgtggacactggaaaaggcccagcgctggtgcgaacagccagaatgggtgcatattgacactactcccttcgcctctctcttgaagaacctgggtactctttttggcctgggactggccctgaattcttccatgtacagggagagttgcaagggcaagctgtccaagtggttgccctttaggctctccagcatagtggcttctctggtcctgctccacgtatttgacagccttaagcctccctcccaagtcgaattggtcttttatgtgctctcattctgcaagtcagccgtggtgcccttggctagtgtctctgttatcccttactgcctggcccaggtgttgggacaaccccacaagaaatcactg

SEQ ID NO: 12865 - DNA, 1071 bp, synthetic construct
  misc_feature 1..1071: note = source = /note="Description of Artificial Sequence: Synthetic coding sequence"
  source 1..1071: mol_type = other DNA
atggaagagggcatgaatgtcttgcacgatttcggcattcaaagcacccactacctgcaggttaactaccaggatagccaagattggtttatcctcgtgtctgtgatcgctgacctcaggaacgctttctacgtactgttcccgatatggtttcacctgcaggaggcggtgggtatcaagttgctgtgggtggccgtcatcggtgattggcttaacttggtctttaagtggatattatttgggcagcgcccgtactggtgggtactggacactgattactactctaacaccagcgtaccacttataaaacaattcccagtgacatgcgagaccggcccaggcagcccgtctggtcatgccatgggtaccgcaggtgtctattacgtgatggtgacctcaacactgtctattttccagggcaagatcaagcctacctatcgcttccgttgtctcaatgtgatcctgtggctgggtttctgggctgttcagcttaatgtttgcctgagcagaatttacttggcggcccacttccctcaccaagttgtggcgggtgtgctttctggcatcgcggtcgcggagactttcagccacatccacagcatctataatgcaagcctgaagaaatatttcctgattacttttttcctgttttctttcgctatcggtttttaccttctgttgaagggactgggcgtcgatctgctctggacgctggaaaaggcccagcgatggtgtgagcaaccagaatgggtccatatcgacactacgccatttgcgagcctgctgaagaatctgggaacgctgttcggcctgggcctggccctaaattctagtatgtaccgcgaaagctgcaagggcaagctgtcgaaatggctgccattccggctgtcttcgatcgttgcttcgctggtcttgctgcacgtgttcgattcccttaagcccccgagccaggtggaactggttttttacgtgctgagtttttgcaagagcgcggtggtgccgcttgccagcgtgtctgtcattccttactgtctggcgcaagtgttgggtcagccgcacaagaagtccctg

SEQ ID NO: 12866 - DNA, 1071 bp, synthetic construct
  misc_feature 1..1071: note = source = /note="Description of Artificial Sequence: Synthetic coding sequence"
  source 1..1071: mol_type = other DNA
atggaagaaggcatgaacgtgctacatgactttggcatccaaagcacacactacctgcaagtaaattaccaggatagccaggactggtttattctcgtgtccgtcatcgctgacctgaggaatgctttctacgtactctttcctatttggttccacttgcaagaagccgtcggaataaagctgctgtgggtagccgtcattggtgattggttgaacttagtcttcaagtggatacttttcggccaacgaccttattggtgggtgcttgatacggattactacagtaacacgagtgtgccccttattaaacagttcccagtaacatgtgagaccggtcctgggagcccctccggccacgccatgggtactgcaggagtgtactatgtgatggttacttctactctgtcaatcttccaaggcaagattaagcccacatacagattccgttgtctcaatgtcatcttgtggctaggcttttgggccgtgcaactgaacgtctgtctttctaggatttatctggcagcacactttcctcaccaggtggtcgctggggtattgtctggaatcgccgtggccgagaccttttcgcacattcatagcatctacaacgcctccctgaagaaatatttcctgattacattctttcttttctcctttgcaattgggttttacctgcttctgaagggtctgggggtggatctgctgtggacactcgaaaaagcccagcgctggtgcgaacagcctgaatgggtgcacattgacacgacgccctttgcatccctgttaaagaatctgggtaccctgttcggattgggcttggcacttaactcatctatgtaccgggagagctgcaaggggaagctgtcaaaatggctgccctttagattgtctagcatcgttgctagcctcgtcctccttcatgtgtttgacagccttaagcctccttctcaggtagaactcgttttctacgtacttagcttttgtaagtcggcggtcgtccccttagcctcagtgtccgtaataccttactgcctggcccaagtgcttggccaaccccacaagaagtcatta

SEQ ID NO: 12867 - DNA, 1071 bp, synthetic construct
  misc_feature 1..1071: note = source = /note="Description of Artificial Sequence: Synthetic coding sequence"
  source 1..1071: mol_type = other DNA
atggaggagggaatgaacgtgctccatgattttggcattcaatcgacccattacctgcaggttaactaccaagattcgcaggactggttcatcctcgtgtccgtgatcgccgatcttcgaaacgcattctacgtgctgtttccgatctggttccacctccaggaggcagtgggaataaagttgttgtgggtggcggtgattggcgactggctgaatttggtgttcaagtggatcctgtttggccaacggccgtactggtgggttctggacactgactactactcaaacacctcagtgccgctgatcaagcagttcccagtgacgtgcgagacgggaccaggatcccctagtggacacgccatggggacggctggagtgtactacgtcatggttaccagcactctctccatcttccaaggcaagatcaagcctacgtacagattccgctgtttgaatgtgatcctctggctgggcttttgggccgtgcagctcaacgtgtgcctttctcgcatctacttggcagctcactttcctcatcaggttgtggcgggagtcctgtcgggaatcgctgtcgcagaaaccttctcgcacattcactcaatttacaacgcctcccttaagaagtatttcctgatcaccttctttctcttcagcttcgccatcggcttctacctgttgctgaaggggttgggggtcgacctgctgtggaccctggaaaaggcccaacgttggtgcgaacagccggaatgggtgcacatcgataccaccccattcgcctcgctgttgaaaaatctcggtacgctgttcggcttgggactcgccttgaattcctccatgtaccgcgaaagctgcaaaggaaagctgagcaaatggctgccgttcaggctttcgtcaatcgtggcctcactggtcctgctccatgtgttcgacagcctcaagccgccatcacaagtcgaactcgttttctacgtgttgtcgttttgtaaatcagccgtggtgccactcgcaagcgtcagcgtcattccttactgcctggcgcaggtgctggggcagccgcataagaagtcactc

SEQ ID NO: 12868 - DNA, 1071 bp, synthetic construct
  misc_feature 1..1071: note = source = /note="Description of Artificial Sequence: Synthetic coding sequence"
  source 1..1071: mol_type = other DNA
atggaagaaggcatgaatgttttgcatgacttcgggattcagtctacgcattacctgcaggtgaattatcaggatagccaagactggtttattctggtgagtgtgatcgcggatctgagaaacgctttttatgtcttgtttcctatctggtttcatttgcaagaggccgtaggcatcaagctgctctgggtcgcagtgatcggcgactggttgaacctggtgttcaaatggatcctgtttggacaacgaccctactggtgggtactggacactgattactactctaatacctccgttcctctgattaagcagtttcctgtcacttgtgaaacgggacccggttccccatccggtcatgccatgggcaccgctggagtgtactatgtgatggtgacctcaacccttagtatcttccaggggaaaataaagccgacatataggttccggtgcctgaacgttattttgtggctgggattctgggccgtacagctgaacgtttgcctgtccagaatctatctggccgcccattttccacatcaagtggtggccggcgtacttagcggcattgctgtggctgaaacgttttcacacatacattcaatttacaacgccagtctgaaaaagtatttcctcattactttcttcctcttctcctttgctatcggcttctacttgctgctgaagggtttgggtgtggacctgctttggaccctcgagaaggcccaacgatggtgcgaacagccagagtgggtgcacatcgacacgacaccattcgcgtcccttctgaagaatctcggaactctcttcgggcttggtcttgcactcaacagctcaatgtaccgcgagagttgtaaggggaagctcagcaagtggctgccgtttcggctcagttccattgtggcctccttggtgttgttgcatgtcttcgattccctgaagcccccctctcaggtggagcttgtgttttatgtgctgagcttttgtaaatccgccgtggtacctttggcatctgtgtcagttataccctattgtctggctcaggtcctgggtcagcctcacaagaaatctctc

SEQ ID NO: 12869 - DNA, 1071 bp, synthetic construct
  misc_feature 1..1071: note = source = /note="Description of Artificial Sequence: Synthetic coding sequence"
  source 1..1071: mol_type = other DNA
atggaggagggcatgaacgtcttacacgactttggtattcagtctactcactatttacaggtgaactaccaggactcccaagactggttcatcctcgtgagcgtgattgccgacctccggaacgcattctacgtgctctttccaatatggtttcacttacaggaagcagtcggcatcaagcttctctgggtggccgtaatcggagattggctgaatctcgtgtttaagtggatcctgttcggacagcgcccctattggtgggtgctggacactgattactattcaaatacctccgttcctctgatcaagcagttccctgtgacgtgcgaaacaggcccaggctccccatctggccatgccatggggaccgctggtgtctattacgtcatggtcacgtcaaccctgtcaattttccaaggaaaaatcaagccgacctaccgcttccgctgtcttaacgtgatactgtggctcggattttgggccgtgcagctgaatgtgtgtctctctaggatatatctggccgcgcacttcccccaccaggtagtcgctggtgtcctgtccggcattgcagtagccgagactttttcccacatacacagcatttacaacgcatcactgaagaaatactttctaatcaccttttttctgttttcattcgctatcgggttctatcttttacttaaaggattgggcgtggatttactctggaccctggagaaagctcagcgctggtgcgaacagcccgagtgggttcatattgacacgacaccttttgcatctttgttgaaaaatctgggtaccctttttggcctgggcctggctctgaacagctccatgtatagggagagctgcaagggtaagctcagcaagtggttgcctttccgactatcatctattgtggccagtctggtcctgcttcacgtttttgattccctgaagccccctagccaggttgaactggtgttctacgtcctttcattctgtaagagcgctgtggtgccgcttgccagcgtatccgtaattccttattgcctcgcccaggtcttaggacagccacataaaaagagcctt

SEQ ID NO: 12870 - DNA, 1071 bp, synthetic construct
  misc_feature 1..1071: note = source = /note="Description of Artificial Sequence: Synthetic coding sequence"
  source 1..1071: mol_type = other DNA
atggaagagggaatgaatgtgcttcatgattttggaatccagtctactcattatctgcaggtgaactatcaggattctcaggattggttcatactcgtatccgtgatcgctgatctgagaaatgccttttatgttttatttcccatctggttccatctccaggaagctgtgggaataaaactcctctgggtggctgtgataggagattggttaaaccttgttttcaaatggatattatttggacagagaccctactggtgggttctcgatacagattattattctaatacttccgtcccgctcataaaacagttccctgtcacatgcgaaacagggcctgggtcccccagtggacacgccatgggaacagccggggtatattacgttatggtaacttccacactctccatatttcaggggaaaataaaaccaacttatcgttttcggtgtctcaacgtgatactctggctcgggttttgggcagtccagctcaatgtgtgcctctcccggatctatctggcagcccattttcctcaccaggttgttgccggagtgctctctggaatagccgtagccgagacattttctcatatacactctatctacaacgcctcgctgaaaaaatacttcctcattacatttttcctctttagttttgccattggattttatctcctgctcaagggactgggagtagatctattatggacgctcgaaaaagcacagagatggtgcgagcagcctgaatgggtgcatatcgatacaactccttttgcatccttattaaaaaatctcgggactctatttgggttgggacttgctctgaacagttccatgtacagggagagttgtaaggggaaattatctaaatggctaccttttagactttctagtatagtggcttctctagttcttctccacgttttcgattcactcaaacccccttcacaggtggaattggtattttatgtgttgtctttctgtaaatctgccgtcgtcccactcgcatcagtgtccgtcattccctattgccttgcacaggttctgggacagccacataagaaatcgttg

SEQ ID NO: 12871 - DNA, 1071 bp, synthetic construct
  misc_feature 1..1071: note = source = /note="Description of Artificial Sequence: Synthetic coding sequence"
  source 1..1071: mol_type = other DNA
atggaggagggaatgaatgtccttcatgactttggcatccaatcaactcactacttgcaggtgaactaccaggattcgcaagactggttcatcctggtatccgtgatcgccgacttgcgcaacgccttctacgtcctgttcccgatctggttccacttgcaggaggccgtgggtattaagctgctctgggtcgcagtcatcggagactggctgaacctggtgttcaaatggatcctgttcggccagcggccatactggtgggtcttggatacggactactactctaacacctcagtccccctgatcaagcagtttccggttacctgcgaaactgggcctggcagcccgagcggccatgcaatgggaactgctggggtgtactacgtgatggtgacctcaactttgtcgatcttccagggcaagattaagccgacctacaggtttagatgcctgaacgtgattttgtggctgggattctgggcagtgcaactcaacgtctgtctgtcgcggatctatctggcggctcacttcccgcaccaagtggtcgcgggagttctgtcgggaatcgcagtggcggagactttctcccatatccactccatttacaatgcctcgctcaagaagtactttctcatcaccttcttcctgttcagcttcgctatcggattctacctgctcctgaaggggctgggtgtggacctgctttggaccctggagaaagcccagcgatggtgtgaacaacctgaatgggttcatatcgataccacgccatttgcgtccctcctcaaaaatcttggtactctcttcggactcggactggctcttaattcttcaatgtacagagaatcgtgcaagggaaaactctccaagtggctcccattccgcctgtccagcatcgtggcgtcgctggtcctgcttcacgtctttgatagtctgaagcccccgtcccaggtggaactggtgttttatgtgctctcgttctgcaagagcgccgtggtgccactggcctcagtgtccgtgatcccttactgcctggcccaggtgctcggccaaccgcacaagaaaagcctc

SEQ ID NO: 12872 - DNA, 1071 bp, synthetic construct
  misc_feature 1..1071: note = source = /note="Description of Artificial Sequence: Synthetic coding sequence"
  source 1..1071: mol_type = other DNA
atggaggagggcatgaacgtgctccacgacttcggaatccagtccacccattacttgcaagtcaactatcaggattctcaggactggtttatcctcgtctcggtcatagccgacctgcgaaacgctttctacgttttgttccccatctggttccacctccaggaggccgttggcattaaactgttatgggtcgccgtcatcggtgattggctcaacctagtctttaagtggatcctgttcggtcagagaccgtattggtgggtactcgacacagattactactctaacacgtccgttcctcttattaagcaatttccagtcacatgtgagacaggtccaggctccccctccggccatgcgatgggcacggccggagtctactatgtcatggtcacctcgacactgtccatcttccaggggaagatcaaacccacataccgattccgatgtctaaacgtgatcctctggctcggattctgggcagtacaactgaacgtctgtctgtctcgcatctacctcgcagcgcactttccccaccaggtcgtggccggtgtgcttagcggtatcgctgtcgcggaaactttcagccacatccattcgatttacaacgccagcctcaagaaatacttcctgatcaccttcttccttttcagcttcgccatcggcttttaccttcttctaaaggggctgggcgtcgatttactctggacacttgagaaagcccagcgctggtgcgaacagcccgaatgggtccacattgacactacgcccttcgcctcattgttgaagaatttgggcaccctctttggactcggtcttgcgctgaactcttctatgtaccgcgaatcatgtaaaggaaagttgtcgaagtggttgcccttccgccttagcagcatcgtagcctcgttggtcctgcttcacgtgttcgactccttgaagccacccagccaggtcgaactggtcttttacgtcttgagcttctgtaagtcggccgtcgtgcctcttgccagtgtcagcgtgatcccttactgtctggcacaagttttaggccagccacacaagaagtccctg

SEQ ID NO: 12873 - DNA, 1071 bp, synthetic construct
  misc_feature 1..1071: note = source = /note="Description of Artificial Sequence: Synthetic coding sequence"
  source 1..1071: mol_type = other DNA
atggaagagggcatgaatgtgctccatgacttcggtattcagagtacgcactacttacaggtgaactaccaggattcacaggattggttcattttagtcagcgtgattgccgacttaaggaatgccttttacgtgttgtttcctatctggtttcacctccaagaggctgttgggatcaaacttctgtgggtggccgtgatcggggattggctcaatttggtcttcaaatggatactgttcgggcagaggccctattggtgggtcctggatactgactactactcgaatacgtcagtgcctctgatcaagcaatttccagtgacttgcgagacaggacctggcagcccgtctggacatgccatggggacagccggcgtgtactatgtcatggtaacaagtaccttgtcaatttttcagggaaaaataaaacctacctatagattcaggtgcttgaatgtaattctttggctcggattctgggccgtgcagctaaacgtgtgcctctcccggatctacctcgctgcacactttccacaccaggtggtcgcgggggtgctcagcggcattgcggtcgctgagactttcagccatattcacagcatctacaacgcttcgctgaagaaatatttccttattacatttttcctcttcagttttgctattggcttctacctgctacttaagggtctaggagtggatctcctctggacccttgaaaaggcacagagatggtgcgaacaacctgaatgggtccacatagacacaactccattcgcctcgctcctgaaaaacctggggactctcttcggattggggcttgctttaaatagcagcatgtatagagagtcttgcaaagggaaactcagtaaatggctgcctttccgtctgtcctcgatcgtagccagcttggttcttcttcacgtgtttgatagtttaaagccccctagtcaggtcgagctggtgttttacgtcctgagcttttgcaagtccgctgtcgtccctctggcgagtgttagcgtgataccttactgtctagcccaggtactcggacagccacacaaaaagtccctg

SEQ ID NO: 12874 - DNA, 1071 bp, synthetic construct
  misc_feature 1..1071: note = source = /note="Description of Artificial Sequence: Synthetic coding sequence"
  source 1..1071: mol_type = other DNA
atggaagagggaatgaatgtgctgcacgattttgggattcaatccacccattacctgcaggtcaactaccaggatagtcaagactggttcattctggtcagtgttatcgccgacctgcggaacgcgttctatgtgctgttccccatctggttccacctgcaagaagctgtgggtatcaagctgctctgggtcgctgtgatcggcgattggctgaacctggtattcaagtggatcctgttcggccagcggccgtattggtgggtcctcgataccgactattactcgaatactagtgtgcctctgatcaaacagttcccggtcacttgtgaaaccgggccaggctcgccaagcgggcatgccatgggaacggccggagtgtactacgtgatggtgacctcaactctctcaattttccaaggcaagatcaaacccacttacagatttagatgcctcaacgtgatactgtggctggggttctgggccgtgcaactcaatgtgtgtctctcgcgcatatacctggcagcccatttccctcatcaagtcgtcgccggcgtgctttcgggcatcgctgttgccgaaactttttctcacattcactcgatttacaacgcgagcttgaagaaatactttctgatcactttcttcctgttttctttcgctattggattctaccttctgctgaagggactcggagtcgacctgctctggaccctggagaaggctcagcgctggtgcgaacagccggagtgggtgcacatcgacactacgccttttgcgtcactgctgaagaacctgggaacccttttcggactgggtttggcattgaattcctcgatgtacagggaatcctgcaagggaaagctgtcgaaatggctcccgttccgactgtcgtccatcgtcgcatccctggtgcttctgcatgtgtttgacagcctgaagccgccttcccaagtggaattggtgttctacgtgttgtcgttctgcaagtccgcagtcgtgccgctggcctcagtgtcagttattccatactgtctggcccaggtgctgggtcagccgcacaagaaaagcctc

SEQ ID NO: 12875 - DNA, 1071 bp, synthetic construct
  misc_feature 1..1071: note = source = /note="Description of Artificial Sequence: Synthetic coding sequence"
  source 1..1071: mol_type = other DNA
atggaggagggcatgaacgtcctccatgacttcggcatccagtccacacactatttgcaagtgaattaccaagactctcaggattggtttatcctggtgagcgtgatcgctgacctgaggaacgctttttacgtcctcttcccgatctggtttcacctgcaggaagcagtcggaatcaaactgctttgggtcgctgtgattggtgactggcttaaccttgtatttaagtggatactttttggacagaggccttactggtgggtgctggataccgactactacagcaatacatctgttcccttgattaagcaatttcctgtcacctgtgagacagggcctgggagcccaagcgggcatgcaatgggaactgcgggagtttactacgttatggtgacgtcgaccctctctatctttcagggaaagatcaagccgacttacaggtttcgctgtttgaatgtgatattatggctgggcttctgggcagtccagcttaacgtgtgcctgtccagaatctacctggccgcccatttcccgcaccaggtggttgccggtgttttgagtggaatcgccgttgccgagacattttcccatatccatagcatctataatgcttcgcttaagaagtatttcttgattacattttttctgttttcctttgcaatcggattttacctactactgaaaggactcggggtcgatctcttgtggacgttggaaaaagctcagaggtggtgcgagcaaccagagtgggttcacatcgacactacacctttcgcaagcctcttgaagaatctcggaaccctctttggactcggactagcattgaactcatctatgtaccgggagagttgcaagggcaaactctccaagtggctgccttttagactgtctagtatcgtcgccagcctggtgctgcttcacgtttttgattctctgaaaccaccttctcaggtggaactggtgttctacgtcttgagtttctgcaaatctgccgtggttcctcttgcaagcgtcagtgtcatcccttactgcctggcccaggtcctgggccaacctcacaagaagtcgttg

SEQ ID NO: 12876 - DNA, 1071 bp, synthetic construct
  misc_feature 1..1071: note = source = /note="Description of Artificial Sequence: Synthetic coding sequence"
  source 1..1071: mol_type = other DNA
atggaagagggaatgaatgtcctgcatgattttggtatacagtcaacacactacttgcaggtcaattaccaggactcacaagactggttcattttggtgagcgtgatcgcagaccttaggaatgctttctacgtgctgttccctatctggttccacctccaggaggccgtgggcattaagctactctgggtcgcagtgataggcgactggctgaatctggtgttcaaatggattctgttcggccagagaccctactggtgggtgctggatactgactactatagcaacacatccgtgccactgataaagcagtttccagtgacttgtgagactggtcctgggagcccatcaggtcatgctatgggtactgctggagtgtattacgttatggtgaccagtacactgagcatatttcaaggaaaaattaaaccaacctaccggttcaggtgcttgaatgtcatactgtggctgggcttctgggcagttcaattgaatgtgtgtctgagccggatatacctggccgctcattttcctcaccaggttgtcgcaggggtgttgtccgggatagcagttgcagagacattttctcacatccacagcatttataatgcctcacttaaaaagtactttctgattactttctttctgttctcctttgccattggcttttatctgctgctcaaaggattaggggtagatttgctttggacactggaaaaagcccagaggtggtgcgagcagccagaatgggtccatatcgatacgaccccctttgcatccctgctgaagaatctagggaccctctttgggttgggacttgcactgaacagtagtatgtaccgggagtcatgtaagggcaagctgtccaagtggctcccttttcggctgtcctcaattgtggcgtcactggtactgctgcacgtgttcgacagtttgaagccgccttcacaggtcgaactggttttttatgtgttatcattctgtaagagtgcagtagtgccattggcctccgtgtccgtcattccttattgcctggcacaggtgctcggccagccccataaaaaatctctg

SEQ ID NO: 12877 - DNA, 1071 bp, synthetic construct
  misc_feature 1..1071: note = source = /note="Description of Artificial Sequence: Synthetic coding sequence"
  source 1..1071: mol_type = other DNA
atggaagaaggcatgaacgtgcttcatgactttgggatccaatccactcactatctccaggtcaactaccaggactctcaagattggtttattctggtcagtgtaattgccgatctgaggaatgccttctacgtcctgttcccaatatggttccacttgcaggaggcagtcggcattaagcttctttgggttgcagtgattggggattggcttaatttagtatttaagtggattctgtttgggcagcgcccctattggtgggtcctcgacacagactattatagtaacacgtcagtgcccctgatcaaacagtttcctgtcacgtgcgagacgggacccggcagtccgtctggccacgccatgggcacagcaggggtctattacgtgatggtgacctctaccctgagcatcttccagggaaagataaagcctacctacaggtttaggtgcttgaacgtgatcctttggctggggttctgggcagtccaattgaatgtctgcctatcccggatatatctggccgcacattttccacaccaggtggtcgcaggcgtgctgtctgggatcgctgtggcagaaactttcagccacatccactccatctataacgctagcctgaaaaaatacttcctgatcacttttttcttgtttagctttgctattggtttctatctgctgctcaaagggctgggggtggatctgctgtggacccttgagaaggcacaacgctggtgcgagcaaccagagtgggtgcatatcgacacaactccatttgccagcttgctcaaaaacctcgggaccctttttgggctcggattagctttgaatagctctatgtacagggaatcctgcaaggggaagctctccaagtggcttccctttagactgtccagtatcgttgcttctctggtattgttgcatgtatttgacagtttgaaacccccaagccaagttgagctcgttttctatgtccttagcttttgcaaatcggctgtggtgcctctggcgtccgtgtctgtgataccatactgcctggcccaggtgctgggccagccacataagaaatcactt

SEQ ID NO: 12878 - DNA, 1071 bp, synthetic construct
  misc_feature 1..1071: note = source = /note="Description of Artificial Sequence: Synthetic coding sequence"
  source 1..1071: mol_type = other DNA
atggaagaaggcatgaatgtgctccatgattttggaattcagtccacccattacttgcaggtcaactatcaggattcccaagattggtttattctggtgtcggtcatcgctgatcttcggaacgccttctacgtgctgttccctatctggtttcacctgcaggaggccgtgggcatcaagctgctctgggtcgctgtcattggggactggctgaatctcgtgttcaagtggatcctgttcggccaaagaccctactggtgggtgctcgacactgattactactcgaacacttccgtccccctgataaagcagttccctgtcacctgcgaaaccggcccgggaagcccgtcgggccatgctatgggaactgcgggagtgtactacgtgatggttacttcgactctgtcgatctttcaaggaaagatcaagccgacctaccggtttaggtgtctcaatgtgatcctttggctcggattctgggctgtgcagcttaatgtgtgcctctcgcggatctacctggccgcccatttcccacaccaggtggtggcgggggtgctcagcggcatcgctgtcgcagagacgttcagccatattcacagcatttacaacgcctccctcaaaaagtactttctgataacgttctttcttttttccttcgccattggattctacctgctgctcaagggactcggagtggatctgctgtggactctggaaaaggcacagagatggtgcgaacagcctgagtgggtgcacatcgacaccaccccgttcgcctcgctgctgaaaaacctcggaaccctgttcggattgggactggcgctgaacagctcgatgtatagagaaagctgcaagggtaaactgtcaaagtggcttccctttcggctgtcctccattgtcgcttcgctggtgctcctgcacgtgttcgactccctcaagccgccgtcgcaagtggaattggtgttttacgtgctctctttctgtaaatcggcggtggtgcctctggcatcagtgtcggtgatcccatactgccttgcccaagtgttggggcagccccataagaagtcgctg

SEQ ID NO: 12879 - DNA, 1071 bp, synthetic construct
  misc_feature 1..1071: note = source = /note="Description of Artificial Sequence: Synthetic coding sequence"
  source 1..1071: mol_type = other DNA
atggaagagggcatgaacgtgctccacgatttcggcatccaatcgactcattacctgcaggtgaactaccaagattcccaggattggtttatcctggtgtccgtcatcgcggacctgaggaatgccttctatgtgctgttccccatctggtttcatctgcaagaagcggtggggatcaaattgctctgggtggcagtgattggggactggctgaacctggtctttaagtggatcctgttcggacagcgtccttactggtgggtgttggacaccgattactactccaatacctcggtgccgctcatcaagcaattcccagtcacctgcgaaaccggaccgggctcgccttcaggtcacgcaatgggaaccgccggtgtgtactacgtgatggtgacttccaccctctccattttccaagggaagatcaagcccacttacagattccgctgcctgaatgtgatcctgtggctcgggttctgggcggtgcagttgaacgtctgcctgtcgagaatctacctggcagctcatttcccgcatcaggtcgtggccggtgtgcttagcggtatcgctgtggccgagactttctcacacatccactcgatctacaacgcctcgttgaagaaatacttcctgattaccttcttcctgttctcattcgcgatcgggttctacttgctcctgaagggtctgggagtggatctcctgtggacgctggagaaagcccagagatggtgcgagcagccagaatgggtccacatcgacaccaccccgttcgcgtcgctgcttaagaatctcggcactctgttcgggctgggactcgcgctcaacagctcgatgtaccgggagagctgtaagggcaagctgagcaagtggctcccgttccgcctttcatcaatcgtcgcctcgctggtcctgttgcacgtgtttgacagcctgaagccaccgtcgcaggtggaacttgtgttttacgtgctgtcgttttgcaaaagcgcagtggtgccgctcgccagtgtttcagtgatcccatattgcctggctcaagtcctgggccaaccacataagaaatccctg

SEQ ID NO: 12880 - DNA, 1071 bp, synthetic construct
  misc_feature 1..1071: note = source = /note="Description of Artificial Sequence: Synthetic coding sequence"
  source 1..1071: mol_type = other DNA
atggaagaaggcatgaatgttttgcacgactttggaatccagtcgacccattacttgcaggtcaactaccaggattctcaggactggttcattctggtaagcgtgattgcagatcttcggaacgcattctacgtgctgtttcctatctggttccatttgcaggaagccgtcggtatcaaactcttgtgggtcgccgtgattggagactggctcaaccttgtctttaagtggattttgtttgggcagaggccatactggtgggtgctggatactgactactactcgaacacgagcgtgcctctcatcaaacagttccccgtgacctgtgaaaccggacccggttccccgagcgggcatgctatggggaccgcaggagtgtactacgtgatggtgactagcacgctctcaatctttcaaggcaagatcaagcctacctatcgcttcaggtgtcttaatgtgattctctggcttggattttgggcagtccagctgaacgtgtgcttgtcccgaatatacttggctgcacactttcctcaccaggtggtggcaggggtgctgagcggcatcgccgtggcagaaactttttcgcatatccattccatatacaatgcttcactcaaaaagtatttcctgattaccttttttctttttagctttgcaataggattctacctgcttcttaagggtctgggtgtggatttgctctggactcttgagaaagcgcaacggtggtgtgagcaacccgaatgggtccatatcgacaccaccccatttgcctcgctgctgaaaaatctcggcactctcttcggcctgggtttggccctcaattcatccatgtaccgcgaatcgtgcaaaggaaagctgtccaagtggcttccattcagacttagctcgattgtggcctcgctggtcctccttcatgtgttcgatagtctcaagcctccttcgcaagtcgagctggtgttttacgtgcttagcttttgcaagtcggcagtggtcccactggcatcggtgtcggtgataccttactgtctcgcgcaagtactgggccagccccacaagaagtcgctt

SEQ ID NO: 12881 - DNA, 1071 bp, synthetic construct
  misc_feature 1..1071: note = source = /note="Description of Artificial Sequence: Synthetic coding sequence"
  source 1..1071: mol_type = other DNA
atggaagaaggtatgaatgttcttcatgattttggaatacaaagtacacattatttacaagtaaattatcaagattcacaagattggtttatccttgtttcagttattgcagatttaagaaatgctttctatgtactttttccaatttggtttcatcttcaagaagcagttggaattaaattattatgggttgcagttattggagattggctaaatttagtttttaagtggatattatttggacaaagaccatattggtgggttcttgatacagattattattcaaatacttcagttccattaattaaacaatttcctgtaacttgtgaaacaggtcctggatcaccaagtggacatgctatgggtactgcaggagtttactatgtaatggttacttcaacactttctatttttcaaggaaaaataaaaccaacttatagatttagatgtttaaatgttatactttggctaggattttgggctgtacaacttaatgtttgtttaagtcgtatttatttggctgcacattttccacatcaagttgttgctggagtgttatcaggtattgcagttgctgagacattcagtcatatacattctatttataatgctagtctaaaaaaatattttcttataactttttttcttttttcatttgctattggattttatcttttgcttaaaggattaggagttgatttactttggacacttgaaaaagctcaacgatggtgtgaacaacctgaatgggttcatatcgatacaactccatttgcatcattattaaaaaatttaggaactctttttggattaggacttgcactaaattcttctatgtatcgagaatcatgcaagggtaaattatcaaagtggttaccattcagactttcttctatagttgcatcattagttttattacatgtttttgattctttaaaacctccaagccaagttgaattagttttttatgttttatctttttgtaagtcagcagttgttccattagcaagtgtaagtgttattccatactgtcttgctcaagtattaggacaaccacataagaaatcatta

SEQ ID NO: 12882 - DNA, 1071 bp, synthetic construct
  misc_feature 1..1071: note = source = /note="Description of Artificial Sequence: Synthetic coding sequence"
  source 1..1071: mol_type = other DNA
atggaggagggaatgaacgtgctgcacgattttggaatacagagcacacactatctgcaggtgaactatcaggacagtcaagattggttcattctcgtgtcggtcattgccgacttacggaacgctttctatgtgcttttccccatctggttccacctgcaggaggcggttggcatcaaactattatgggtcgccgtaattggtgattggctgaatttggtctttaagtggattctcttcggccaaagaccttattggtgggtgcttgacacagattattactcaaacacatctgtcccccttatcaagcagttcccagttacatgcgagaccggtccgggctctccgtccggccacgcaatgggtacagccggggtgtattacgttatggtgacttcaactttatccatcttccagggtaaaatcaagccaacgtaccgattcagatgcctgaacgtgatactgtggctgggattctgggcggtgcaattgaacgtatgcctctcgcgtatttacttagcggctcatttcccccatcaggtggtcgctggagttctatcgggaattgccgtcgctgaaaccttttcgcacatacactcgatatacaatgcgtcattgaaaaagtactttctgattactttcttcttgttcagtttcgctatcgggttttacctgctgttaaagggactgggcgtcgacttgttgtggactctggagaaggctcagcgttggtgcgaacaaccggagtgggtacatatcgacacaacaccgtttgcgtctctgctcaagaatcttggtacactgttcggcctgggattagccctgaactccagcatgtaccgagagtcgtgcaagggcaagctgtcgaagtggctgccattccgccttagctcaatcgtggcgagtcttgtgctgctgcacgtatttgatagcctgaagccaccgagccaggtagaattggttttttatgtcttgtcgttctgcaaatctgccgtggttccactcgcctcggtgagtgtcattccctactgcctggcccaggtcctgggacaaccccataagaaatcgctg

SEQ ID NO: 12883 - DNA, 1071 bp, synthetic construct
  misc_feature 1..1071: note = source = /note="Description of Artificial Sequence: Synthetic coding sequence"
  source 1..1071: mol_type = other DNA
atggaggagggtatgaacgtactgcatgacttcggtattcagagcactcactacttgcaagtcaattaccaggactcacaggattggttcatcctggtgagtgtgattgccgaccttaggaatgcattttacgttctgttccccatttggtttcacttgcaggaagctgtgggtataaaactgttgtgggtggccgtaattggagactggctcaatctggtctttaaatggatcctgtttggacaacgaccgtactggtgggtgctggacactgactactattctaatacgtctgtgcccctaatcaaacaattccccgtaacctgtgagacaggcccggggtctccctccggacatgctatgggtactgccggggtctactacgtgatggtaacttccaccctaagtatttttcaaggtaagattaaacccacctacaggtttaggtgcttaaatgtcattctctggcttgggttttgggctgtgcagttaaatgtctgcttgagccgcatctacctggcagctcacttcccccaccaggtggtggcaggcgtgctgtctgggatcgcagtagcagaaacgttcagtcatatccacagtatatataacgcatcactcaagaaatactttttaatcacattctttctattctcttttgctattgggttttacctccttttgaaggggctgggagtggacctcctatggacactggaaaaggcgcagagatggtgtgaacaaccagaatgggtacatatagatacaacgcccttcgcaagcttgcttaagaacctggggaccttgttcggacttggactcgccctgaactcatcaatgtaccgcgaaagctgcaaagggaaactctccaaatggcttccctttcggctgagctctatcgtcgcatccctggtgctcctgcatgtgtttgacagtctcaaacctccttcacaagtggagttggtgttctacgttttgtcattctgtaaaagcgcagtcgttcccttggcaagcgtgtctgtgataccatactgcctcgcccaagtccttggccaacctcacaaaaaatccctg

SEQ ID NO: 12884 - DNA, 1071 bp, synthetic construct
  misc_feature 1..1071: note = source = /note="Description of Artificial Sequence: Synthetic coding sequence"
  source 1..1071: mol_type = other DNA
atggaagaaggaatgaatgtcctccatgatttcggaattcagtcgacccattacttgcaagtcaactaccaagacagccaagactggtttattcttgtttcggtgattgcagatctccgtaacgcattttacgtgttgtttccaatctggtttcacctgcaagaagccgtgggtataaagctcctgtgggtggcagtgatcggagattggcttaatctggtctttaagtggattctttttggacagaggccctactggtgggtgttggataccgactactactcgaatacctccgtgccactgataaagcaatttcccgtcacttgcgagactgggcctggctcgccctcgggacacgcgatgggaaccgcgggtgtgtactacgtcatggtcacttccactcttagcatatttcagggaaagattaagcccacctaccgctttaggtgtctcaatgtgattctgtggctgggcttttgggcagtgcaacttaacgtgtgcctgtcgagaatttacctcgcagcccactttcctcatcaggtcgtggccggagtgctgtcaggtattgcagtggccgaaacttttagccacattcattcaatttacaatgcctccctgaaaaagtactttcttatcacttttttcctgttctcatttgcgataggattttaccttctgctgaaaggcctcggggtggacttgctttggaccctcgaaaaagcacagcggtggtgcgagcaacctgagtgggtgcacattgatactactccttttgcctcgctgcttaagaatcttggaacgctgtttggcttgggtcttgcattgaacagctcaatgtaccgtgaaagctgcaagggcaagctgtccaagtggcttcctttcagactgtcatccatcgttgcgagccttgtccttcttcacgtgttcgactctctcaagccaccatcacaagtcgagctggtgttttacgtgctgagcttttgtaagagcgctgtcgtgccgctcgcatccgtgtccgtgatcccatactgccttgcacaagtcctcggacagccacataagaagtcgctt

SEQ ID NO: 12885 - DNA, 1071 bp, synthetic construct
  misc_feature 1..1071: note = source = /note="Description of Artificial Sequence: Synthetic coding sequence"
  source 1..1071: mol_type = other DNA
atggaggagggtatgaacgtactgcacgacttcggtatacagtcaacacactacctgcaggtgaactatcaagactcacaagattggttcattctggtcagtgtaattgccgacctgcggaatgccttctacgtgctgttccctatttggttccacctccaggaagccgtaggtatcaagcttctctgggtcgctgtgataggggactggctgaatctagtctttaaatggatactttttggacagaggccctattggtgggtcctggatacagactactatagcaacacgtccgtcccccttataaagcagttccctgtcacctgtgagaccgggcctggttcacctagcggccatgctatgggcacagcgggtgtctattacgtgatggtaacgtccacgctgtccatattccagggtaaaatcaagccaacttacagattccggtgtttgaatgtgatcctgtggctggggttttgggcagtgcagcttaacgtctgcttgtcaaggatctatttggcagcgcatttcccccaccaggtggtggcaggggtcctgagtgggatcgctgtagctgaaacattttcccatatacacagtatttacaatgcgagcctgaagaaatactttcttattacttttttcttgttctcattcgcaattgggttctacctgctgctgaaggggcttggggtcgacctgttgtggactctcgaaaaggcacagcgctggtgtgagcagcccgaatgggtgcatatcgataccactccgtttgccagtttactgaagaacctgggaacattattcggacttggtctagccttaaattcttctatgtatagggaatcatgcaaagggaaactcagtaagtggctaccgtttcgccttagctccatcgtagccagcctagtgctcctgcacgtatttgactcacttaagcccccatcgcaggtggagcttgttttctatgtcctgagtttctgcaaatcggcagttgtgccactggcttccgtcagcgtgatcccctattgtttggcgcaggtccttgggcagccgcataaaaagtcgctg

SEQ ID NO: 12886 - DNA, 1071 bp, synthetic construct
  misc_feature 1..1071: note = source = /note="Description of Artificial Sequence: Synthetic coding sequence"
  source 1..1071: mol_type = other DNA
atggaggaaggtatgaacgttttgcacgattttgggatccaatctactcactacctgcaggtgaattaccaggactcccaggactggttcatcctggttagcgtcatcgcggacctccggaatgctttctacgttctgtttccgatttggtttcatctccaggaggccgtcggtatcaagctgctctgggttgcagtaatcggagattggcttaacctcgtgttcaagtggatccttttcggacaacgaccatactggtgggtgctggatactgactactactccaatacctctgtgccactgatcaagcagtttccggtgacttgtgaaaccggtccaggctcaccaagcggccacgccatgggaaccgcaggagtctactacgtcatggtcacctcaaccctgtcgattttccaagggaaaatcaagcccacctacaggttccggtgtctgaacgtgatcttgtggcttggtttctgggcggtccaactcaacgtttgcctgtcgagaatatacctggcggcccacttcccacatcaggtggtcgcgggagtgttgtcgggaatcgcggtcgccgaaacttttagccatatccactcaatctacaacgcctcactgaagaaatacttcctcattaccttttttctctttagcttcgcaatcggattctacctgctgctcaaagggctgggtgtggacctcctgtggactttggaaaaagcccaaaggtggtgcgaacaacccgaatgggtccatatcgatacgactccattcgcctccctgctgaaaaatctgggcactctgtttggcctgggactggccctcaactccagcatgtaccgggagtcgtgtaagggtaagctgtctaagtggttgccgttccggctgtcgtcgatcgtggcatcgctggtgctgctccacgtgttcgactcactcaagccgccttcccaggtggaactggtgttctacgtgctgagcttttgcaagtcggccgtggtgccgctcgcctcggtttcagtgattccgtattgcctggcccaagtgctcgggcagccacataagaagtccctt

SEQ ID NO: 12887 - DNA, 1071 bp, synthetic construct
  misc_feature 1..1071: note = source = /note="Description of Artificial Sequence: Synthetic coding sequence"
  source 1..1071: mol_type = other DNA
atggaagaggggatgaatgtgctccacgattttggaatacagtcaacccattacctccaggtgaactaccaggactcccaagattggtttattctcgtatcggttatcgcagatttgaggaatgcattttacgtgttgttccctatctggttccacctgcaggaagccgtagggattaagctgctctgggtcgccgtcatcggagattggctgaatctggtcttcaagtggattctctttggacaaaggccttactggtgggtcctcgacacagactattattccaacacttccgtgccccttataaagcagttcccggtcacctgcgaaacaggaccgggaagccccagtggccacgcaatgggcaccgcaggagtttactatgtgatggtgacctccacactgtcaatcttccagggcaaaatcaagccaacatatcgctttcggtgtcttaatgtaatcctctggttggggttttgggccgtgcagttgaatgtgtgtttgtccaggatttatctggcagcccatttcccacatcaggttgtggccggcgttctttctgggatcgcagtagcagagactttttcacacattcacagtatctacaatgcatctcttaaaaaatacttcctgattacattcttcctcttcagtttcgctattggtttttatctgctgctcaagggtctaggtgtggatctgctttggacattggagaaagcacagcgatggtgcgagcaaccagagtgggtccacattgataccacccccttcgcctcgctgcttaagaacctgggtaccctgtttgggcttggcctggccctgaattccagtatgtaccgggagtcctgcaaagggaagttatctaaatggttgcctttcaggttgagctctatagttgctagcctggtcctcttgcacgtattcgactcgctgaagcccccttcccaggttgaactggtgttttacgtgctctctttttgtaagagtgctgttgtgcctcttgcctcggtgtctgtcattccatattgccttgcacaagtactcgggcagccccataaaaagagcctg

SEQ ID NO: 12888 - DNA, 1071 bp, synthetic construct
  misc_feature 1..1071: note = source = /note="Description of Artificial Sequence: Synthetic coding sequence"
  source 1..1071: mol_type = other DNA
atggaggagggcatgaatgttctgcatgacttcggcatccagagcacacactatctccaagtgaattatcaggatagccaagactggttcatcctagtgagcgtcatcgcagatctgaggaacgccttctacgtgctctttcctatctggttccatctgcaagaagctgtaggaatcaagctgctttgggtcgccgtcatcggcgattggttgaacctggtctttaagtggatcctctttgggcagcgaccttattggtgggtgctggatactgactattattccaatacttctgtaccccttattaaacaattccccgtgacctgtgagacaggtccaggatccccttctggccatgccatgggaaccgcgggggtgtattatgttatggtcaccagcaccctttccatcttccaggggaagatcaagccaacatacaggttccggtgcctgaatgtgattctttggctgggcttctgggctgtccaactgaacgtttgtttgtcccgtatctatctcgcagcccatttcccccaccaggtggtggctggcgtcctaagcgggatcgccgtcgccgagaccttctcccatatccacagcatctataacgcatctttaaagaagtattttctgatcacattctttctgttttctttcgctatcggattctatctcctcctgaaaggactcggcgtcgatctgctgtggaccctggaaaaggcgcagcggtggtgcgagcaacccgagtgggtccatatagacaccacgccatttgcctcactgctcaaaaatcttgggacattgtttggactgggtctggctctgaactcttcaatgtaccgtgagtcctgcaaaggcaaactcagcaaatggctaccattccgcctgagcagcatcgtggcttccttagtgctgctccatgtgtttgattcactgaagcctccctcccaggtggagctggtgttctacgtcctgagcttctgcaaatcggcagtcgtccctttagcaagcgtgagcgtgattccgtactgcctggcccaggtcttggggcaaccccacaaaaaaagccta

SEQ ID NO: 12889 - DNA, 1071 bp, synthetic construct
  misc_feature 1..1071: note = source = /note="Description of Artificial Sequence: Synthetic coding sequence"
  source 1..1071: mol_type = other DNA
atggaggaagggatgaacgtgctacatgactttgggattcagtctacacactatctgcaagtgaactatcaagatagccaggactggttcatactggtaagtgtgattgccgacctccgcaacgctttttacgtcctatttcctatctggttccacctgcaggaagctgtgggtattaaattactatgggttgcggtaatcggtgattggctcaaccttgttttcaagtggattttattcggacaaaggccttattggtgggttctggacacagactactattccaatacaagtgttcctctaattaaacagtttcccgtgacatgtgagacagggcctggctctccttctgggcacgctatgggaactgctggcgtgtattacgtgatggtgactagcacgcttagtattttccagggtaagatcaagccgacctaccgatttaggtgtttaaacgtcattctctggctcggattctgggcggtccagctaaacgtgtgtctttcccgcatttatctggctgctcacttcccccaccaggtagtcgccggcgttctgagtggcatcgccgtcgccgagacgtttagtcatatccactctatatacaacgcctcactaaaaaagtatttcctgatcaccttcttcctgttcagctttgctatcggattctacttgctgctcaagggcctcggtgtcgatcttctgtggaccctggagaaggcccagagatggtgcgagcagcctgaatgggttcatatcgatacaactcctttcgcttcgctgttaaagaacctcggcacactgtttggtctcggactggcactcaattcttccatgtaccgagaaagttgcaagggaaagctgagcaagtggctgccattccgcctgtcttcaatcgtggccagcctggtgctgctccacgtcttcgactcccttaagccaccctcccaggtagagctcgtattctacgtgctgagcttttgtaagagcgcagtggtgccactagcctccgtgagcgtgataccgtactgtctggcccaggtccttgggcagcctcataaaaagtcccta

SEQ ID NO: 12890 - DNA, 1071 bp, synthetic construct
  misc_feature 1..1071: note = source = /note="Description of Artificial Sequence: Synthetic coding sequence"
  source 1..1071: mol_type = other DNA
atggaagaggggatgaacgttctccatgactttggcattcagtccacacattatctgcaggtaaactatcaggattcccaggattggtttatcctcgttagcgtcatcgctgatttgagaaacgccttctacgttctcttcccaatttggtttcatctgcaggaggctgtcgggattaagctgttatgggtagccgtaatcggagactggttaaatctggtcttcaagtggatcttgttcggccagagaccgtactggtgggtactagatactgattattacagtaacacctctgttcccctgatcaagcagtttccagttacatgcgaaaccggccctgggagccctagtggccacgccatggggacagctggcgtgtactatgtgatggtgacttcgacactgagcatttttcaagggaaaattaaacctacatacagatttaggtgcctcaatgtaatactttggctgggcttttgggccgttcagctcaatgtgtgtctctctcgaatttatctggccgctcacttccctcaccaggtcgtggctggggttctctctggaatagccgttgcagagactttttcccacatccatagtatctacaacgcttctctgaagaaatattttctgattacttttttcttgttttcattcgctattgggttctacctcttgctaaaaggcctgggtgtggacttgctgtggaccctggaaaaggcccagcggtggtgtgaacagcccgagtgggtacacatagataccacgccttttgccagtctcctgaagaatttaggcaccctgtttggtctcggactggctctaaacagctctatgtatcgggagtcctgtaagggaaagctttctaaatggctgcctttcaggttatctagcattgtggccagcttggtgctgcttcatgtgtttgacagcctgaaaccaccttcgcaggtcgagctggtgttctatgtgctctccttctgcaagtcagctgtagtccctctggcctccgtctcagtgattccttactgcctggcgcaggttttgggtcagccccacaagaaatcactg

SEQ ID NO: 12891 - DNA, 1071 bp, synthetic construct
  misc_feature 1..1071: note = source = /note="Description of Artificial Sequence: Synthetic coding sequence"
  source 1..1071: mol_type = other DNA
atggaagagggtatgaatgtccttcacgacttcggcatccaaagcacccattatctccaagtcaactaccaggattcccaagactggttcatcctcgtctccgtgattgcggacctgcgtaatgcattctatgtcctcttcccgatctggttccatcttcaagaagccgtgggaatcaagctgctgtgggtggctgtcatcggggattggctcaatcttgtgttcaagtggatcctcttcggccagcggccgtactggtgggttctggacacggattactactccaacaccagcgtcccacttatcaagcagttcccggtgacgtgcgagactggtcctggatcgcccagcggccatgctatgggcaccgccggtgtgtactacgtgatggtgacctccaccttgagcatctttcaaggcaaaatcaagccgacctaccggttcaggtgcctcaacgtgatcctgtggctgggattctgggccgtccagctcaatgtctgtctgagccgaatttacctcgcggcccactttccacaccaggttgtggcaggagtgctctccggaattgcagtcgccgaaaccttctcacacatccattccatttacaacgcctccctcaaaaagtacttcctgatcactttctttctgttttcgtttgcaattgggttctacctcctgctgaagggactcggagtcgacctcctctggactcttgaaaaggctcagagatggtgtgaacaacctgagtgggtccacatcgacactactccgttcgcctcccttctcaagaaccttggtactctgttcggattgggactcgcgctcaactccagcatgtaccgggagtcatgcaaaggaaaactgtcgaagtggctccccttccggctttcgtcaatcgtggcgtcgctggtgttgctccatgtgttcgatagcctgaagccgccttcacaagtggaactggtcttttacgtgctgtcattctgcaagtccgcggtggtgccgctggcgtcagtgagcgtcattccatactgcctggctcaagtgctcggccagccacacaaaaagagcctg

SEQ ID NO: 12892 - DNA, 1071 bp, synthetic construct
  misc_feature 1..1071: note = source = /note="Description of Artificial Sequence: Synthetic coding sequence"
  source 1..1071: mol_type = other DNA
atggaagagggaatgaacgtgctgcacgattttggcattcagagcacccactaccttcaggtcaactaccaggattcgcaagactggtttattcttgtgagcgtgatagcagaccttcgcaatgccttttacgttctcttccccatctggtttcatcttcaggaagccgtgggtattaagttgctgtgggtggcagtgattggcgactggctcaacctggtgttcaaatggattctgtttgggcagcgcccttactggtgggtccttgataccgactactatagcaacacttcagttcctttgatcaaacaatttcctgtcacttgcgaaaccgggccgggttccccttccggccacgctatggggaccgcaggcgtgtactacgtgatggtcacctcgaccctttcgatttttcaaggaaagatcaagccaacttaccgattcagatgtctcaacgtgattctctggctcggtttttgggctgtgcaactgaatgtctgtctcagcagaatatacttggcagctcatttcccccaccaagttgtcgcaggtgtgctgagcggcattgcagtggccgaaaccttttcgcacattcactcaatctacaacgcatccctgaaaaagtactttctgattaccttttttctgttctcgtttgcaattggattttaccttcttttgaagggacttggtgtggatcttctttggactctcgaaaaggcacagcggtggtgtgaacaacctgaatgggtgcatatcgataccacgccatttgccagccttcttaagaaccttggaaccctgtttggtctgggacttgccctgaactcatcaatgtacagagaatcatgcaaaggcaagctgagcaagtggcttccttttagactgtcatcaatagtggcatcacttgtattgttgcacgtgtttgattcgctcaagccgcccagccaagtggagctggtgttttacgtgctctcgttttgtaagtccgctgtcgtgccactcgcaagcgtgtcggtgattccttattgtctggcacaggtccttggtcaaccacacaaaaagtccctc

SEQ ID NO: 12893 - DNA, 1071 bp, synthetic construct
  misc_feature 1..1071: note = source = /note="Description of Artificial Sequence: Synthetic coding sequence"
  source 1..1071: mol_type = other DNA
atggaggaagggatgaacgtgctccatgattttggtattcaatcgacccactacctgcaggtcaactaccaggattcccaagactggttcattctcgtgtccgtgattgctgacctcagaaatgcgttttacgtcctctttcctatatggttccatctgcaagaagcagtcggcataaagctgttgtgggtcgcagtcataggagattggctcaacctggtctttaagtggatcctctttgggcaaagaccttactggtgggtgctcgacactgattactactcgaatacttcggtccccctcattaagcaattccctgtcacttgtgaaaccggccccggttccccttcaggtcacgcaatgggtaccgcaggcgtgtactacgtcatggtgacttccactctgtcgatctttcaaggcaaaatcaagcctacttaccgcttccggtgtcttaatgtcatcctttggctgggtttctgggcagtgcagctgaacgtgtgcctgtcacggatttatctggcagcgcatttcccgcaccaagttgtggccggggtcctttccggtatcgccgtcgcagaaactttttcccatattcatagcatctacaacgcatccctgaagaagtacttccttattactttctttctgtttagcttcgcaattggtttctaccttcttctgaagggtctgggtgtggatctgctttggactctcgagaaggcacagaggtggtgcgaacaacctgaatgggtccatatagatactacccccttcgcatcgctcctgaagaatctgggaacgctctttggactcggacttgcgcttaattcgtcgatgtacagagaatcatgcaagggaaaacttagcaagtggttgcccttcagactttcctcaattgtagcgtcactcgtgctgctgcatgtgtttgatagcctgaagccaccatcacaagtggaactggtgttctacgtgcttagcttttgtaagagcgcagtggtgcctctggcatcggtcagtgtgattccctactgtctggctcaggtattgggccagccacacaaaaagtccctc

SEQ ID NO: 12894 - DNA, 1071 bp, synthetic construct
  misc_feature 1..1071: note = source = /note="Description of Artificial Sequence: Synthetic coding sequence"
  source 1..1071: mol_type = other DNA
atggaggagggtatgaatgttttgcatgatttcggtattcaaagtacccattacttacaggtcaactaccaggatagccaagattggttcattctggtttccgttatcgcagatctcaggaatgccttctatgtcctgttccctatctggtttcacctgcaagaagcagtggggatcaagctgctgtgggtagctgttatcggagactggctaaatttggtgtttaaatggatcctctttggtcaaagaccctactggtgggtcttggatactgattactactctaacacaagtgtgcctctgataaagcagttccccgtgacctgtgaaaccggccctgggagccccagtggtcacgccatgggcaccgccggcgtatattatgttatggtgacgtccacgctttccatctttcagggaaagatcaagcctacataccgtttccggtgcctcaacgtaattttatggctggggttctgggccgtgcaacttaacgtttgtctgtcacgcatctatcttgctgctcacttcccccaccaggtagtagccggagtcctgtcaggtatcgccgtagccgaaacgttcagtcacatccactccatttacaacgcttccctcaagaagtacttcttgattaccttctttctgttcagctttgccatcgggttctacttactgctgaaagggctgggtgtggacctgctttggaccttggaaaaagcgcaacgatggtgcgagcagccggaatgggtgcacattgatactaccccattcgcttctctgctcaaaaatctcggaaccctctttgggctgggcctggccttaaactcaagcatgtaccgtgaatcgtgcaagggcaaactctcaaagtggctgccgttccgattatcctccatcgtggcaagcctggtgcttttgcacgttttcgactccctgaagcctccaagtcaagtggaattggttttttacgtgttgtccttttgcaagtccgctgtcgtccctctggcatccgtatccgtcatcccgtattgtctcgcccaggtgctgggtcagccacacaaaaagagtctt

SEQ ID NO: 12895 - DNA, 1071 bp, synthetic construct
  misc_feature 1..1071: note = source = /note="Description of Artificial Sequence: Synthetic coding sequence"
  source 1..1071: mol_type = other DNA
atggaggaaggcatgaacgtgctgcacgactttggaattcagtcgacccactacctgcaagtcaactaccaagattcgcaagactggtttatacttgtgagcgtcatcgcggatctgagaaacgcgttctacgtgcttttcccgatctggttccatctccaagaggctgtgggcatcaaacttctgtgggttgccgtcatcggtgactggctgaaccttgtattcaaatggattctctttggacagcgcccgtactggtgggtgctcgataccgattactacagcaacaccagtgtgcctttgatcaagcaattccctgtgacgtgtgaaactggtccgggatctccatcgggacacgctatggggaccgccggcgtgtactatgtcatggtaacttccaccctctcgattttccagggcaagatcaagccgacctaccgttttcgctgcttgaacgtgatcctttggttgggattctgggccgttcagctcaatgtgtgcttgagccggatctatctggccgcgcatttccctcaccaggtcgtggctggtgtgctttcgggaatcgccgtggccgagactttttcacacatccattcaatctacaatgcttcactgaagaagtacttcctgattactttcttccttttctcctttgcaatcgggttctacctgctccttaagggactcggggtcgacctgctgtggacgctggagaaggctcagcggtggtgcgaacagcccgaatgggtgcacatcgacaccactccgttcgcgtcgctgttgaaaaatctgggtaccctttttggcctcggactcgcattgaattcgagcatgtaccgcgaatcgtgcaagggaaaactgagcaaatggctcccattcagactgagttctatcgtggcatccctcgtccttctgcacgtgttcgactcgctgaagccaccgtcccaagtggagttggtattctacgtgctctctttctgcaagtccgcagtggtcccactggcctcagtttccgttatcccatactgtctggcccaggttctcgggcagccccataagaagtcactg

SEQ ID NO: 12896 - DNA, 1071 bp, synthetic construct
  misc_feature 1..1071: note = source = /note="Description of Artificial Sequence: Synthetic coding sequence"
  source 1..1071: mol_type = other DNA
atggaagaaggtatgaatgtattacatgattttggtatacaatcgacgcattatttacaagtaaattatcaagattcgcaagattggtttatattagtatcggtaatagcggatctacgaaatgcgttttatgttctatttccgatatggtttcatctacaagaagcggtaggtataaaattactatgggttgcggtaataggtgattggctaaatttagtttttaaatggatattatttggtcaacgtccgtattggtgggttttagatacggattattattcgaatacgtcggttccgctaataaaacaatttccggtaacgtgtgaaacgggtccgggttcgccgtcgggtcatgcgatgggtacggcgggtgtatattatgtaatggtaacgtcgacgttatcgatatttcaaggtaaaataaaaccgacgtatcgttttcgttgtctaaatgttatattatggttaggtttttgggcggtacaactaaatgtatgtttatcgcgtatatatctagcggcgcattttccgcatcaagtagtagcgggtgtattatcgggtatagcggtagcggaaacgttttcgcatatacattcgatatataatgcgtcgttaaaaaaatattttttaataacgttttttttattttcgtttgcgataggtttttatctattactaaaaggtttaggtgttgatttactatggacgttagaaaaagcgcaacgatggtgtgaacaaccggaatgggtacatatagatacgacgccgtttgcgtcgttattaaaaaatttaggtacgttatttggtttaggtttagcgctaaattcgtcgatgtatcgagaatcgtgtaaaggtaaactatcgaaatggttaccgtttcgtctatcgtcgatagtagcgtcgctagtactattacatgtatttgattcgctaaaaccgccgtcgcaagtagaactagtattttatgtactatcgttttgtaaatcggcggtagtaccgttagcgtcggtatcggtaataccgtattgtctagcgcaagtactaggtcaaccgcataaaaaatcgtta

SEQ ID NO: 12897 - DNA, 1071 bp, synthetic construct
  misc_feature 1..1071: note = source = /note="Description of Artificial Sequence: Synthetic coding sequence"
  source 1..1071: mol_type = other DNA
atggaggagggtatgaacgttctgcacgacttcggcattcaatccactcattacttgcaagtgaactaccaggactcgcaggattggtttattcttgtgtccgtgatcgcagatcttagaaacgctttctacgtgctgtttcctatctggttccatcttcaagaagccgtgggtatcaagctcctttgggtggcagtcatcggagactggcttaacctggtgttcaaatggattcttttcggacagaggccttactggtgggtgctcgacacggactactattccaacacctcagtccctcttatcaagcaatttcctgtgacttgtgaaaccggacccggttcaccgtcgggacatgccatgggaaccgcgggggtgtattatgttatggtgacgtccacgctctcgatctttcaaggcaagattaagcctacttacaggtttcggtgccttaatgtcattttgtggctgggtttttgggcggttcaacttaacgtgtgtctgtcaagaatttaccttgctgcccacttcccacatcaagtggtggctggagtcctttcgggaatcgcagtggcagaaacctttagccatatacattccatctacaatgccagcctgaaaaagtactttcttattaccttcttcctgttttcgtttgcaattggattttacctgctgttgaaaggcctcggagttgacctgctgtggactttggaaaaagcccaacggtggtgtgaacaaccagaatgggtgcatatcgatactaccccgtttgcatcactgttgaaaaacttgggaaccctttttggtcttggactggcactcaactcgtccatgtaccgcgagtcctgtaaggggaagctcagcaaatggcttccatttcgtctgagctcgatcgtcgcgtcccttgtcctcctccatgtgtttgactcactgaaacctccttcgcaagtggagttggtcttttacgtcctgtcattctgtaaatccgcggtcgtgcccttggcgtcggtgagcgtgattccttactgtttggcacaggtgcttggtcagccacataagaagtccctg

SEQ ID NO: 12898 - DNA, 1071 bp, synthetic construct
  misc_feature 1..1071: note = source = /note="Description of Artificial Sequence: Synthetic coding sequence"
  source 1..1071: mol_type = other DNA
atggaagaaggcatgaacgtgctccacgatttcggaatccaatcgacccactatctccaggtgaactaccaggacagccaagactggtttatcttggtgtcggtgatcgccgacctgcgcaacgccttctacgtgctcttcccaatctggttccacctccaggaagctgtgggcatcaagctcctgtgggttgcagtgatcggtgactggcttaacctggtgttcaagtggatccttttcggtcagcgcccgtactggtgggtgttggacactgactactacagcaatacttcagtcccgctcatcaagcaattcccggtcacgtgtgagactgggcctggatccccatcgggacatgccatgggcactgccggtgtctactatgtgatggtgactagcaccctgtccatctttcaagggaagattaagcctacttacaggtttcggtgcctgaatgtgatcttgtggctgggtttctgggcggtacaacttaatgtctgcctctcgcggatctacctggcagcacacttcccgcaccaggtcgtcgccggcgtgctcagcggtattgcagtggctgaaaccttctcccacatccacagcatctacaacgcctccctcaaaaagtactttctcatcacgttctttctgttctcgttcgccatcggtttctacctgctcctgaagggactgggcgtcgacctgctgtggaccctggagaaagcacagaggtggtgcgaacagcctgaatgggtgcatatcgacacgaccccgtttgcctcactgctcaagaacctggggactctctttggacttggacttgcgctcaattcgagcatgtaccgggaatcgtgcaaaggaaagctgtcaaagtggctgccgttccgcctctcgtccattgtcgcatcactcgtcctgctgcacgtgttcgactcgctcaagccaccatcgcaagtggagcttgtgttctatgtgctttccttctgcaagtccgctgtggtgccacttgcgtcggtgagcgtgatcccgtactgcctggcacaggttctgggacaaccacataagaagtccctg

SEQ ID NO: 12899 - DNA, 1071 bp, synthetic construct
  misc_feature 1..1071: note = source = /note="Description of Artificial Sequence: Synthetic coding sequence"
  source 1..1071: mol_type = other DNA
atggaggagggaatgaatgttctccatgattttgggatacaatcgactcactatttgcaagttaactatcaagactcacaagattggttcattcttgtatctgtaattgcagatctcaggaatgccttctatgtcctgttcccaatttggttccacttacaggaggccgtcgggattaaacttttatgggttgctgttattggagattggctaaatttagttttcaagtggattcttttcggacagcgtccatattggtgggttctggatacggactactattcaaatacctccgttccactaattaagcaattcccagtgacatgcgagaccggacctggatccccatctggacacgctatgggtaccgctggtgtgtactatgtgatggtaactagcacattgtcaatcttccaaggtaaaatcaagccaacgtataggtttcgttgcctgaatgttatcctgtggttgggtttttgggcagtacagctcaatgtgtgcttatccagaatctaccttgctgctcatttccctcaccaggttgttgcaggtgttttgtctggtatcgcagtagctgaaacgttctctcatattcacagtatctataacgcttctttgaagaaatattttcttatcaccttctttctgttctcgttcgctatcggtttttatttactgctcaagggtttgggtgtggatttactgtggactcttgagaaagcacaacgttggtgtgagcagcctgagtgggtccatatagacactacaccgtttgcgtcactgctcaagaatcttggtacccttttcggtctggggcttgcattaaactcatcaatgtacagggagtcatgcaaaggaaagctgtcaaaatggcttcctttcaggttgtcgagcattgttgcttctctcgtacttctccatgtgtttgatagtctcaagccaccttctcaagtggaattggtcttttatgtgctctcgttttgcaagtctgctgttgttccgctggcatcagtgtctgttatcccttactgtttagcccaagttttgggacagcctcataagaagtctctg

SEQ ID NO: 12900 - DNA, 1071 bp, synthetic construct
  misc_feature 1..1071: note = source = /note="Description of Artificial Sequence: Synthetic coding sequence"
  source 1..1071: mol_type = other DNA
atggaagaaggtatgaatgtcctgcacgattttggtatccagtctacacactaccttcaggtgaattaccaggactctcaggattggtttatcctggtttccgtgatcgccgatctgcggaatgctttctacgtgctattccctatttggttccatttacaggaagccgtgggcatcaaactactctgggtggcagtgattggcgactggttgaatcttgtgtttaagtggatattgttcggacaacgcccctactggtgggtgctggacactgactattattctaatacatctgtgccacttattaagcagttcccggtgacttgtgaaacagggccaggctccccgagcggacatgccatgggtactgccggcgtgtactacgtgatggtgacttctacgctctctatctttcagggtaagatcaagcccacctatcggtttagatgtctcaacgtcattttgtggctgggcttttgggccgttcagttgaatgtgtgtctatcccgtatatatttggcagctcacttccctcatcaagtcgtagccggtgtactgtctgggatagctgttgcggaaacattctcccacatacattccatttataacgcctcccttaagaagtacttcctcattaccttctttctcttctcctttgccatcggcttctaccttctcctgaaggggttgggcgtcgacctgctatggaccctggaaaaagcacagaggtggtgcgaacaaccggaatgggtgcatatcgacactaccccatttgcgtcccttctaaagaacttggggacactatttggcctgggcctggccctgaactcctcaatgtaccgtgaaagttgcaaaggaaagctttcaaagtggctgccttttagactctcctcaatcgtggctagtctggtgctgttgcatgtcttcgactctctgaagcccccttcacaagtggaactggtgttctatgtgctgtctttttgcaagagcgccgtggtccccctagccagcgtctccgtgattccttattgcttggctcaggtcctgggccaacctcacaagaaatccctc

SEQ ID NO: 12901 - DNA, 1071 bp, synthetic construct
  misc_feature 1..1071: note = source = /note="Description of Artificial Sequence: Synthetic coding sequence"
  source 1..1071: mol_type = other DNA
atggaagaaggcatgaatgtcttacatgacttcggcatccagtcaacacattatcttcaagtaaactatcaggactctcaggattggtttattttagtatccgtcatagccgatctgagaaatgctttttacgtcttgttcccgatctggtttcatcttcaagaagctgtgggaattaagttgctgtgggtcgcggtaattggagattggctcaacctggtgtttaaatggattctctttggacaacgcccttactggtgggttctggatactgattactatagcaacacttctgtgccgttaataaagcaatttcctgtgacatgtgagacaggcccaggatctccgagcggccatgctatgggaacagcaggggtctactatgtgatggtgacatctacgctgtcaatctttcaaggtaaaatcaaaccgacttatcgttttcgttgcctgaatgtcatcttatggttaggcttttgggctgttcaacttaatgtgtgcctgtctcggatctacttggccgcgcattttccgcaccaggtcgtcgcgggagtcctgtcgggaattgcagttgctgagacattttctcacattcactccatttataacgcgtctctgaagaagtatttcttgattacgttttttttattcagcttcgccattgggttttatctgcttctgaaaggtttgggagttgacttattatggacgttggagaaggcccaaagatggtgtgaacagccggagtgggtgcacatcgatacaacaccttttgcatcgcttctgaaaaaccttgggacactctttggactaggcctggcccttaacagctccatgtatagggagtcttgcaaaggaaaactgtcaaaatggctgccattccgcttgtcaagtatcgttgcaagcttggtattattacatgtttttgactctttgaagccaccgtctcaggtggagttagttttttatgtgttatccttttgcaagtctgcagttgttccgctggcctccgtctcagttattccgtattgtctggcgcaggtgttgggacaaccgcacaaaaagtcactt

SEQ ID NO: 12902 - DNA, 1071 bp, synthetic construct
  misc_feature 1..1071: note = source = /note="Description of Artificial Sequence: Synthetic coding sequence"
  source 1..1071: mol_type = other DNA
atggaggagggcatgaatgtcctgcacgactttggcatccaatccacgcactacctgcaggtgaactaccaggactctcaagattggtttatactggtgagcgtgatcgctgatctgcgcaatgctttctatgtactcttccctatatggttccaccttcaggaggctgtgggtatcaagctactctgggtggcagtgatcggcgactggctgaatctcgtattcaaatggattctctttggccagcgtccttactggtgggtgctggacacagactactatagtaataccagtgtgccactgatcaaacagttccctgtgacatgcgaaactggtcctgggagcccgagtggacacgctatggggacagcaggcgtgtactacgtgatggtgacatctacattaagtattttccagggcaaaataaagcccacgtacagatttcgatgtctcaacgtgatcctatggctcggcttctgggccgttcaacttaatgtgtgcctgtcacggatatacctagcagctcatttcccccaccaggtggtggctggtgtcctttcgggcatcgcagtggctgaaactttcagccatatccacagcatttataacgcatctttgaagaaatatttcttaatcaccttttttctgttctcattcgctatcggcttttatttgttgttgaaggggctgggggtggatctattatggacgcttgagaaggcgcaacggtggtgcgagcagcccgaatgggtgcatattgacaccactccgtttgcgtccctccttaagaacctgggaaccctattcgggttgggcttggctctaaacagctctatgtacagggaatcctgcaaggggaagctatccaaatggctaccattccggttaagtagcattgtggctagtctggtccttttacacgtgttcgatagcctaaagcctccaagtcaggtggagcttgtcttctacgtgctgagcttctgcaaatccgctgtcgtgcccctggcgagtgtctctgtgatcccgtactgcctggcacaggtcctgggccagccgcacaagaagtcccta

SEQ ID NO: 12903 - DNA, 1071 bp, synthetic construct
  misc_feature 1..1071: note = source = /note="Description of Artificial Sequence: Synthetic coding sequence"
  source 1..1071: mol_type = other DNA
atggaggagggcatgaacgtgttacacgactttggaatacagtcaacacactacctgcaggtgaactatcaggactcacaggactggttcattctcgtgtcagtaatagccgatttacggaacgcattctatgtattattccctatctggtttcatcttcaggaagcggtggggatcaagctgttgtgggtggcggtgattggtgactggctgaatctggttttcaagtggattttgttcggtcagcgcccctattggtgggtgctggatactgactactattccaatacctcggtgccgctgattaagcagttcccagtcacatgcgagactgggccaggatcaccaagcgggcacgcgatgggtaccgctggtgtctattatgtgatggtaactagtacactttcaattttccagggaaagataaagccgacttacagattccgatgtctaaacgtgatactctggctcggcttttgggctgtgcagttaaatgtgtgtctgtcgcggatctacctcgctgcacactttcctcatcaggtggtggcgggcgttctgagtgggattgcggttgccgagacattcagccacatccattctatttacaatgcttctctgaagaaatatttcttgataacattcttcctgtttagcttcgctattggcttttatctcctgctgaagggactcggagtggacctgttgtggactctagaaaaggcccagaggtggtgtgaacagcccgagtgggtccacatcgacaccaccccattcgccagccttcttaaaaaccttgggaccctgttcgggttgggcctggcgctgaattcaagtatgtatcgcgaatcttgtaagggcaagctgtcaaaatggctgccattccggcttagtagcatcgtcgcatcactggtgcttctgcacgtgtttgactcgctcaagccaccttcgcaggtggaactggtgttctatgtcttatcattttgtaagtctgctgtcgtgcccctggcctccgtatccgtcatcccatattgtctggcccaagtgctgggccaaccacacaagaagagcctc

SEQ ID NO: 12904 - DNA, 1071 bp, synthetic construct
  misc_feature 1..1071: note = source = /note="Description of Artificial Sequence: Synthetic coding sequence"
  source 1..1071: mol_type = other DNA
atggaggagggcatgaacgtattgcatgactttggaattcaatctactcattatctccaggtaaattatcaagactctcaggactggtttattctggtgtctgtcatcgctgacttgaggaacgccttttacgtcttgtttccgatttggttccacctgcaagaggcggtgggcattaagctgctgtgggtggccgttataggcgattggctcaatctcgtgtttaaatggatattgttcggccagcgcccttattggtgggttctggacacagactattactctaatacctctgtgcctctgatcaagcagttccctgtgacctgtgagacgggtccgggctctccctcaggacacgccatggggacagcaggcgtgtactatgttatggtgacctccactctgagcatctttcaggggaagatcaaaccaacctatcggttccggtgcctgaacgtgattctttggctgggcttctgggctgttcagctgaacgtttgcctgtcacgaatttacctggccgctcacttcccacatcaggtggttgctggggtcctgtctggcatcgccgtcgctgagacctttagtcacattcattccatttacaacgcttcactcaagaaatatttcctgattaccttctttctgttctcattcgcaattggtttttacctccttttgaaaggactgggggtagatctgctctggacactcgagaaggcacaaagatggtgtgagcagcccgagtgggtgcacattgacactaccccattcgccagtctgctgaagaacctgggcacactgtttggcctcggactcgcactcaacagctctatgtacagagaaagctgcaagggcaagcttagtaagtggctgccgttccgcctctctagcatcgtggcttctctggtcctcctccatgtgtttgacagtctcaagcctccaagccaggtggaacttgttttctacgtgctcagcttttgtaagagtgcagtcgtccccctggcctctgtttccgttatcccatactgccttgctcaggtgcttgggcagccgcataaaaaatccctt

SEQ ID NO: 12905 - DNA, 1071 bp, synthetic construct
  misc_feature 1..1071: note = source = /note="Description of Artificial Sequence: Synthetic coding sequence"
  source 1..1071: mol_type = other DNA
atggaagagggaatgaacgtcctgcatgacttcggcatccagagcacccactacctccaagtcaattaccaggattctcaggactggttcatcttggtgtctgtgatcgcggacctcagaaatgcattttacgtgctgttcccaatctggttccatctccaggaggccgtcggcatcaaactgctctgggtggccgtaatcggagattggctgaatctcgtgttcaagtggattctcttcggacagcggccatactggtgggtgctggataccgactactattcaaacacctcggtgccactcattaagcagttcccggtgacctgcgaaactggaccgggaagcccatcgggccatgctatggggaccgcgggtgtctactacgtgatggtgacgagcaccctcagcatctttcaaggaaaaatcaagccgacttaccgcttccggtgtctcaacgtcatcttgtggctgggattctgggcagtccagctcaacgtgtgtctgagccgcatctacttggccgctcatttccctcaccaagttgtggccggggtgctgtcaggaatcgctgtggcggaaaccttttcccatatccactccatctacaatgcttcccttaagaagtacttccttatcacttttttcctgttctcctttgcaatcggcttctacctgctcctgaagggtctgggggtggacctgctgtggactctcgagaaggctcaacgctggtgtgagcaaccggaatgggtgcatatcgacaccaccccgtttgcatccctgctgaagaacctcggcactctgtttggcctcggccttgctcttaatagctcaatgtacagagagtcgtgtaagggaaagctctcgaaatggctgccgttccgcctgtcctccatcgtggcctcattggtgctgcttcacgtctttgactcactcaaacccccatcccaagtcgagctcgtgttctacgtgctctcattctgcaaatcggcggtggttcctctggcgtcagtgtccgtgataccgtactgtctggcacaggtgcttggacagccccacaagaaatcactg

SEQ ID NO: 12906 - DNA, 1071 bp, synthetic construct
  misc_feature 1..1071: note = source = /note="Description of Artificial Sequence: Synthetic coding sequence"
  source 1..1071: mol_type = other DNA
atggaagaaggaatgaacgtcttgcacgattttggaattcaatccactcattaccttcaagtgaattaccaggattcacaggactggttcatccttgtctcggtgattgcggacctgcgaaacgcattctacgtcctgtttccaatttggtttcatctccaagaagcagtgggaattaagctgctgtgggtcgcagtgattggtgactggctgaacctcgtgtttaagtggatacttttcggccagaggccctactggtgggtgctggacactgattactactcgaacacctccgtcccactcattaaacagtttcctgtgacttgtgaaaccggtcctgggtccccttcaggtcacgcgatgggtaccgcaggcgtgtactacgtgatggtgacgtccaccctttccatttttcagggcaagattaaacctacctaccgatttagatgtctgaatgtgatactttggctggggttttgggccgtgcagcttaacgtctgcctttcgcggatttacctggcagctcatttccctcaccaggtcgtggcaggtgtcctctcgggaatagcagtcgcagaaaccttcagccacatccactcgatctacaacgcgagcctcaagaaatactttcttatcactttcttcttgttctcatttgcaataggtttttacctgctcctgaagggactgggagtggatcttctgtggaccctcgagaaagcacaacgctggtgtgagcaacctgaatgggtgcatatcgatactactccttttgcgtcactgctgaagaacctcggtacgctctttggactcggactggcccttaactcctcaatgtaccgagaatcatgcaagggcaagctgagcaagtggctgccttttaggctgtcatcgatcgtcgcatcgctcgtgcttctgcacgtttttgactccctgaagcctccatcgcaagtcgaactcgtgttttacgtgcttagcttttgtaagtcggcagtggtccccctggcaagcgtctcggtaattccctactgtcttgcgcaggtgctcggccagccacacaaaaagagtctt

SEQ ID NO: 12907 - DNA, 1071 bp, synthetic construct
  misc_feature 1..1071: note = source = /note="Description of Artificial Sequence: Synthetic coding sequence"
  source 1..1071: mol_type = other DNA
atggaagagggcatgaatgtgctgcatgactttggaatccagtccactcattaccttcaagtgaactatcaggactcccaggactggttcatcctggtgtcagtgatcgcggacctccgcaacgccttctacgtgctgttcccgatctggttccatctccaggaggctgtgggaatcaagctgctctgggtcgcggtcattggggactggcttaatctggtgttcaagtggatcctgttcggacagcggccgtactggtgggtcctggatactgactactattcgaatacctccgtgccgctgattaagcaatttccggtgacctgcgaaaccgggcctggctcacctagcggccacgccatgggaaccgccggagtctactacgtgatggtgaccagcactctgagcatcttccaggggaagatcaaaccgacctaccggttcagatgcttgaacgtcatcctctggctggggttttgggctgtacaactcaatgtgtgcctgtcacgcatctaccttgctgcccacttcccacaccaagtggtggcgggagtcctgtcggggatcgcagtcgccgaaactttcagccatattcattcgatctacaacgcgagtctgaaaaagtacttccttatcacgttcttccttttcagctttgccatcggtttctacctgctcctgaagggcctgggcgtggatctgttgtggactctcgaaaaagcccagaggtggtgcgaacagccggaatgggtccacatcgacacgactccattcgcgagccttctgaagaatctgggaactctgtttggactgggccttgccctgaattcctcgatgtaccgcgagtcctgcaaggggaaactctccaagtggctgccattccggctctcgagcatcgtggccagcctcgtgctgttgcacgtgtttgactcgctgaagccaccgtcccaggtggagctggttttctacgtcctgtccttctgcaagtcggctgtggtcccgctcgcgtccgttagcgtcatcccttactgtctggcgcaggtgctgggacaaccacataagaagtcattg

SEQ ID NO: 12908 - DNA, 1071 bp, synthetic construct
  misc_feature 1..1071: note = source = /note="Description of Artificial Sequence: Synthetic coding sequence"
  source 1..1071: mol_type = other DNA
atggaagaagggatgaatgtcctgcacgattttgggatccagtccactcactaccttcaggtaaactatcaagattcccaagattggtttatccttgtgagcgtcattgcggaccttcgtaacgcattttacgttctgtttcccatttggtttcatcttcaggaagcagtgggtattaagctgctttgggtggcagtgataggggactggttgaaccttgtgtttaagtggattctgtttggccaaagaccttactggtgggtccttgataccgattactattccaacaccagcgtacctctgatcaaacagttcccagttacttgtgaaaccgggccggggagtccttccggccatgcaatgggcaccgcaggtgtgtattacgtgatggtgaccagcacgctctccattttccagggaaagatcaaaccaacctaccgcttcaggtgccttaacgtgattctctggcttggcttttgggctgtgcaactgaacgtgtgtctctcgcgcatttacctggcggcacattttccacaccaggtcgtggcgggcgtgctttcgggtattgcagtggctgaaactttctcacatatccatagcatctacaacgcatccctgaagaagtacttccttattaccttctttctgttttccttcgcaattggattctacctcctgctgaaagggttgggagtcgatctcctttggactcttgagaaggcacaacgatggtgcgaacaaccagaatgggtgcatattgatactactcctttcgcaagtctgctgaaaaatcttggtaccttgtttggactgggcctggcccttaactcctcaatgtacagggagagctgtaagggaaagttgagcaagtggctcccttttagattgagctctatcgtggcgtcactggttttgcttcatgtgttcgattcgctcaagccaccatcgcaggtcgagctcgtgttttacgtgctttcgttttgtaaatccgcagtggtccctctggcgtcggtttcggtgataccctattgcctggctcaagtccttggtcaacctcacaagaaatcgctg

SEQ ID NO: 12909 - DNA, 1071 bp, synthetic construct
  misc_feature 1..1071: note = source = /note="Description of Artificial Sequence: Synthetic coding sequence"
  source 1..1071: mol_type = other DNA
atggaagaaggtatgaatgtgctgcacgattttggaattcagagcacccattacctccaagtgaactaccaggattcacaagattggtttattctcgtgtccgtcatcgcagacttgcgtaacgccttctacgtcctcttccctatctggtttcatctgcaggaggcagtcgggatcaagctgctgtgggtggccgtcatcggcgactggttgaatttggtgttcaagtggatcttgttcggccagcgcccctattggtgggtgttggacactgactactactcgaacacctccgtccccttgatcaagcagtttccggtcacttgcgaaaccgggccgggatccccatccgggcacgcgatgggaaccgccggcgtctattacgtgatggtcacctcgaccttgtcgatttttcaaggaaaaatcaaaccaacgtacagattccggtgtctcaatgtgatcctgtggctcggcttctgggcggtacagctcaacgtgtgcctcagcagaatttacctggccgcgcatttcccgcaccaagtggtcgccggagttctctcggggatcgccgtggctgaaactttttcacatattcattccatatacaacgcgtcgctgaagaagtacttccttattactttctttctgttttcgtttgcaatcggattctacttgctgctcaagggcctcggcgtggatctgctctggactctggagaaggcccaaagatggtgcgaacagcccgagtgggtccacatcgatactacccccttcgcatcactgctgaagaatctgggcaccctgttcggactcggtcttgcgctgaacagcagcatgtaccgggagagctgcaaagggaagctgtcgaaatggctgccgtttagactctcgtcaatcgtggcatcacttgtgctcttgcacgtgtttgactcactgaagccgccgtcgcaagttgaacttgtgttctacgtgctgtccttctgtaagtctgccgtggtgccactggcatccgtctcggtgattccgtactgcctggcccaggtgctgggacaaccccacaagaaatcgctc

SEQ ID NO: 12910 - DNA, 1071 bp, synthetic construct
  misc_feature 1..1071: note = source = /note="Description of Artificial Sequence: Synthetic coding sequence"
  source 1..1071: mol_type = other DNA
atggaggaaggaatgaacgttctgcatgacttcggaatccaatcgacccactacctgcaggttaactaccaggattcccaagactggtttatactggtgagcgttatcgctgatctccgcaacgccttttacgtgctgtttccgatctggtttcaccttcaggaggctgttggaattaagttgctgtgggtggcagtgattggagattggctcaatttggtgttcaaatggatactcttcggtcaaagaccttactggtgggtgcttgatacggattactacagtaataccagcgtgcctctcatcaaacagtttcctgtgacttgtgaaaccggtccagggtcccctagcggacatgcaatgggaaccgcaggtgtgtactacgtgatggtcacttccactttgagcatttttcaaggcaagattaaacctacgtacaggttccgctgccttaacgtcatactctggcttggattttgggcggtgcaacttaacgtgtgcctctcacgcatttatctggcagcacattttcctcatcaagtcgtggcgggtgtcctcagcgggatcgctgtcgcagaaacgttttcgcatatccactcgatatacaacgcatcacttaagaaatactttctgatcaccttttttcttttcagcttcgcaatcggcttctaccttctgctcaagggcctcggcgtcgacctgctgtggacgcttgagaaggcccagaggtggtgcgaacagcccgaatgggtccatatagataccactccatttgcatcgctgctgaagaacttgggaactctgttcggtcttgggttggcccttaactcgtcaatgtatcgggaatcgtgcaagggcaagctctccaagtggcttccattccggctctcgtcgatagtcgcctcccttgtcctgctgcatgtgttcgactctcttaaacctccttcccaggtcgagcttgtgttctacgtgctttcgttctgtaaatcagcagtcgttccccttgcaagcgtgtccgtgatcccttattgtctggcacaagtgttgggccagccacacaagaaatcactg

SEQ ID NO: 12911 - DNA, 1071 bp, synthetic construct; identical to SEQ ID NO: 12860
  misc_feature 1..1071: note = source = /note="Description of Artificial Sequence: Synthetic coding sequence"
  source 1..1071: mol_type = other DNA

SEQ ID NO: 12912 - DNA, 1071 bp, synthetic construct
  misc_feature 1..1071: note = source = /note="Description of Artificial Sequence: Synthetic coding sequence"
  source 1..1071: mol_type = other DNA
atggaggaaggcatgaatgtgctccatgattttgggatccagtcaacccactatctgcaggtcaactaccaagatagccaggattggtttattctcgtctccgtgatagctgatctgagaaatgcgttttacgtgctcttcccgatttggttccatctccaggaagccgtggggattaagctgctgtgggtggccgttattggggattggctgaatttggtcttcaaatggatcctgtttgggcaacgaccctactggtgggtcctggataccgactattacagtaacaccagcgttccgctgatcaagcagttccccgttacttgtgaaactggccccggatccccctccggtcacgcaatgggcactgcaggcgtctactacgtgatggtaacatctaccctgtctatcttccagggcaaaatcaagccaacctacagatttcgctgtcttaatgtcatactgtggcttgggttctgggccgtgcagttgaatgtctgcctgtccagaatttatctcgccgcgcacttccctcatcaggtggtagccggagtactatcaggaatagctgtggccgagactttctcacatattcacagtatctacaacgctagcctgaagaagtacttcctcatcacatttttcctgttttcttttgccattgggttctacctcttacttaaagggctaggagtcgaccttttgtggactctggagaaggcccagcgctggtgtgaacagcccgagtgggtacatattgataccaccccgttcgcatccctcctgaagaacctcgggaccttattcggcctcggattggccctgaattcaagtatgtacagagaatcctgtaaaggcaagctgtccaagtggctgcctttcaggctcagttcaattgtcgcatcactggtcctcctgcacgtcttcgatagtttgaagcccccctcacaggttgaactagtattctatgtattatctttttgcaagtcagctgttgtgcccctcgcgagtgtcagtgtgattccttattgtcttgcacaggtgctcggtcagcctcataagaagagtctt

SEQ ID NO: 12913 - DNA, 1071 bp, synthetic construct
  misc_feature 1..1071: note = source = /note="Description of Artificial Sequence: Synthetic coding sequence"
  source 1..1071: mol_type = other DNA
atggaggaaggtatgaatgtgctacacgacttcggtattcaaagcactcactatctgcaggtaaattaccaggactcccaggactggttcattctggtctccgttatagcggacctgaggaacgcattctatgtgctcttcccaatatggtttcacctacaggaagccgtcggaataaagctgttatgggtggccgttatcggggactggcttaaccttgtctttaagtggattctattcgggcagcgaccctactggtgggttctggacacagattactactccaatacgtcagtcccccttatcaagcagtttcccgtaacatgtgaaactgggcctggctcacctagcgggcatgccatggggacggccggcgtgtactatgtgatggttacatcaacactgtccatctttcaaggaaagattaagccaacttaccggttcagatgtctgaacgtaattttgtggctgggcttctgggccgtgcagctgaatgtctgtttgtcccgaatatatctggcagcccatttcccccatcaagttgttgccggggtgctgtctgggatcgctgtggccgagaccttctctcatatccattccatttataatgctagcctcaagaaatatttcctaattacattcttcttgttcagtttcgcgattggcttttatctgttacttaagggcttgggcgtagatctgttatggaccctcgaaaaggcacaaaggtggtgtgaacaacctgaatgggtgcacattgacaccacaccttttgcatccttgttgaaaaacttaggaacgctatttggactaggactcgctctcaattccagcatgtatagggaaagctgtaaagggaagctgtctaaatggttaccgtttagattgtcttcaatcgtggcttcacttgtgcttttgcatgtgttcgattccttgaaacccccaagccaggtggagctcgtcttctacgtcttgtcattctgcaaaagtgcggtcgtgcccctggcatcagtatctgtgataccatactgcctcgcacaagtgttgggacagccccacaagaaatccctc

SEQ ID NO: 12914 - DNA, 1071 bp, synthetic construct
  misc_feature 1..1071: note = source = /note="Description of Artificial Sequence: Synthetic coding sequence"
  source 1..1071: mol_type = other DNA
atggaggaaggaatgaacgtgttgcatgactttggaatacagtccacacactacctgcaggtaaactatcaggatagtcaggattggtttatactagtttccgtgatcgctgatctccggaacgctttctacgtcctgttccccatctggtttcacttgcaggaagccgtaggaatcaaattgctttgggtggcagttataggagattggctcaatcttgtgttcaaatggattctctttgggcagagaccctattggtgggtcctcgatacagattactattccaatacatcagttccactaatcaaacagtttcccgtcacatgtgaaacagggcctgggtccccttcagggcatgctatgggaactgcaggggtctattatgtaatggtaacaagtacactctctatattccaggggaagattaagcctacttataggtttcgctgccttaacgtgatcttatggctgggattctgggccgtacagctcaatgtatgcttaagtagaatctatcttgctgcccatttccctcatcaggtggtggccggggtattgtctggaatcgcagtggccgagactttttctcacatacatagtatatataatgcctccctcaaaaagtatttcctgattacatttttccttttttcattcgctatcggattttatttgttacttaaagggttgggagtggatctgctgtggacactcgaaaaagctcagcgatggtgcgaacaacctgaatgggttcatattgatacaactcccttcgcttccctcttaaaaaacctggggactttgttcgggctcgggctggctctgaactcatctatgtatcgagaatcatgtaagggaaaactctcaaagtggcttccctttagactttcttctatagttgcatctctggtactgcttcacgtttttgattcccttaaacctccttcccaggtcgaactagtgttctatgttctgagtttttgcaagtcggccgtggtgcctctggcgtccgtgtctgtgatcccttattgtctagctcaggtcctaggacagccacacaagaaatcacta

SEQ ID NO: 12915 - DNA, 1071 bp, synthetic construct
  misc_feature 1..1071: note = source = /note="Description of Artificial Sequence: Synthetic coding sequence"
  source 1..1071: mol_type = other DNA
atggaagaaggaatgaatgttcttcacgacttcggtattcaaagcactcattatcttcaagttaactaccaagattcgcaagactggtttattttggtatcagtgattgcagacctgcggaatgctttctacgttcttttcccaatctggtttcacctccaagaggctgttggaatcaagctgctttgggttgctgtcattggagactggcttaacttagtgtttaaatggatcttatttggacaaaggccatattggtgggtcctcgacacagactactattctaatacatcagtaccattgatcaaacaattcccagtcacatgtgagacgggtccagggtccccatctggacacgcaatgggtacagcaggagtttattacgtcatggtgacttctactttgtcaatattccaaggaaagattaaaccaacttatcgtttcaggtgcctgaacgtgattctgtggcttggtttctgggctgtgcaattgaacgtatgtttatcgcgaatttacttggccgctcattttccgcaccaagttgttgctggcgtgttatcaggcatagctgtcgcagaaacattttctcacatccactctatttacaatgcttcactcaagaagtactttctgataactttctttttgttctcatttgctatcggcttttatcttttgcttaaaggcttgggagtagacctcctctggacattggaaaaggcacaaaggtggtgcgagcaaccagagtgggttcacatcgacacaacgccgttcgcttcactccttaagaatctgggaaccttgttcggactgggactcgcactcaactcgtccatgtatcgggaaagttgtaaaggcaagctttctaaatggcttccttttcgcttaagctcaattgttgcgtccctggttttgcttcatgtttttgactccctaaaacctcctagccaagtggagctggtcttctacgttttgtctttttgtaagtccgcggttgtcccactcgcttctgtaagcgtcattccatattgtctggcacaagttttgggccaaccacataagaagtctctc

SEQ ID NO: 12916 - DNA, 1071 bp, synthetic construct
  misc_feature 1..1071: note = source = /note="Description of Artificial Sequence: Synthetic coding sequence"
  source 1..1071: mol_type = other DNA
atggaagagggaatgaacgttctccacgattttgggatccagagcacccactatttgcaggtgaactatcaggattcccaggactggttcatattggtgtccgttattgccgacctgcgtaatgcattctatgtcttgtttcccatctggttccatctgcaagaagcagtcggcattaagctgctgtgggtggctgtgatcggagattggttgaacctcgttttcaagtggatactgtttggccagcgtccttattggtgggtgcttgatacagactactactctaacacttctgtccccctgattaagcagtttcctgtcacctgtgaaaccgggccaggttctccttctgggcatgctatgggaactgctggagtctattatgtcatggtgactagcactctgtccatcttccaggggaagattaaacccacctatcgtttcagatgccttaacgttatcctgtggctgggtttctgggcagtgcagctgaacgtgtgtctgagcagaatctacctggccgctcattttccccatcaggtggtggcaggggttctgtctggcatagctgtcgccgagactttcagtcacatccactccatctataacgcctctctgaagaaatactttctcataacctttttcttgttttcattcgctatcggcttctacctgctgctcaaagggctcggagtggaccttctgtggactctggaaaaggcacaacgctggtgcgaacagccagaatgggtccacattgacaccaccccgttcgctagccttctgaagaacctgggcaccctgttcggcctcggactcgctctgaacagctctatgtatagagagagctgcaaggggaagctctctaagtggctcccctttcggttgagttctatcgttgctagcctcgttctgctgcatgtgttcgactcccttaagccaccaagtcaagtagagctggtgttttatgtcctgtcattttgtaaaagcgctgttgtccccctcgcttcagtgtccgtgatcccttattgcttggcccaagtgcttggacaacctcacaagaagagcctt

SEQ ID NO: 12917 - DNA, 1071 bp, synthetic construct
  misc_feature 1..1071: note = source = /note="Description of Artificial Sequence: Synthetic coding sequence"
  source 1..1071: mol_type = other DNA
atggaggaagggatgaacgtactgcacgatttcggtatacaatccacacactacctgcaggtcaactaccaggattcgcaggactggtttatcttggtgagtgtgatcgccgatttgcgcaatgccttctatgttctgttccctatttggtttcacctccaagaggcagtcggtattaaacttctttgggtcgccgttataggtgactggctgaacctggtgttcaaatggatcttattcggacagaggccctactggtgggtactggacactgactattacagcaatacaagcgtgccattaatcaagcaatttcccgtgacatgcgagaccggacctgggtcaccctccggtcatgcaatgggcactgctggcgtgtattatgttatggtgaccagcaccctgagcatcttccaaggaaagattaagcctacctaccggtttcgctgtctgaatgtgattctttggctcggcttctgggctgtgcagttgaatgtttgcctctcaaggatctacttggctgcccatttcccacaccaggtcgtcgccggggtgctgagtgggatcgccgtcgccgagactttcagccatattcatagcatctacaatgccagcctgaagaaatacttcttaatcacattcttcttgttcagcttcgcaatcggtttctaccttcttctcaaagggctgggcgtggatctactttggaccctcgaaaaagctcagcggtggtgtgaacagccagagtgggtccacatcgatactacgccattcgcttctctgctcaaaaacctgggtaccctgttcggcttaggcctggctttaaacagcagcatgtaccgggaaagctgcaaaggcaagctgagcaaatggctgccatttcgcctgagcagtatcgtggcaagcctggttttgctacatgtcttcgacagcctgaaacctccaagtcaggtcgaacttgtattttatgtgctgagcttctgcaagtctgccgtggtgccactcgcgtctgtgtccgtgatcccctactgcctggctcaggtcctggggcagccccacaagaaatcactg

SEQ ID NO: 12918 - DNA, 1071 bp, synthetic construct
  misc_feature 1..1071: note = source = /note="Description of Artificial Sequence: Synthetic coding sequence"
  source 1..1071: mol_type = other DNA
atggaagaaggtatgaacgtgctgcatgatttcggtattcagtcaactcactacctccaagtgaattaccaagacagccaggattggttcatcctcgtgagcgtcatcgcagatctgagaaacgcgttttatgtgctcttccctatttggtttcacctgcaggaggcagtcggcattaaactgctgtgggtggctgtgattggtgattggcttaacctggttttcaagtggatcctgttcggtcaaaggccctactggtgggtcctggatacggactactactcaaacactagcgtccctctgatcaaacagtttccagtcacttgtgaaaccggaccaggctcgcctagcggccatgccatgggtacggccggagtctactatgtgatggtgacctcgactttgtcgatatttcagggaaagatcaaacctacctaccgttttcgctgcctgaacgtgatactgtggcttgggttttgggcggtgcagctgaacgtgtgtctttcaagaatatacctggcagcgcactttccgcatcaagtggtcgcaggtgtgctttccggcattgccgttgccgaaacgttctcccatattcattcaatttacaacgcgtccttgaaaaagtacttccttataaccttctttttgtttagctttgcaataggattttaccttctgcttaaggggctcggcgtcgatcttctgtggactctggaaaaagctcagcgctggtgcgaacagcctgaatgggtccatattgacaccaccccatttgcaagcctgctgaagaatttggggactctgtttggacttggccttgcactgaactcgtcaatgtaccgtgaatcatgcaagggtaagttgtcaaaatggctcccgtttcggctttcatctatcgtggcatcacttgtgctgcttcatgtgtttgactcgctcaaacctccatcgcaggtcgagctggtgttctacgtcctgtcattttgcaagtcggcggtggtcccccttgcatccgtgtcagtgattccctactgtctggcccaggttctcggccaaccgcataagaagtcactc

SEQ ID NO: 12919 - DNA, 1071 bp, synthetic construct
  misc_feature 1..1071: note = source = /note="Description of Artificial Sequence: Synthetic coding sequence"
  source 1..1071: mol_type = other DNA
atggaggagggcatgaacgtactccatgatttcggaatccagtcaacacactacctccaggtcaattatcaggattcccaggactggttcatactggtgagtgttatcgccgacttgcgaaatgcgttttatgtactgtttccaatttggttccaccttcaggaagcggtgggcataaagctcctctgggtggccgtcatcggcgactggctcaacctcgtttttaagtggatcctgtttggccaaaggccctactggtgggtgctagatactgattactactcgaacacatcagtgccactgattaagcagttccctgtgacgtgtgagaccgggcccggatcgccatcggggcacgctatgggtactgcaggcgtgtactatgtcatggtgacaagtacactctcgatattccaggggaaaattaagcctacatacaggtttagatgcttaaatgtaattctttggcttggattctgggcagtacagcttaacgtgtgtctgagccgcatataccttgctgcccacttcccccaccaggtggtggctggcgtgcttagcggtatcgccgtcgctgaaacttttagccacatccatagcatttacaatgcttccttgaaaaagtattttcttataactttttttctgttcagctttgccattggcttttacttgctgcttaagggtttaggggtggacctcctgtggactcttgagaaagcacagcgttggtgcgaacagccagagtgggtgcatatcgatacaacccctttcgcttccctgttgaagaatcttggcaccttgtttggtttggggctcgctctcaactccagcatgtacagggaatcttgtaagggcaaactgagcaaatggttgccgtttcgactcagctcaatagtggcgagcctggtgttactgcatgtgtttgactcactcaagccaccatctcaggtggagctcgtgttctacgttctgtcattttgtaaatcggcagtagttcccctggcctccgtctcggtgataccatattgcctggcccaagtcctcggacagcctcataagaaatctctc

SEQ ID NO: 12920 - DNA, 1071 bp, synthetic construct
  misc_feature 1..1071: note = source = /note="Description of Artificial Sequence: Synthetic coding sequence"
  source 1..1071: mol_type = other DNA
atggaggagggaatgaacgttctgcatgactttggcatccagagtacacattacctgcaggtcaactaccaggactcccaggattggttcatcctggtgtctgtgattgcagacctcagaaacgctttctacgtcctgttccccatctggttccacttgcaagaggcagtgggaattaaactcctttgggtagctgtcatcggagactggctcaatctcgtgttcaagtggatcctctttggtcaacgcccctattggtgggtgctggatactgactactatagcaacacctcagtacccttgataaaacagttcccggtcacttgcgagacaggacctggctctccctctggtcatgccatgggaaccgccggtgtgtactacgtcatggtcacctccacactttccatttttcaaggaaaaatcaaacctacctaccgctttaggtgcctcaacgtcatcctgtggctgggtttttgggcggtgcaattgaatgtgtgtctgagtagaatctacctggctgctcacttccctcaccaggtggtggctggagtgctgtccggtatcgctgtagctgagaccttctcccacattcacagcatttataacgcctctctgaaaaaatacttcctgataacattttttctgttttccttcgccatcggtttttacttgctcctgaagggactgggcgtggacctcttgtggaccctggagaaggcccagcgctggtgtgagcaaccagagtgggtgcacatagacacgacgccttttgcaagcctgttgaaaaatctcggcacactgttcggcttgggcctggctctcaactccagtatgtatagggaaagctgtaaaggcaagctgtccaagtggctcccattccgcctctctagcatagtggcttccctcgtgcttctgcacgtttttgattctcttaagccaccttcccaggtggaattggtgttctatgttctgtccttctgcaagtctgcagtcgtgcctctggccagtgtatccgtgatcccttattgcttggcgcaggttctgggccaaccccacaagaaatctttg

SEQ ID NO: 12921 - DNA, 1071 bp, synthetic construct
  misc_feature 1..1071: note = source = /note="Description of Artificial Sequence: Synthetic coding sequence"
  source 1..1071: mol_type = other DNA
atggaggagggtatgaacgtgttgcatgacttcggcattcagtccactcattacctccaggtgaactaccaggactcgcaagactggtttatcctcgtgagcgtcatcgccgatctccggaatgccttctacgtcctgttccctatctggtttcatctccaagaggcggtcggaatcaagctgctctgggtggcagtcattggcgattggctgaatttggtctttaagtggatactgtttggccagaggccgtactggtgggtccttgatactgattactacagcaatacctcagtgccgttgatcaaacaattcccagtgacgtgtgaaactggccccggcagcccgtcgggacatgctatgggcactgccggagtgtactacgtcatggtgaccagcaccctctcgatctttcagggaaagatcaagccgacctaccgcttccggtgcctgaatgtgatcctttggctcggattctgggccgtccagctcaacgtgtgcctctcgcgcatctacctggctgcccactttcctcaccaggtagtagccggagtcctgagcggtatcgccgtggccgagactttctcccacattcattcgatctacaatgcatcacttaagaagtacttcctgatcaccttcttcttgttcagcttcgccattggattctaccttctgctgaaggggctcggcgtggacctcctctggactctggagaaagcacagaggtggtgcgagcaaccagaatgggtgcatatcgatactaccccgttcgcgagcctcctgaagaacctcggaactttgtttggcctgggtctggccctcaactcgagcatgtatcgggaatcctgtaaggggaaactctcaaagtggctgcccttcagactgagctccattgtcgccagcctggtgctgctgcacgtgttcgattcactgaagcctccatcgcaggtggaacttgtgttttacgtcctctccttctgcaagagcgccgtggtgcccctggcgagcgtgtccgtgatcccgtactgcttggctcaggtgctggggcaaccacacaaaaagtcgttg

SEQ ID NO: 12922 - DNA, 1071 bp, synthetic construct
  misc_feature 1..1071: note = source = /note="Description of Artificial Sequence: Synthetic coding sequence"
  source 1..1071: mol_type = other DNA
atggaagaaggaatgaacgtgcttcacgattttgggatccagagcactcattatctccaagtcaactatcaggacagtcaagattggtttatccttgtgtcggtgattgccgacctcagaaatgcgttctacgtccttttccctatctggtttcacctgcaggaggcggtgggcatcaaacttctttgggtggccgtgatcggggattggttgaacctcgtgttcaagtggattttgttcggccaaaggccatactggtgggtcctggacaccgactactactccaatacctcagttccgctgattaagcagtttccggtgacctgcgaaacgggaccgggatcgccatcgggtcacgccatgggcactgctggagtgtactacgtcatggtcaccagcacgctgagcatctttcagggtaaaatcaagcccacttaccggttccgctgtctgaatgtgatcctgtggctggggttctgggcagtgcaactcaacgtctgcctttcccggatctaccttgccgcacactttccccaccaggtagtggccggagtgctgtctggcatagccgtggccgaaaccttctcgcatattcattcaatctacaatgcgtcgcttaagaaatacttcctgatcacgtttttcctgttttcctttgcaatcgggttctacctcctgctcaagggattgggcgtcgacctgctctggactctggagaaggctcagagatggtgcgagcagccagaatgggtgcatatcgacactactccgttcgcatcgctgctgaagaacctcggcaccctcttcggactgggcctcgcgttgaactcctccatgtaccgcgaatcgtgtaagggcaagctgtcgaaatggttgccattccgcctttcctcgatcgtcgcctcactcgtcctcctgcacgtgttcgacagccttaagcccccgagccaggtggagctggtattctacgtgttgtcattctgcaagtccgcggtggtgcctctggcctcagtatcggttatcccttactgcctcgcccaagtgttgggtcagccgcacaagaaaagcctc

SEQ ID NO: 12923 - DNA, 1071 bp, synthetic construct
  misc_feature 1..1071: note = source = /note="Description of Artificial Sequence: Synthetic coding sequence"
  source 1..1071: mol_type = other DNA
atggaagagggtatgaacgtcttgcacgactttggaatccagtccacgcattacctccaagtcaactaccaggattcgcaggactggttcatactggtgtcggtgattgctgatctgcggaacgcgttttacgtcctgtttccgatatggttccatctccaagaagcagtggggattaagctgctgtgggtcgccgtgataggagactggctgaaccttgtctttaagtggatacttttcggacaaagaccttactggtgggtgctcgatactgattactactccaatacctcagtgcccctgatcaagcaatttcctgtcacctgcgagactgggccaggatcaccttccgggcatgcaatgggaaccgcgggtgtgtactacgttatggtgacctctacgctctcaatattccaaggaaagattaagccaacttaccggtttcgctgcctgaacgtgatcctctggctgggtttttgggccgtgcaacttaacgtttgtctgtcccgaatctatcttgcagcacattttcctcatcaagtggtggcaggagtgctgtcgggtatagcagtggcagagacttttagccatatccactcaatttacaacgcttccctcaagaagtacttcctgattaccttcttcctcttttcattcgctattggattctatctgctcctgaaggggcttggggtggaccttctttggactcttgagaaggctcaaagatggtgtgagcagccagaatgggtccatattgatactaccccctttgcatccttgctcaagaatctgggtaccctttttgggcttggtcttgcattgaactcgtccatgtaccgtgagtcgtgtaaggggaagctgtcgaagtggcttccttttagacttagctccattgtggcgtcacttgtgctccttcatgtgtttgattcactcaagccgccatcccaggtagaactggtgttctacgtgctttccttttgtaaatcggcagtcgtgccactggcgtcagtgagcgtgattccctattgcctggcacaggtcctgggacaaccgcataagaagagcctc

SEQ ID NO: 12924 - DNA, 1071 bp, synthetic construct
  misc_feature 1..1071: note = source = /note="Description of Artificial Sequence: Synthetic coding sequence"
  source 1..1071: mol_type = other DNA
atggaggagggcatgaacgtgctccacgacttcggaattcagagcactcattaccttcaagtcaactaccaggacagccaggactggttcattctcgtgtcagtaattgccgacctgaggaatgcattctatgtactcttccctatctggttccacctgcaggaagctgttgggattaaactgctgtgggttgccgtgatcggagactggctcaacctggtcttcaagtggattctcttcggacagcggccttactggtgggtgttagacactgattattattcgaatacctctgtacctttgataaagcagttccctgttacatgtgagactggccccggctccccatccggacacgccatggggacagcgggcgtatactacgtgatggtgaccagtaccctgtcaatatttcaggggaagattaagcccacctatcgctttagatgcttgaatgtgattttatggcttgggttttgggccgttcagctcaatgtttgcctttcccgaatttatctggctgcgcacttcccccatcaagtcgtcgccggagtgctttccgggattgctgtagcagagacattctcacacatccactccatatacaatgcttcactgaagaaatactttctgatcacgtttttcctgttctcctttgccataggcttttacctgttgctgaagggtcttggggtagatttgttgtggaccctcgaaaaggcgcagaggtggtgtgagcagcctgaatgggtacacatagataccaccccatttgctagtctgctcaagaatttaggtaccctctttgggctgggtctcgccctgaatagctccatgtacagagagtcatgtaagggcaaactctccaagtggttgccatttcggctaagctcaatagtcgcctccttggtattgctgcatgtctttgactccctgaaacccccgtcccaggtggaactcgtgttctacgttcttagcttctgtaagtctgctgtcgtccccttagccagtgtgagcgtcatcccgtattgcctggcccaggtgctaggacagccacacaaaaagagtttg

SEQ ID NO: 12925 - DNA, 1071 bp, synthetic construct
  misc_feature 1..1071: note = source = /note="Description of Artificial Sequence: Synthetic coding sequence"
  source 1..1071: mol_type = other DNA
atggaagaaggaatgaatgtgctccatgattttggaatccagtcaacccactaccttcaggtgaattaccaggactcacaggattggttcatattggtatcggtcatcgcagatcttaggaacgcattttacgtgctctttcccatttggtttcacttgcaggaggccgtcggtataaagctgctctgggtggcggtaatcggcgattggctcaatctggttttcaaatggatactttttggacaaaggccttattggtgggtgctcgacacggactactactctaatacctccgtgccactgattaagcagttccctgtgacctgcgaaactggaccagggtccccctccgggcatgctatgggtactgcaggcgtgtattacgtgatggtgacctccactctttcgatttttcaggggaagattaagcctacctacagatttcgctgtctcaacgtgatcttgtggcttggtttttgggccgtccagcttaatgtgtgtctgtccagaatatacctcgcagcacattttccacatcaagtggtcgcaggagtgctctcgggaattgcagtggcagagacgttctcacacattcacagcatatacaatgcaagccttaagaaatacttcttgatcactttcttcctcttctcgtttgcgattggcttttaccttcttctcaagggactgggcgtggatctgctgtggactctggagaaggcccagcgctggtgtgaacagcctgaatgggtccatattgatacgaccccctttgcatcgctgttgaaaaatctgggaactctttttggcctgggtcttgcgctgaactcgagcatgtaccgtgaatcatgtaagggaaaactgtcgaaatggctcccctttcggctttcatcaattgtcgcgtcacttgtccttctgcatgtgtttgacagccttaagcccccatcgcaggttgaacttgtgttttatgttttgtcgttctgcaagagcgcagtggtgcctcttgcctccgtgtcggtgattccttactgtctcgcccaggtcctcggtcagccacacaagaagtcactc

SEQ ID NO: 12926 - DNA, 1071 bp, synthetic construct
  misc_feature 1..1071: note = source = /note="Description of Artificial Sequence: Synthetic coding sequence"
  source 1..1071: mol_type = other DNA
atggaagagggaatgaatgtccttcatgatttcggaatacaatcgacgcattatctacaagttaactaccaagatagtcaggattggtttatccttgtgtctgtaattgcggacctccgaaacgccttctatgtacttttccctatttggttccatctgcaagaagccgtggggattaagttattgtgggttgctgtcattggagattggcttaatttagtcttcaaatggatattgttcgggcaacgaccttactggtgggtgcttgacacagactattacagcaacactagcgtgcctctgatcaaacaattccccgttacctgtgaaacagggcccggcagtccctcagggcacgcaatgggtacggccggtgtttactacgtcatggtaacatccacgcttagtattttccagggcaagatcaaaccgacttacagattccgttgtttgaacgttatactttggctcgggttttgggctgtccaactgaatgtttgtctctctcggatctatctcgccgctcacttcccccatcaagtcgttgcaggcgtgttatctggaatagcagtggcggaaacttttagccacatccatagtatatataacgctagtcttaagaagtactttctgatcaccttcttcctctttagtttcgctatcggcttctacttgttgttaaagggactgggagtggacttgctatggacgctcgagaaggctcagagatggtgtgagcagcccgaatgggtccatattgataccacgccattcgcgtctctgctaaagaatctggggactcttttcgggctgggtcttgccctcaattcgagcatgtaccgggagtcatgcaaaggtaagttatccaagtggttgccctttcgcctctcttcgatcgtggctagtcttgtcctgctccatgtattcgattcgcttaagcctcccagtcaagttgaattggtcttctatgtcctatccttttgcaagtcggccgtagtgccgctcgcttcagttagcgtcattccctactgtttggcgcaggtgctcggccagcctcataagaaatccctt

SEQ ID NO: 12927 - DNA, 1071 bp, synthetic construct
  misc_feature 1..1071: note = source = /note="Description of Artificial Sequence: Synthetic coding sequence"
  source 1..1071: mol_type = other DNA
atggaggaaggaatgaatgttcttcacgactttggaatacagtctactcattatctccaggttaattaccaggacagtcaggactggttcatcctggtttcagtgattgctgatttaaggaatgctttctatgtgttatttcccatttggttccatctgcaggaggccgtgggcatcaaactgttatgggtagcggtaatcggtgattggctgaatctggtgtttaagtggattctgttcggacaacggccttactggtgggtcctcgacaccgactattacagcaatacaagcgtccctctaatcaagcagttccccgtcacatgcgagaccggaccaggctccccatctggacacgcgatgggtaccgccggggtgtactacgttatggtgacttcaacactcagcatcttccagggaaaaatcaagccaacttataggttccggtgtctcaatgtgattctgtggctgggattctgggcggtgcaactgaacgtgtgcctgtcgaggatctaccttgcagcacacttcccacaccaggtagtcgccggggtgctcagtgggattgctgtcgccgaaaccttcagtcatatacattctatatacaacgcctccctaaagaagtattttctcatcacctttttcttattctcgtttgctattggtttttatctgctcttgaaagggttgggggtagatttgctatggacactcgagaaggcacagcgatggtgcgagcagccagaatgggtccacatcgacacaaccccctttgcatctttgctgaaaaacctcgggacactattcggtctgggtttggccttaaactcctcaatgtatcgagaatcatgcaaagggaagctgtctaaatggcttccatttagattgtcctctatcgtggcctctttggtcctcctgcacgtgttcgattccttaaaaccaccgagccaggtggagctggttttctacgtgttgagtttctgcaaaagcgccgtggttcccctggccagcgtaagtgttattccttactgtctcgcgcaagtcttggggcaaccccacaaaaagtcactg

SEQ ID NO: 12928 - DNA, 1071 bp, synthetic construct
  misc_feature 1..1071: note = source = /note="Description of Artificial Sequence: Synthetic coding sequence"
  source 1..1071: mol_type = other DNA
atggaagaaggcatgaatgtgctacacgattttggaatccagtcaactcattatctacaggtcaattaccaggattcccaggattggtttattctagtgagcgtcattgctgatctgaggaacgctttttacgtgctgttccctatctggttccacctgcaggaggccgtcggtatcaaactgctgtgggttgccgtcattggcgattggttgaatctggtgtttaagtggatactgttcggtcagcggccttactggtgggtcctggatactgattattacagtaatacatcagtccccctcataaaacagttccccgtaacctgcgagacaggtccaggatctccttcaggacatgccatgggcaccgccggagtgtactacgttatggtgacatccaccctgagcatattccagggtaagataaaacccacttaccgcttcaggtgcctcaacgtgatcctgtggctcggcttctgggctgtgcagctgaatgtttgtttgagtcgcatttacttagctgctcatttcccccaccaggtggtggccggggtcctgagtggcatagcagtggccgagacattcagccacatccattccatttataatgctagcctgaagaagtactttctgataaccttttttttattctccttcgcaatcggcttttatctgctactcaaaggcctgggcgttgatctcctgtggaccttagagaaggctcagcgctggtgtgagcagcctgagtgggtgcatatcgacaccacaccatttgctagtctgctgaaaaatcttggaactcttttcgggttaggcctcgcccttaatagcagtatgtaccgcgaatcatgcaaaggtaagctcagcaagtggctgccatttagattaagctctatagtggctagcctggttctcctgcatgtgttcgattctctgaagcctccatcccaagtggaactggtcttctatgtgctgtcattctgcaagagcgccgtggtccccctagcctccgttagcgtgattccatattgtctcgcccaggttcttggccagccacataaaaaaagtctg

SEQ ID NO: 12929 - DNA, 1071 bp, synthetic construct
  misc_feature 1..1071: note = source = /note="Description of Artificial Sequence: Synthetic coding sequence"
  source 1..1071: mol_type = other DNA
atggaagaagggatgaacgtgctgcatgacttcggaatccagtctacgcactatctccaagtgaactaccaggatagccaggattggttcattctggtatccgtgatcgcggatctgcgcaatgcattctacgtgctgtttcctatctggttccatctgcaggaagcagtaggtattaagttactttgggtcgctgtgatcggagattggttgaatctggtgtttaaatggatcctgtttggacagcgtccctattggtgggtgctagacactgattattacagtaatacctcggtgcccctgattaaacagttcccagtaacctgcgagactggtcctgggagcccctccggacacgcaatgggcaccgccggggtatattatgtgatggtcacgagtaccctcagtattttccagggaaagatcaaacccacataccggttccgctgcttgaatgttatcttatggctcgggttctgggccgttcagcttaacgtctgtttgtcacggatctacctggcagcccatttccctcaccaggtcgtggcgggagtgctttctggtatcgctgtggccgaaaccttttctcacatacatagcatatataatgcctcgctcaaaaagtactttctgatcaccttctttttgttcagtttcgctatcggattctacctactattgaagggactgggagtggatctgttgtggacattagagaaagcccaaaggtggtgcgaacagcctgagtgggtgcacatagatactactcctttcgcctctctacttaagaatctgggcaccctattcggcctgggactagccttgaattcaagcatgtacagagagtcatgcaaagggaagctgagtaagtggttgccattccggttgagctccattgtcgcctctctggtgcttctgcacgtgtttgatagcttgaaacccccttcacaggtggaactggttttttatgtgctgtcgttctgcaagtccgctgtggtgcccctggcctctgtgtctgtgatcccctactgcttggcccaggtgttgggacagccccataaaaagagtcta

SEQ ID NO: 12930 - DNA, 1071 bp, synthetic construct
  misc_feature 1..1071: note = source = /note="Description of Artificial Sequence: Synthetic coding sequence"
  source 1..1071: mol_type = other DNA
atggaggagggcatgaatgttttgcacgattttgggatccagtcgacccactatctacaggtcaactaccaagatagccaagactggttcatcttggtgtccgttattgcagaccttagaaatgcattttacgtcttatttcccatctggttccatctgcaggaggcagtcggcatcaaactcctgtgggtggccgtcataggagactggttaaatttagttttcaagtggatcttgtttggacagcggccatattggtgggtgctcgataccgactactactccaataccagcgtaccacttatcaagcagtttcctgtgacttgtgagactggcccaggttccccatccggacacgccatggggacagcgggcgtttactatgtcatggtcacttcgacgctttctatctttcagggaaagatcaagccgacgtataggtttcgttgtttaaatgtcatcttgtggctgggcttttgggcagtacaacttaatgtctgcctctcccgcatctacctggccgcccattttccacaccaagtggtggccggtgtactgtctgggattgcagtggcagagaccttcagccacatccactccatctataacgccagcctcaagaagtacttcctgataacctttttcctcttcagctttgcaattggtttctatctccttctcaaaggcttaggtgtagatctcttatggacactggaaaaagctcagcgctggtgcgagcagcccgaatgggttcacatagatacaactccttttgcctccctgttgaagaaccttggaacactgtttggcctggggctggctttgaattcgagcatgtatcgagagagctgcaagggcaagttatcaaagtggttaccattccggttgtcctcgatagttgcaagtctggtcttgctccacgtgtttgattcactaaagccaccatcccaggtggaactggtgttttacgtgctgagtttttgtaagtctgcggtggtcccactggcaagtgtttctgtaatcccgtattgcctggcccaggtgcttgggcagccccacaagaagagcctc

SEQ ID NO: 12931 - DNA, 1071 bp, synthetic construct
  misc_feature 1..1071: note = source = /note="Description of Artificial Sequence: Synthetic coding sequence"
  source 1..1071: mol_type = other DNA
atggaggaggggatgaatgtactgcatgacttcggaattcaatctacacattacttgcaagtgaattatcaggacagtcaagattggtttatactcgttagcgtgatcgcagatctgaggaatgctttctacgtcttattcccaatctggttccatctgcaggaagccgtgggaattaagttgctctgggtcgcagtgattggcgactggctgaatctcgtattcaagtggattcttttcggacaaaggccatattggtgggttctggatacagactactactccaacacctcagtgcccctaattaagcagtttcctgttacgtgtgaaaccggaccgggaagcccaagcgggcacgctatgggcacagcaggagtttactatgtgatggtcacctctactcttagcatcttccagggaaagatcaaaccgacttatcggttccgctgtctgaacgtcatcttgtggttaggcttttgggctgttcagctgaacgtatgtctttcgaggatctatctcgcggcccatttcccacaccaagtggtggcaggagtgttgagcgggattgctgtggccgaaaccttttcacacattcattcaatttacaacgcaagcctaaaaaaatatttcctcattactttcttcctgtttagcttcgcaattggcttctacctactcctcaagggcctgggcgtggatctcctgtggactctggagaaggcacagaggtggtgcgagcagcctgagtgggtgcacatcgatactaccccttttgcctcattgctgaagaatttgggcacactttttggcttgggcctggccttgaacagctctatgtaccgcgagtcatgtaaagggaagctttccaagtggttgccattccgcctgtcaagtatcgtggcctctttggtgctgctccatgtcttcgattccctgaaaccaccctcccaggtggagttagttttctacgtcctgtcattctgcaagtccgccgtggtgccattggccagcgtgtccgtaatcccatattgtctggcgcaggtgctgggacagccccacaaaaaatctctc

SEQ ID NO: 12932 - DNA, 1071 bp, synthetic construct
  misc_feature 1..1071: note = source = /note="Description of Artificial Sequence: Synthetic coding sequence"
  source 1..1071: mol_type = other DNA
atggaggaaggcatgaatgtgctgcatgacttcggaatacagtccacacactacctgcaggtcaactatcaagactctcaggactggtttattctggtgagcgtaatcgccgacttgagaaacgccttctacgtcctgtttcccatatggtttcacctccaagaggccgtgggaatcaagctgctgtgggtcgccgtgatcggcgattggcttaatctggtcttcaagtggattctgttcggtcagaggccctactggtgggttctggacactgattactactctaacactagtgtacccctcattaaacagtttcccgtgacctgcgaaactggccctggcagcccgagcggtcatgctatgggaaccgcaggcgtctactatgttatggtaaccagcacattgtctatcttccagggcaaaataaagccgacgtacaggttcaggtgtctcaacgtcattctttggttgggcttctgggctgtccagctgaatgtctgtctgtcccgcatttatctcgctgcacatttccctcaccaggtagtcgccggtgtcctctctggaattgccgtggccgagacttttagccatatacattcaatctataatgcttctcttaagaagtacttcctgataacattcttcctgttttcttttgcaataggtttctatctgctcctgaaaggcttgggagtagacctcctttggacgctggagaaggcacaaagatggtgcgaacaacccgaatgggttcacatcgacaccaccccattcgcctccctcttgaagaacctgggcaccctgtttggtctgggcctggcccttaattcttccatgtacagggaatcatgcaagggtaaattgtctaaatggctgccctttaggctctcctccattgtagcctccctcgtactgctccacgtttttgattcattgaagccgccctcccaggttgagcttgtgttctatgtgcttagcttctgcaagagcgctgtcgtcccacttgcctccgtgtccgtgatcccctattgcctggcgcaggttctcggacagccacataagaagtccctg

SEQ ID NO: 12933 - DNA, 1071 bp, synthetic construct
  misc_feature 1..1071: note = source = /note="Description of Artificial Sequence: Synthetic coding sequence"
  source 1..1071: mol_type = other DNA
atggaagagggtatgaacgtcctacatgacttcgggatccagagtacccactacttgcaagttaactaccaggatagccaggattggtttatccttgtcagtgtcattgccgacttacgtaacgccttctacgtgttattccctatttggttccatcttcaggaggcggtcggtattaagttgctttgggtcgcagtgattggtgactggcttaatctggtattcaagtggatccttttcggtcagcggccatactggtgggtcctggatactgactactacagtaacacctctgtccctctcatcaaacagtttcctgttacgtgcgagacgggccccggctctcccagcggccacgctatgggcacggccggagtgtattatgtgatggttaccagcaccctgtcaattttccagggaaagattaaacccacttaccgttttagatgcctcaacgttatcctctggcttggtttctgggcggttcagctgaacgtctgtctgtcacgtatctacttggctgcacattttccgcatcaggtcgtggcgggtgttctttcgggtatcgccgtcgcggagacgttctcccacatccactccatctataatgctagccttaagaaatatttcttgatcacttttttcctattctcctttgctatcggcttctaccttctcctgaagggtctgggcgtggatctgttgtggaccctggagaaggcgcagcgctggtgcgaacagcctgagtgggtccacattgacaccacaccctttgcctcccttttgaagaaccttggcaccttgttcgggcttggcctcgcccttaattcctccatgtaccgcgaatcctgcaagggcaagctgtcgaagtggcttcctttccggctttcttcgattgtcgcttccctcgtcctgttgcatgtttttgatagcctaaagcctccttcgcaggttgagctcgtcttctacgtgttgtctttctgtaagtccgcagtggtgcctctcgctagcgtctcggttatcccctactgcctcgcccaggtgctcggtcagccccacaagaagtctctt

SEQ ID NO: 12934 - DNA, 1071 bp, synthetic construct
  misc_feature 1..1071: note = source = /note="Description of Artificial Sequence: Synthetic coding sequence"
  source 1..1071: mol_type = other DNA
atggaggagggtatgaacgtgctgcacgatttcgggattcagtcaacccactacctgcaggtgaattatcaggattctcaggattggttcatcctggttagtgtgatcgccgacctccggaatgccttttacgtcctgttccccatttggttccacttgcaggaggccgtgggaattaaactactatgggtggcggttattggcgattggttaaatctggtgtttaagtggattttgtttggccagcggccatactggtgggtacttgataccgattactacagcaacacaagcgttccgctgatcaaacagttccccgtgacttgcgagacagggccagggagcccttccggacacgcaatgggcaccgctggggtatactatgtgatggttacctccaccctcagtatatttcagggcaaaatcaagccaacataccggttccgctgtttgaatgtgatattgtggctcgggttttgggcagtacagctgaacgtctgccttagccggatttatctggctgcccactttcctcatcaggtcgttgcaggagtcctcagcggcatcgccgtggctgagacattttctcatattcacagtatctataacgcctccctgaagaaatacttcctcatcaccttctttctgttcagctttgccatcggcttctaccttctcctcaagggactgggagtcgacctgctctggactctggagaaggcccaacggtggtgtgagcagcctgagtgggtgcatatcgatacaaccccttttgcatctctgttgaagaacctgggaactcttttcggcttaggcctcgctctcaatagtagtatgtatagggagagctgcaaaggcaagctcagcaaatggctgccatttcgtttgagtagcatcgttgcctctcttgttctgctgcacgtcttcgatagtctcaagccaccctcgcaggtggagctggtgttctacgtcctaagcttctgcaagagtgcagtggtccctcttgcctcagtatcggtcattccgtactgtttggcgcaggttttgggccagcctcataagaagagtctt

SEQ ID NO: 12935 - DNA, 1071 bp, synthetic construct
  misc_feature 1..1071: note = source = /note="Description of Artificial Sequence: Synthetic coding sequence"
  source 1..1071: mol_type = other DNA
atggaggagggaatgaatgtcctgcatgacttcggcatccagtcgacccactatctccaagtgaactaccaagattctcaagactggtttatcttggtgtcagtgattgcagatctgcgcaatgccttctatgtgctgttccccatctggtttcacctgcaggaagccgttgggatcaagctgctgtgggtggccgtgatcggcgactggctgaatctggtgtttaaatggattctttttggccaacgcccctactggtgggtcctggatactgattactattcaaacaccagtgtgccccttataaagcagttcccagtgacctgtgaaacagggccaggcagcccctccgggcacgcgatgggcactgccggcgtgtactacgttatggtgacaagcacgctaagtatctttcagggtaaaatcaagcccacgtacaggttccgctgcctcaacgtgatcctctggctcgggttttgggcagtgcagctaaacgtgtgtctgagcaggatctatctggctgcacactttcctcatcaggtggtcgctggcgtcctcagcggaatcgccgtagccgagaccttctcccatatccactctatttataacgctagcctgaagaagtactttctgatcactttcttcttgttcagttttgcgataggattctatctgctgctcaagggacttggagtagacctgctgtggactctggagaaagctcagcggtggtgtgagcagccagagtgggtccatatcgataccaccccattcgctagtttacttaaaaacttggggacgctgtttggtctaggcttagcactgaattctagcatgtatagagagtcatgcaaaggcaagctatctaagtggctgccctttcgactgtcttctattgtcgcaagcctcgtgctgctgcatgtctttgactcgctcaagcctcctagtcaggtcgagcttgtcttctacgttctgagtttctgtaagtctgccgtggtgccactcgcctccgtgagtgtgatcccatattgcctggcccaagtcctgggccagccccataaaaagtccctg

SEQ ID NO: 12936 - DNA, 1071 bp, synthetic construct
  misc_feature 1..1071: note = source = /note="Description of Artificial Sequence: Synthetic coding sequence"
  source 1..1071: mol_type = other DNA
atggaggaggggatgaatgtgctgcacgactttggcattcagtctactcattacctgcaggtgaactatcaagacagtcaagattggtttattttggtctctgttatagctgacctaaggaacgccttttacgtactgtttccaatctggtttcatctgcaggaagcggttggtatcaaactgctgtgggtcgctgttattggggattggctaaacttggtgtttaagtggatactgttcggtcaaaggccctattggtgggtgttagacactgactattattcaaacacgtcagtgccgcttatcaagcagttccccgtgacctgcgaaaccgggcccggttcaccgagtgggcacgctatgggcacggcaggagtctattacgtcatggtgacctctactctgagcatatttcaaggcaaaatcaaaccaacttataggtttcgctgtctgaacgtcattctttggctaggcttttgggctgttcagctgaacgtttgtctgtctagaatctatcttgcagctcacttcccacaccaagtggttgctggggtgttaagtggaatcgccgtagcggagacctttagccatatccactccatctataatgcctctctcaaaaaatacttcttgataacctttttcctattctcgttcgccatcggcttttacttactcctcaagggcctgggtgtggacttgctatggaccctagagaaagcccaacgatggtgtgaacagcccgagtgggttcatatcgacaccacaccgtttgccagtcttctcaagaacctgggtacgcttttcgggctcgggttggcactgaactcctcaatgtacagggaatcctgtaagggtaaactgagcaaatggttgccttttcgcctgtccagcatcgttgcttctctagtattgctccacgtgttcgatagtctgaaacccccaagccaggtagaattggtgttttacgttctgagtttctgcaaatcggctgttgttccactggcctctgtctctgtgataccttactgtctcgcacaggtgctgggccagccacataagaagtctctg

SEQ ID NO: 12937 - DNA, 1071 bp, synthetic construct
  misc_feature 1..1071: note = source = /note="Description of Artificial Sequence: Synthetic coding sequence"
  source 1..1071: mol_type = other DNA
atggaagaaggcatgaatgttcttcatgattttggcattcaatctacacactatttgcaggttaattatcaagattcacaggattggtttattctggtatcagtgatcgcagatttgcgtaacgccttttacgttttgtttccgatctggtttcatttgcaggaagcagtcggcatcaaactcttgtgggtcgctgtcattggagattggctcaacctggtgtttaagtggatcctgtttggacaacgcccatactggtgggttcttgatacagattattattccaacacctctgttccgctgataaagcaatttcctgtcacttgcgaaacagggccgggcagtccgagtgggcatgcaatgggcaccgcgggtgtatactacgtcatggttacgagcacattatcgatctttcaaggcaagattaagcctacatatcgctttcgatgcttaaatgtgattttatggttaggattctgggcggtgcaattaaatgtctgtctttcaagaatttatttggcggctcacttcccgcaccaagtcgtagctggagtattatcgggtattgctgttgccgagacgtttagccatattcattctatctacaatgcctcgcttaaaaaatacttcctgattacattttttctcttttcctttgctattggtttttatcttttgctaaaaggtcttggtgttgacttattatggacacttgaaaaggctcagagatggtgtgaacagccggaatgggtgcacattgatacgacaccctttgcatctctccttaaaaatctgggtacactctttggattgggattagcgctgaattcaagcatgtatcgggaatcatgtaagggaaaattatccaaatggcttccgtttcggctatcatcaattgtagcctccttagtgctgttgcatgtatttgacagcctcaagccccctagtcaggtagaattggtcttttatgtgctttccttttgtaaatcagctgtcgttcccttggcttccgtgtccgtcattccttattgcctggcacaagttcttggtcagcctcataagaaatctttg

SEQ ID NO: 12938 - DNA, 1071 bp, synthetic construct
  misc_feature 1..1071: note = source = /note="Description of Artificial Sequence: Synthetic coding sequence"
  source 1..1071: mol_type = other DNA
atggaagagggcatgaacgtcctccatgacttcggcatccagtcgacgcactatctccaggtgaattatcaggattcacaggattggttcatactcgtatccgtcattgccgatttgcgaaacgccttctacgttctgttccccatatggttccacctgcaggaggcagtaggtatcaagttattatgggtggcggtgatcggagactggctcaacctggtgtttaaatggatactctttggccaaagaccgtactggtgggttctggatactgattactattccaatacctctgtgcctttgattaagcagtttcccgtgacatgtgaaactggcccaggcagtcccagtgggcatgctatggggacggctggggtctactacgtgatggtcacaagcacactgagcattttccaaggaaaaataaaacccacctacaggtttagatgcttaaacgtaatcctgtggctggggttttgggctgtgcagctgaacgtgtgcctgtctcgtatctatttagccgcccactttcctcaccaggttgtggctggcgtgctatccgggattgcagtggccgagacctttagtcacatacactctatctataacgcatcacttaaaaagtatttccttatcactttcttcctgttttcttttgccattggtttttatcttttgctgaaaggattaggcgttgatttactgtggaccttggagaaagcccagagatggtgtgagcagcctgagtgggtgcacattgataccacccctttcgcttcacttttaaagaatctgggaacgctatttggactcggcctggctctgaactcgtcaatgtatcgtgaaagctgcaagggtaaattgtccaagtggctgccctttcggctcagctctattgttgcttcacttgttttgttacacgtgtttgatagcctcaagcccccgagtcaggtggagctggttttttacgtgctttctttttgtaagtccgctgtggtccccctcgcaagcgtttcagtaataccttactgccttgctcaggtcctgggacagccccataaaaaatccctt

SEQ ID NO: 12939 - DNA, 1071 bp, synthetic construct
  misc_feature 1..1071: note = source = /note="Description of Artificial Sequence: Synthetic coding sequence"
  source 1..1071: mol_type = other DNA
atggaggagggaatgaacgttcttcatgacttcggaatccagtccacccattatcttcaggtgaactatcaggactctcaagattggtttatcctggtcagtgtcatcgccgatctcagaaatgcgttttatgtactgtttcccatctggttccatcttcaagaggcagtgggcattaagttgctttgggtcgcagtgatcggagactggctgaaccttgtctttaagtggatcctttttggtcagcgcccgtattggtgggtgctggataccgactactatagtaataccagcgttccattaatcaagcaattcccagtgacatgtgagaccggaccagggtcccctagcgggcacgccatgggcaccgccggcgtatactacgtgatggtgaccagcaccctgagtatctttcagggcaaaatcaaaccgacatatcgctttaggtgcttgaacgtcattctgtggctgggattttgggctgtgcagttaaacgtgtgcctcagcagaatctacctcgcagctcattttccacatcaggtcgtggcaggcgtgttgtcaggtattgcggtggccgagacatttagccatatccacagtatttataacgcctcgctgaagaaatatttcttgattaccttcttcctgttcagtttcgcaattggattttatttgctgttgaaaggactgggagtggatctcctatggacattggaaaaagctcagagatggtgcgagcagcctgaatgggtgcatatcgatactactccatttgcctctctgctgaaaaacctgggcacactgttcggcctgggcctggcgttaaactcaagcatgtatcgcgagtcttgcaaaggtaagcttagtaaatggctcccatttagactcagctcaattgttgcttccctggtcctgctgcacgtcttcgactctctcaagccacccagtcaggtggagctcgtgttttacgtgcttagcttctgcaagagcgccgttgtgccactcgcaagtgtctctgtcatcccctactgcttggcacaagtgcttggacagccccacaaaaaatcgctc

SEQ ID NO: 12940 - DNA, 1071 bp, synthetic construct
  misc_feature 1..1071: note = source = /note="Description of Artificial Sequence: Synthetic coding sequence"
  source 1..1071: mol_type = other DNA
atggaggaaggaatgaatgttctgcatgatttcggaattcagtctactcactatctccaagtgaattaccaggatagccaggactggttcattctggtgtcagtgattgccgatctgcgtaatgctttctatgtgttattccccatttggttccatcttcaggaggccgtgggaatcaaactcctgtgggttgctgtaatcggtgactggttaaacctggtcttcaagtggatcctatttggccagcgcccatattggtgggtcctcgacacagattactattctaacacctccgtcccgctcattaagcagttccctgtgacttgtgagaccggccccggtagtccctcggggcacgctatgggaaccgcaggcgtttattacgtgatggtgaccagcaccctgtctatttttcagggaaagataaaacccacctaccgctttcgatgcctcaacgtgattctttggctgggcttctgggctgtacagcttaacgtgtgcctcagccgtatttacctggctgcgcactttcctcaccaagtggtggccggcgtcctctcaggaatcgcagttgccgagacgttttcccatatccattcaatttataatgcgtctcttaaaaagtatttcctgatcacattcttcctgttttcttttgccattggattttatcttttgcttaagggcttaggagtggacctgctgtggacactggaaaaggcccagcgttggtgtgaacagccggagtgggtgcatattgacacgacgccattcgcctctctcctcaaaaatctcgggactctgttcggcttaggcctggccctgaactcgtccatgtacagagagagttgtaagggaaaactgtccaagtggctccctttcagactgagctcgatcgtggccagtttagtcctcctccacgtgttcgacagtcttaagccacccagtcaggttgaactagtcttctacgtactctccttttgcaaatcagctgtagtgccacttgccagtgttagtgtgatcccatattgtttggcccaggtccttgggcagccccataaaaagtcactc

SEQ ID NO: 12941 - DNA, 1071 bp, synthetic construct
  misc_feature 1..1071: note = source = /note="Description of Artificial Sequence: Synthetic coding sequence"
  source 1..1071: mol_type = other DNA
atggaagaaggcatgaatgtacttcacgattttggaatacagtccacacactacctgcaagtgaactatcaggatagccaagactggttcatattggtgtctgtgatcgcagacctccgaaatgctttttacgtcttgttccccatctggttccaccttcaagaggctgtagggatcaaactcctgtgggtcgcagtgattggtgattggctgaacttggtgtttaagtggatcctgttcggccaacggccgtattggtgggttcttgatactgactactacagcaacacctctgtaccgctgattaagcagtttcccgtcacctgtgaaactggccccggttccccatccggtcacgccatggggacggcaggggtgtattacgtgatggttacgtcaactttgagcattttccagggaaaaattaaacctacgtaccggttccggtgtcttaatgtgatcctttggctgggattctgggcggtacagttgaacgtgtgtctgagtaggatctaccttgctgcccatttcccgcatcaggtggttgctggcgtactctctgggatcgccgtggcggaaacattcagccacatccatagtatttataatgcctccctgaaaaagtacttcctcattaccttctttctgttctcatttgccattggcttctacctgcttctgaagggactcggcgttgacctcttgtggacgctcgagaaagcacagcggtggtgcgagcaaccagaatgggtccacatcgatacgaccccgtttgcctccttgttgaaaaacctggggactctctttggactgggactcgctttgaactcttccatgtatcgcgagagctgcaagggaaagctgagtaagtggctgcctttcagactcagtagtatcgtggcgagcctcgtcctcctccacgtcttcgactctctcaagccacctagccaagtggaattggtgttctatgtcctgtctttctgtaaatcagcagtggtgccactggcatccgtatccgttatcccgtattgtttggcccaggtccttggacagccccacaagaaatctctt

SEQ ID NO: 12942 - DNA, 1071 bp, synthetic construct
  misc_feature 1..1071: note = source = /note="Description of Artificial Sequence: Synthetic coding sequence"
  source 1..1071: mol_type = other DNA
atggaggaaggcatgaacgtgctacacgattttggaatccagagcacacactatctccaggtaaattaccaggatagccaggattggtttatcttggtttccgtgatcgccgatctaaggaatgctttctatgttctgtttcctatctggttccacctgcaagaggccgtgggcataaagctgttgtgggtggccgtaatcggagactggttgaatttggtgttcaagtggatacttttcggacagaggccttactggtgggtgctcgacactgattattatagtaatacttctgttccactcatcaagcaatttcccgtgacatgcgaaactgggcccggtagccccagcggacatgctatgggcacagcgggagtgtattacgtaatggttacctccaccctgagtattttccagggtaagatcaagcctacttaccgattccggtgtctcaacgttattctttggttaggattttgggctgtccaactgaatgtttgcttgtctcgtatctatcttgcggctcacttccctcatcaggtcgttgctggagtgttgtccggaatagccgtggctgagacgttcagccacatccacagtatctataacgctagtctcaagaaatatttcctgattacattttttctctttagtttcgccatcgggttttacttattgctgaaagggttgggtgtggacctcttgtggactctcgaaaaggctcaacgatggtgtgagcaaccggagtgggtccacatcgatacaactccattcgcctctctgctcaaaaatttagggaccttgttcgggctgggactggctctaaacagtagtatgtatcgtgaatcatgcaaaggaaaattatctaagtggctgccttttcgtctcagtagcattgtggcatcacttgtgctcctccatgttttcgatagtctcaagcccccttcacaggtggaactggtattctacgttcttagcttctgtaagtcagccgtagtcccactagcatcagtgagcgtgattccttactgcctggctcaagttcttggccagcctcacaagaagagcttg

SEQ ID NO: 12943 - DNA, 1071 bp, synthetic construct
  misc_feature 1..1071: note = source = /note="Description of Artificial Sequence: Synthetic coding sequence"
  source 1..1071: mol_type = other DNA
atggaggaaggaatgaacgttttacacgactttggaatccagtctacccactaccttcaagttaattatcaggacagccaggactggttcattctagtgagtgtcattgccgacctccgaaacgcgttctacgtcctgtttcctatctggtttcatttgcaagaggcagtaggcattaagttgctttgggtagccgtcataggcgactggctgaatctggtctttaaatggattctctttgggcagcgaccatattggtgggtcctggataccgattactattccaacacaagcgtgccactgattaaacaattccccgtaacctgtgagactgggcccggctctccttccggacacgcaatgggtacggcgggggtgtattacgtgatggtcacctcaactctgagtatctttcaagggaaaattaaacccacttatcgcttcagatgtctgaatgtcatcctctggttaggattctgggccgtccagctgaatgtctgtctgagccgcatctacctggcagcccacttccctcatcaggtagtcgctggtgtcctgtccggcatcgcagtagctgaaaccttctcacatatccactctatctacaatgcttccctcaaaaaatactttctgatcacgttttttctattctccttcgccatcggattttatttgcttcttaaggggctgggggttgatttgctgtggactctggaaaaggcccagaggtggtgcgagcaaccggaatgggtgcacatcgatactacaccctttgcttccctgttaaaaaacctggggacactgtttgggttgggcctggcgctgaatagcagcatgtacagagaatcgtgcaagggaaagttgtccaagtggcttccgttcagactgtcttcaatagtggccagcctggtcctgctgcatgttttcgattcactgaagccacccagccaagtggagctggttttttacgtgctatcattttgcaagagcgctgtggtgcctttggcatcggttagtgttatcccgtactgcctcgcccaggtgttaggacagccacacaaaaaatctctc

SEQ ID NO: 12944 - DNA, 1071 bp, synthetic construct
  misc_feature 1..1071: note = source = /note="Description of Artificial Sequence: Synthetic coding sequence"
  source 1..1071: mol_type = other DNA
atggaggaagggatgaacgtcctgcatgatttcggtatacagtcaacacactacctccaagtgaattatcaagatagtcaggactggttcatcttggtttcagtgatcgctgacctccgcaatgccttttacgtgctgtttcccatttggtttcacctgcaggaggcagtggggataaagctgctgtgggtggctgtcatcggcgattggctcaacttagtgtttaagtggatactgtttgggcagaggccctactggtgggttctggacacagattactacagtaatacaagtgtgccacttatcaagcagttccctgtaacttgcgaaaccggccctggcagccctagcggtcacgctatggggactgccggcgtctattacgtgatggtgacctccaccctgtctatcttccagggtaaaatcaaaccaacctaccggtttcgttgccttaatgttattctgtggttgggattttgggcagtgcaattaaacgtatgtctgtcaagaatttacctggccgcacatttcccccatcaggtggttgccggtgtactgtcagggattgccgtggctgagacctttagtcacatacatagtatatataatgcaagcttaaaaaaatattttttaatcacattcttcctgttctcttttgccataggcttctatctgctgctcaagggcctcggggtggatctactgtggacactggaaaaagcccaacggtggtgtgaacaacctgagtgggttcacatagacaccactccattcgcttctctgctgaagaatctgggcaccctcttcggactgggcctggccctgaacagttctatgtaccgcgagtcctgcaagggcaagctctcaaaatggctgccatttcggttaagctctattgtggcttccctggtcctgttgcacgtgttcgatagcctgaaaccaccatctcaggtcgagctagtgttctatgtgctgtccttttgtaagtccgccgtcgtgcctttagctagtgtgagtgttatcccatattgcctggctcaggtgttaggccagccccataaaaaaagcctg

SEQ ID NO: 12945 - DNA, 1071 bp, synthetic construct
  misc_feature 1..1071: note = source = /note="Description of Artificial Sequence: Synthetic coding sequence"
  source 1..1071: mol_type = other DNA
atggaggaggggatgaacgtcctgcatgattttgggatccagagtactcattacctccaggttaattaccaggattcccaggactggttcatattggtgtctgtgattgctgacctgcggaatgccttctatgttctcttccccatctggtttcacctgcaggaggctgttggaattaagctgttgtgggttgccgtcatcggcgattggcttaacctcgtgtttaaatggatccttttcggacagcgcccttattggtgggtactcgacaccgattactactccaacacctcagttcctttaatcaagcaatttccagtgacttgtgaaaccggtccaggcagtcctagtgggcacgcgatgggtaccgcaggcgtgtactacgtcatggtgacctctaccctgtccattttccaggggaagattaagcccacatataggttccgctgtttgaacgtgattttatggctggggttttgggcagttcagcttaacgtctgtttgagccgcatatatctcgccgcccactttccccaccaagtggtggctggcgtcctctctggtattgctgtggctgagactttcagccatatccattctatttataatgcgtctctcaagaagtacttccttataaccttcttcctgttctcattcgcaatcggcttctatttgttactcaagggattaggggtagaccttctgtggaccctggagaaggcccagcggtggtgcgaacagcctgagtgggttcacatcgatacgaccccattcgcatcactgctgaagaatctgggtacccttttcgggcttggattggctctcaactcctctatgtaccgtgaaagctgtaaaggtaaattatccaagtggctgccattcaggctgtccagcatagttgctagtttggtgttgcttcacgtgttcgatagcctcaagccacctagccaggtggagctggttttctatgttttgagcttctgtaagagtgcggtggttcctctagcctctgttagcgtcattccttattgcctggcgcaagtactgggacagcctcacaagaaaagtctt

SEQ ID NO: 12946 - DNA, 1071 bp, synthetic construct
  misc_feature 1..1071: note = source = /note="Description of Artificial Sequence: Synthetic coding sequence"
  source 1..1071: mol_type = other DNA
atggaggagggaatgaacgtactgcacgacttcggaattcagtccacccactatcttcaagtcaattatcaggatagccaggattggttcatcttagtgtctgtgattgcggacctcagaaatgctttttatgtacttttccccatatggttccatctacaggaggctgttggcatcaaactgctgtgggtggccgtcatcggggactggctgaacttggtgtttaaatggatccttttcggacaaagaccctactggtgggtactggatactgattactactctaatacatctgtgccgctgatcaagcaattcccggtgacctgtgaaactgggcccggctcaccgtcaggccatgccatgggcaccgcaggcgtatattatgtgatggtgacgagtactctctcgatatttcaaggcaagataaagccaacttatagatttagatgtctcaacgtaatactgtggctcgggttttgggccgttcagctgaacgtatgtctgagccgaatttatctagccgcgcacttcccacaccaggtagttgccggggttttgagtgggatcgcagtggccgaaacattttctcacattcacagcatctacaatgctagcctcaagaagtactttctgatcacgttttttctattctcttttgccatcggattttatctgttgctcaaagggctaggggtggatttgctctggacactggagaaggctcagcgttggtgcgagcagcctgagtgggtacatattgataccaccccattcgcctctctactcaagaacctggggaccttattcggcctgggactggcgctcaatagctcgatgtaccgagaatcatgtaagggaaagctgtctaagtggttgcctttccgactaagttcaattgtcgccagcctggtcctgcttcacgtcttcgactctcttaagcccccatctcaagttgagttggtcttctacgtacttagcttttgtaagtccgctgtcgtccccctggccagtgtcagcgttattccctactgcctggctcaggtgctgggccagccccataagaagtctctg

SEQ ID NO: 12947 - DNA, 1071 bp, synthetic construct
  misc_feature 1..1071: note = source = /note="Description of Artificial Sequence: Synthetic coding sequence"
  source 1..1071: mol_type = other DNA
atggaagagggaatgaatgttttacatgattttggaattcaatcaacacattatttacaagttaactatcaagattcacaagattggttcattttagtttctgttattgctgacttacgtaatgcattttatgtcctttttccaatatggtttcatttacaagaagcagttggaatcaaattactttgggtcgctgttataggagattggttaaacttagtttttaaatggatattatttggtcaaagaccatattggtgggttttagatacagattattattctaatacatcagtaccattaattaaacaatttcctgttacttgtgaaacaggaccaggatcaccttctggacatgctatgggtactgctggagtttactatgttatggtaacctctactttatcaatttttcaaggtaaaattaaaccaacttacagatttagatgtcttaatgttattctttggttaggattttgggcagttcaacttaatgtatgtttaagtagaatttatttggctgctcattttccacatcaggttgttgctggagtactttctggtattgctgtagcagaaaccttttctcatatccattcaatttataatgcttcactcaaaaagtattttttaattactttttttttattctcttttgcaattggattttatcttttattaaagggattaggggttgacttattatggactttagaaaaagctcaaagatggtgtgagcaaccagaatgggttcatattgatactactccatttgcatctcttttaaaaaatttagggacattgtttggattaggacttgctttaaatagtagtatgtatagagaatcttgtaaaggaaaattatctaaatggttaccttttcgtttatcatcaattgtagcatctttagttttattacatgtttttgattctttaaaaccaccatcacaagttgaattagtattttatgttttaagtttttgtaaatctgcagttgttccattagcttctgtttctgttattccatattgtcttgcacaggtcttaggtcaacctcataagaaatctctt

SEQ ID NO: 12948 - DNA, 1071 bp, synthetic construct
  misc_feature 1..1071: note = source = /note="Description of Artificial Sequence: Synthetic coding sequence"
  source 1..1071: mol_type = other DNA
atggaagaaggcatgaatgtcctacatgattttggaatccaaagcacacattacttgcaggtaaactatcaagattcacaggattggttcatccttgtgtctgttatagcagatctgcggaacgctttctacgtgttgtttcctatctggttccatctgcaggaggccgttggaatcaaactgttgtgggtcgcagtgataggagattggcttaaccttgtcttcaaatggatccttttcggccagcggccttattggtgggtgctggacactgattactattctaacacttccgtgccgcttattaagcagtttccagtaacttgcgagacaggacccggcagcccatcagggcatgctatgggtacagccggtgtctactacgttatggtcacatctacactgagcatcttccaaggcaagataaaacctacatatagattccgttgcctcaacgtgattctgtggctcgggttctgggccgtacaactgaatgtctgcctgagccggatctaccttgccgcgcatttcccacaccaagttgttgctggagtgctgtccggaatagccgttgccgagaccttttcccatatacattccatttacaacgccagcctgaagaagtacttcttgataaccttcttcttattcagctttgcaataggattttacttgctgctgaaaggccttggagtggacctcctatggacactagagaaggcccagcgctggtgcgaacagcctgaatgggtccacattgacactacaccgttcgcaagcttactgaagaacctgggcaccctctttggactggggctcgccctaaacagcagtatgtaccgcgagtcgtgcaaaggaaaactctccaaatggctcccgtttagattgtcttcgattgtggccagtctcgtgctgcttcatgtgttcgacagtctaaaaccgcccagccaggtggagttggtattctacgtactcagcttttgcaagtctgctgtggtgccccttgcgtcggtatctgttattccctactgcctggcccaggtcctgggacaaccccacaaaaagtcactc

SEQ ID NO: 12949 - DNA, 1071 bp, synthetic construct
  misc_feature 1..1071: note = source = /note="Description of Artificial Sequence: Synthetic coding sequence"
  source 1..1071: mol_type = other DNA
atggaggaagggatgaacgtgctccacgatttcgggatacagagtactcactacctgcaggtgaattatcaggatagtcaggattggtttattcttgtctcagtgattgcggatcttaggaacgctttctatgtcttattcccaatatggttccatttacaggaagctgtaggaatcaaactgctctgggtggccgtgattggagactggcttaacctagtgtttaaatggattctgttcgggcagagaccttattggtgggtcctggatacagactactactcaaacacttcggtgcccctgatcaaacagttcccagtaacttgtgaaactggacctggaagtccatctggacacgccatggggactgctggagtatattatgtgatggtgacttccacactgtccatctttcagggaaagattaagccaacttatcggttcagatgtctcaatgtgattctttggctcggattctgggccgttcagctgaacgtgtgtctgtcaaggatttatttagctgcccattttccacatcaggtcgtcgccggagttttgtcagggatcgccgtcgccgaaacattttctcatattcacagtatttataatgccagtctcaaaaaatattttctaatcacattttttttgttctcatttgctataggattttatcttctccttaaagggctcggagtggatctgctgtggacacttgagaaggctcagcggtggtgcgaacagcccgaatgggtacacattgatacaacaccattcgcttctctgttaaaaaatctcgggactctttttggattaggacttgctctgaattcttccatgtaccgcgaatcctgcaagggaaaattgtccaaatggctcccctttcgactctcttctatagtcgcttcactggtgctccttcatgtctttgactcccttaagcctccttcccaggtagaactcgtgttttacgtcctaagtttctgcaaatccgctgtggtacctctcgcttcggtttctgtcatcccttattgcttagcccaggttctagggcagccccataaaaaatcttta

SEQ ID NO: 12950 - DNA, 1071 bp, synthetic construct
  misc_feature 1..1071: note = source = /note="Description of Artificial Sequence: Synthetic coding sequence"
  source 1..1071: mol_type = other DNA
atggaagagggcatgaacgtcctccacgatttcgggatacagagcacccattatcttcaagtcaactatcaggatagtcaagactggttcatcctggtttccgtgatagcagatctccgaaacgctttctacgtcctgttccccatttggttccacctgcaagaggcagttggtattaaacttctctgggtggccgtcatcggagactggctgaacctggtgtttaagtggatactcttcggacagaggccatactggtgggtgctcgacaccgactattattccaacacaagtgttcccctgatcaaacagttccctgtcacctgtgagacggggcctggttccccttcaggccacgccatgggcacagccggtgtgtattatgttatggtgacatctaccttgtccatatttcagggaaaaatcaagcctacctatcggtttcgctgcctcaatgtgattctctggctggggttctgggcagttcagcttaatgtttgtctttctcgcatttatctggccgcccacttcccacaccaggtggtcgccggagttctctctgggattgccgtcgctgaaaccttttcccatatccactctatctataatgctagcttgaaaaaatatttcctcatcaccttcttcctgttctcattcgccattggattttacctcctgctgaaaggcctcggcgttgacctcctgtggaccttggagaaggcccagcggtggtgcgagcagccagaatgggttcacattgacacaaccccttttgcttctctgctcaagaacctgggtaccctgtttggactggggctggcgctgaactcttctatgtacagggagtcctgcaaggggaaattgtccaaatggctgccgttcagactgtccagtatcgtggcttctctcgtcctgttgcatgtgttcgatagtctcaagcccccaagtcaggttgaacttgtattttatgtgcttagcttctgtaagtctgccgtggttcccttggctagcgtaagcgttatcccgtactgtctggcccaggtgctcgggcaacctcacaagaagtcactc

SEQ ID NO: 12951 - DNA, 1071 bp, synthetic construct
  misc_feature 1..1071: note = source = /note="Description of Artificial Sequence: Synthetic coding sequence"
  source 1..1071: mol_type = other DNA
atggaagagggcatgaatgtactgcacgattttggcattcagtctacccactacctgcaggttaactaccaagatagccaggattggttcattttggtgtccgttattgcggacctgcgcaatgctttttatgtccttttcccaatctggttccatctgcaggaggcggtggggatcaaacttctgtgggtggccgtgataggagactggctgaacctggtgtttaagtggatcctcttcggtcagaggccttattggtgggtgctggacaccgactattactctaatacctcagtgcctcttataaagcagtttccggttacttgtgagaccggaccaggttctccctcgggccatgcgatgggaacggccggtgtgtactatgtcatggtcacaagcactctgtcaatcttccaaggcaagatcaagcccacttacagattccgctgtctcaacgtcatcttgtggctgggattttgggctgttcagttaaacgtgtgcctgtctaggatctaccttgctgcacacttcccgcatcaagtggtggccggcgtactctctgggattgccgtggccgaaaccttttcacatatccactcaatctataacgctagcctgaagaaatactttcttattacctttttccttttttccttcgccatcggtttttacttgttactaaaaggcctgggtgtggacctcctgtggaccctggaaaaggcacagaggtggtgcgagcagccggaatgggtccatatcgataccactccgtttgcttcattgctgaagaatttgggtacactgtttggactcgggcttgcattgaacagctcaatgtatcgggagtcttgtaaagggaaactttccaaatggctgccatttaggctctcgtccattgtggctagcttggtgttgctgcacgttttcgattctctgaaaccgccgtcgcaggtagagttagtcttttacgtgttgtcattttgcaagagcgctgtggttccactcgcaagtgtgagtgtcatcccctactgcttggctcaggtgctgggccagccccataagaagagcttg

SEQ ID NO: 12952 - DNA, 1071 bp, synthetic construct
  misc_feature 1..1071: note = source = /note="Description of Artificial Sequence: Synthetic coding sequence"
  source 1..1071: mol_type = other DNA
atggaggaaggaatgaacgtcttgcacgacttcggaattcagagcactcactatctgcaagtgaattatcaggactctcaggattggttcatcctggtgtctgtgatagctgatttgcggaatgctttttacgtgttatttcccatctggttccacttgcaggaagcagtgggcattaagttactctgggtcgctgtgattggggattggctcaacctcgtttttaaatggatcttattcggacagcgcccctattggtgggtgctagataccgattattacagcaatacctcagtacctttgatcaaacagttcccagtgacgtgcgaaaccggtcccgggtcaccaagcggacatgccatgggcacagccggtgtgtactatgtgatggttactagcactttatctatcttccagggcaagatcaagccaacctataggtttagatgtcttaacgtcattctgtggctgggcttttgggcggttcagctgaacgtatgtctgtcaagaatttatctcgccgcccacttcccacatcaggtcgtcgctggcgtgctttccggtattgctgtagcagagaccttcagccacatacacagtatttacaacgcgtccttgaaaaagtatttcctgatcacgttttttctgtttagttttgccataggtttttaccttttgctgaaggggcttggggttgacctgctctggacactggaaaaagcccagaggtggtgtgagcagcctgaatgggtgcacatcgacaccacaccgttcgcgagcctcctcaagaacctaggaactttgttcggactgggcctggctctcaacagctcaatgtaccgagaatcatgcaagggcaagctgtctaagtggctcccgtttcgactgtcgtctattgtcgccagcctggtcttgctccacgttttcgattctttgaagcccccctcacaggtggagttggtgttttacgtactcagcttttgtaagagcgctgtggtccccctcgcttccgtgagtgtaataccctattgcctggcgcaggtcttgggacagcctcataagaaatctcta

SEQ ID NO: 12953 - DNA, 1071 bp, synthetic construct
  misc_feature 1..1071: note = source = /note="Description of Artificial Sequence: Synthetic coding sequence"
  source 1..1071: mol_type = other DNA
atggaagaaggcatgaatgtgctacacgacttcggaattcagtctacccactatttgcaggttaactatcaggactctcaggactggtttatccttgtgtctgttattgctgacctgcggaacgccttctatgtcttgttcccgatctggttccacttgcaggaagccgttgggatcaagctactgtgggtggcagtgattggcgactggctgaacttggtgttcaagtggatcttgtttggccagcgaccgtattggtgggtgctggacaccgactactatagtaataccagtgtcccacttatcaagcagttcccggttacctgtgagacagggcctggaagcccgagcggccatgccatgggaactgctggtgtttactacgtgatggtaacatccacactgtcgatcttccagggcaaaataaagccaacataccgcttcagatgcctgaacgtcattctgtggttgggcttctgggctgttcagcttaatgtttgcttgtctaggatctacctggcggcacacttccctcaccaggtggttgcaggcgttttgtcaggtatagccgtggctgaaactttctctcacattcatagtatttataacgcctctctcaagaagtatttcttgatcaccttcttcctgttcagtttcgctatcgggttctacctccttcttaaaggactcggtgtggacctgctttggacactggagaaggcccagaggtggtgtgagcagcctgagtgggtccacatcgacaccacgccattcgcctctctgttaaagaatctgggcaccttatttgggctcggactggccctgaactcctccatgtaccgcgagtcatgtaagggaaagctttccaaatggctgccttttcggctgagttccattgtggcaagtcttgttcttctgcacgtgtttgactccctgaaaccgcccagtcaggtggaactcgttttctacgtcctgtcattctgcaagtccgccgtcgttcctctcgctagcgtctcagtgatcccctactgcctggcccaagtcctcggccagccgcataagaagagtttg

SEQ ID NO: 12954 - DNA, 1071 bp, synthetic construct
  misc_feature 1..1071: note = source = /note="Description of Artificial Sequence: Synthetic coding sequence"
  source 1..1071: mol_type = other DNA
atggaagaagggatgaacgtccttcatgattttggaatccagtctacacactacctgcaggtaaattatcaagattctcaggattggtttatcctggtgtctgtgatagcagatctccggaacgctttttatgtcttgtttcccatatggttccacctccaggaggccgtggggatcaaacttctttgggtggcggtgataggggattggcttaacttggtgtttaaatggattctctttggacagcggccctattggtgggtactcgatacagattattactccaacacatcagtgccactcatcaaacagttccccgtaacttgcgaaactgggccaggatctccttccggacacgctatgggaacagccggggtgtattatgttatggttacatcaactctatccatcttccaggggaagataaaaccgacatataggtttaggtgtttaaacgtgatactctggctcgggttctgggccgtgcagctgaacgtatgcctctccagaatatacctcgctgcccactttccccaccaggtggttgccggagtgctgtctggaatcgcagttgctgagactttctcacatatccattctatctataatgcctcccttaaaaagtattttcttatcacgtttttcctgttcagttttgccataggattctatcttctcctcaaggggttaggggtagatctgctgtggacactcgaaaaagctcagcggtggtgcgagcagcctgaatgggtacacatcgatacgactcccttcgcctcacttctgaaaaacctggggacactctttggacttggactcgccctgaattcatccatgtaccgggaatcttgcaaaggaaaactctcgaaatggctaccattccggctgtcttctatagtcgcttcccttgtgctgctccacgtattcgatagtctgaaacccccttctcaggttgaactagtcttctatgttttgtccttctgcaaaagtgctgttgtccccttggcttctgtttctgtaataccatattgcctcgcccaggtccttggacagccccacaagaaatccctc

SEQ ID NO: 12955 - DNA, 1071 bp, synthetic construct
  misc_feature 1..1071: note = source = /note="Description of Artificial Sequence: Synthetic coding sequence"
  source 1..1071: mol_type = other DNA
atggaggaagggatgaacgtccttcatgatttcgggatccaatctacccactacctgcaggtaaactaccaagattctcaggactggtttattctggtatcggttatcgcagacctcaggaacgcattttacgtgctgtttcccatttggttccaccttcaggaggctgttggaatcaagctactctgggttgccgtgattggagactggctaaatctagtttttaagtggatcttatttggccagcgaccttactggtgggtactggacacggactattattctaatacgtccgtccccttaatcaagcaattccccgtgacatgcgagacaggccccgggagcccatcaggacacgccatgggtaccgcgggcgtatattatgtcatggtcaccagtacactgagtatattccagggcaagattaagccgacctaccgatttcgctgtttgaacgttatactgtggctcgggttctgggccgtccagctaaacgtgtgcctcagccgcatctatttggcagctcacttcccgcatcaggtagtcgctggggtcttatctggcatcgctgtggccgaaacgttctctcacatccactcaatatacaatgcttccttgaagaaatactttctgatcacattctttttattttcctttgccatcggcttctacttgcttctgaaaggtctgggggtcgacctgttgtggacgctcgagaaggcacagcgttggtgtgagcagccagaatgggtccacattgatactacacccttcgcctctctattgaagaatctcggaaccctgttcggcctcggacttgcactcaatagctcaatgtaccgagagagctgcaaggggaaactgagcaaatggctccccttccggctttcctccatagttgcctcactggtactgctgcatgtttttgactcactgaaacctccctcccaggtcgaattagttttctacgtgctctcattctgcaagtcggctgtggtgccgctggcgtcggtgtccgttattccatattgcctggcccaggtgctcggccagccccacaaaaaatcatta

SEQ ID NO: 12956 - DNA, 1071 bp, synthetic construct
  misc_feature 1..1071: note = source = /note="Description of Artificial Sequence: Synthetic coding sequence"
  source 1..1071: mol_type = other DNA
atggaagagggtatgaacgttctgcacgatttcggtattcagtcgacgcactatctccaagtcaattatcaggatagccaggactggttcatcttggtctcggttattgcggatttgaggaatgccttctacgtgctattcccaatctggttccatctgcaggaagcggtcggaataaagttgctctgggtggccgtgattggcgattggttgaatctcgtgttcaagtggatactgttcggacagagaccttattggtgggttttagacacagactattactctaacacgagtgttccgctgataaagcaattcccagtgacttgcgaaaccggcccgggcagtccctctggccacgccatgggcacggcaggagtgtactacgtgatggtgaccagtacgctgtccattttccagggaaaaataaagcccacctatcggttccgctgcctaaatgtgatcctgtggctcggcttttgggccgttcagttaaacgtctgcctgagcaggatctacttggctgctcacttcccccatcaggtggtggctggcgtcttgagcggtatcgcagtggccgagacattttcccacatccattcgatttacaatgcgtcactgaagaagtattttttgattacgttctttctcttttcgtttgccataggtttttacttgcttctcaagggactgggcgtggatctactgtggacgttagaaaaggcgcagcgatggtgtgagcagcccgagtgggttcatattgacacaaccccgtttgcgagtttgctgaagaatctggggacactcttcggacttggccttgccttgaacagtagcatgtaccgggaatcgtgtaagggcaagttgtccaaatggttgccgtttagactgagctcaattgtcgcctccctcgttctgctacacgtgttcgacagtctcaagcctccgtcccaagtcgaactggtcttctacgtgctaagcttttgtaaatccgcggtggtcccgttggcctcagtgtcggtcatcccgtactgcttggcccaagtgctaggccaaccccataagaaatccctc

SEQ ID NO: 12957 - DNA, 1071 bp, synthetic construct
  misc_feature 1..1071: note = source = /note="Description of Artificial Sequence: Synthetic coding sequence"
  source 1..1071: mol_type = other DNA
atggaggagggtatgaacgtgctccatgatttcggaattcaatccactcactatctgcaggtgaactaccaggattcccaggactggttcatcttggtgagcgtgatcgcggacctgaggaacgcattttatgttcttttccctatctggttccatttgcaagaggccgtcggtattaagttgctctgggtcgcggtcatcggagactggctgaacttggtctttaagtggatcctcttcggacagcggccatactggtgggtgctggacactgattactactcgaatacttccgtgccgcttatcaagcagttcccagtcacctgcgaaactggacccggctcgccatcgggacacgcgatgggaaccgccggagtctactacgtgatggtgacctcgaccctgtcaatctttcaaggtaaaatcaagccgacgtaccgctttagatgccttaatgtcatcctctggctgggcttttgggctgtgcagttgaacgtgtgtctgtcacgcatctacctggccgcccatttcccacaccaagtcgtggccggggtgctgagcggcattgcggtcgctgaaaccttcagccacatccactcaatctacaacgcaagcctgaaaaagtacttcctcatcacgttctttctgttttccttcgctattggattctacctgctccttaagggcctgggcgtggatctcctgtggaccctggagaaggcacagagatggtgcgaacaacccgagtgggttcatatcgacaccactccgttcgcctccctcctgaagaatctggggactctcttcggcctcggactcgcgctgaatagctcgatgtaccgggaaagctgcaagggaaagctctcgaaatggctgccgttccgcctgtcctcgatcgtggccagtctggtgctgctccacgtgttcgactcactgaagcctccgtctcaggtggaactggtgttctacgtgctgtcattctgcaaatccgccgtggttccgttggcatcggtgtccgtcatcccttactgtcttgctcaggtgctcgggcaaccgcacaaaaagagcctg

SEQ ID NO: 12958 - DNA, 1071 bp, synthetic construct
  misc_feature 1..1071: note = source = /note="Description of Artificial Sequence: Synthetic coding sequence"
  source 1..1071: mol_type = other DNA
atggaggagggcatgaacgtcctccatgattttggcattcaatccactcactatttgcaggtgaactaccaagatagtcaagactggtttatcctggtttctgtcattgccgatctgcgcaacgccttctatgtgctgttcccgatttggttccacctgcaggaagcggtcggcatcaagctgctgtgggttgctgtgattggcgactggctgaacctcgtgtttaaatggattctctttgggcagcgaccgtactggtgggtcctggacaccgattactacagcaacaccagcgttcctctgatcaagcagtttccagtgacgtgcgaaaccggccctggaagtccaagcggtcatgcaatgggcaccgctggcgtatattatgttatggttaccagcactctgtccattttccagggcaagattaaaccgacctatcgttttcggtgtcttaatgtgatcctgtggctgggcttctgggctgtgcaactgaacgtgtgtctgagccggatttatctagcagcccattttccgcatcaggtagtggcaggtgttctcagcggtatagcagttgcagaaacctttagccacattcactcaatctataatgcgagcctgaaaaagtacttcctgataaccttcttcttatttagctttgcaatcggtttttatctgttgttgaagggactgggtgtcgacctgctgtggaccctagagaaggcccaacgttggtgtgagcaaccagagtgggtccacatcgatactactccatttgcaagcctgctgaagaatctggggactctgttcggactaggcctggctctgaacagcagcatgtaccgggagagctgcaagggcaaactctcaaagtggctgccttttagattgtccagcatcgtggcctctctggtactgctccacgtgtttgacagcttgaagccgccgagccaggttgaacttgtgttctatgtgctgagcttttgcaaaagcgcggttgtccctctggctagcgtttccgttatcccgtactgtctcgcccaggttctgggtcagccacacaaaaaaagcctg

SEQ ID NO: 12959 - DNA, 1071 bp, synthetic construct
  misc_feature 1..1071: note = source = /note="Description of Artificial Sequence: Synthetic coding sequence"
  source 1..1071: mol_type = other DNA
atggaagaagggatgaacgtgcttcacgactttgggatccagtccacccattacctccaggtgaactaccaggactcgcaggactggttcattctggtctctgtaatcgcggatctgaggaacgcgttctatgtgctgtttccgatctggttccatctgcaagaggccgtcgggatcaaactgctttgggtggctgtgatcggtgattggctgaatctcgtgttcaaatggatactgtttgggcaacggccatactggtgggttttggacactgattactattccaatactagtgttcctctaatcaaacagttcccagtaacttgcgagaccgggccagggtccccaagcggccacgccatggggactgcaggcgtctactatgtgatggttactagcactttgtctattttccagggcaaaatcaaaccgacatatagatttaggtgcctgaatgtgatactgtggctggggttctgggcagtgcagctgaacgtgtgcctatcccggatttacctggccgctcatttcccacaccaggttgtcgcaggcgtcctgtccggtatcgcggtggccgagactttctctcacatccactcgatctataacgcatccctcaagaagtattttctgatcacgtttttcttgttctcattcgccatcgggttttatctgctgctgaaaggcttaggggtggacctcctctggactttggagaaggctcagcgatggtgtgaacagcccgaatgggtgcacatcgacaccaccccctttgcaagcctgctgaagaacctgggtaccctattcggactgggcttagccttgaatagtagcatgtatagagaatcgtgcaagggcaaattgtctaagtggctgccattccgcttgagctctattgtggcatcactagtactgttgcacgtctttgatagcctcaagcccccaagtcaggtcgagcttgtattctatgtcctgtctttctgcaaatccgcagtcgtccccctcgctagtgtgtccgtcatcccttattgcctggcccaggtcctcggtcaaccccataagaagtctttg

SEQ ID NO: 12960 - DNA, 1071 bp, synthetic construct
  misc_feature 1..1071: note = source = /note="Description of Artificial Sequence: Synthetic coding sequence"
  source 1..1071: mol_type = other DNA
atggaggaggggatgaatgtgctgcacgattttggaattcaatctacgcactacttgcaggtgaactaccaggactctcaggactggttcatcctggtctccgtgatcgcggatctgcgcaacgccttttacgtcctcttcccgatctggtttcacctccaagaagccgtgggcataaagctgctgtgggtcgccgttatcggggattggctgaatctcgtgtttaagtggattttgttcggccagcgcccttattggtgggttctggataccgattactattctaacacaagtgtccccctgatcaaacagttccctgtcacatgcgagacaggcccgggctcccccagtggacacgccatgggtaccgccggagtttactatgtgatggtgacctccaccctctctatctttcaaggaaagataaaacccacctacaggttccgctgtctgaatgtgatactttggctgggtttctgggctgttcagctcaatgtgtgcctgtcacggatttatttagccgcgcacttcccgcatcaggttgtggccggagtgttgtccggcatcgctgtggcagagactttttcacacattcactctatttacaacgcctccctgaaaaaatatttcctcatcaccttctttctctttagtttcgcaattgggttttacctgctgctgaaggggctgggcgtggacctcctgtggacactcgaaaaagcacagaggtggtgtgaacagcctgaatgggtacatattgacaccacacctttcgccagtttattgaaaaatctgggcacactgttcgggttgggcctggctttgaacagtagcatgtacagagagagctgtaaggggaagttgagtaaatggctccccttccgcctgagtagcatagtagcatctcttgtgctgctgcatgtgtttgatagcctcaagccgcccagccaggttgaacttgtattctacgtgctctctttttgcaagagtgcggtggtgccactggcatctgtctccgtgatcccctactgcctggctcaggtactcggacagcctcacaaaaagtcactt

SEQ ID NO: 12961 - DNA, 1071 bp, synthetic construct
  misc_feature 1..1071: note = source = /note="Description of Artificial Sequence: Synthetic coding sequence"
  source 1..1071: mol_type = other DNA
atggaagaggggatgaatgtgttacatgattttggcatacagtcaacccattacctccaagttaattatcaggatagtcaggattggtttatcctagtaagtgttatcgccgatttgcgaaacgctttctatgtgctgtttccgatctggtttcacctgcaggaagctgttgggatcaagctcctgtgggtggcagtaattggcgactggctaaatttggtattcaagtggatactcttcggccagaggccttattggtgggttcttgacacagactattactccaacacgagcgttccgctgattaagcagttccctgtgacgtgcgagaccggccctgggtcccccagcgggcacgccatgggaacagccggagtatactacgtaatggtcacaagtaccctgtctatcttccagggcaaaatcaagcctacatacaggtttcggtgcctgaacgttatcctgtggctggggttctgggccgtacagctcaacgtgtgtctgtcccgcatctatctggcggcacacttcccacatcaggtcgtcgcgggcgttttaagtggtatcgcagtggctgagaccttctcccacatccactctatttacaacgcttctctcaaaaagtactttctgatcaccttctttctattcagcttcgcgatcggcttttacctcctcctgaaaggcctgggcgtggacctgctctggactctcgagaaggcgcaacgttggtgcgagcagcccgagtgggtccatattgataccaccccatttgcttccctgcttaaaaacctgggaactctcttcggactgggtctggcactcaattcctctatgtaccgagaatcttgcaaaggaaaactctcaaaatggctcccgtttagactgtcctccatcgttgccagtctggttctcttacatgtctttgatagcctgaaacctccctcgcaggtcgaactggttttctatgttttgagcttttgcaaatcggccgtggtgcccctggcatctgtcagcgttatcccctattgtctcgcccaggtcttgggacaacctcacaaaaagagtctg

SEQ ID NO: 12962 - DNA, 1071 bp, synthetic construct
  misc_feature 1..1071: note = source = /note="Description of Artificial Sequence: Synthetic coding sequence"
  source 1..1071: mol_type = other DNA
atggaagaaggtatgaatgttctacatgattttggtatacaatcgacgcattatttacaagtaaattatcaagattcgcaagattggtttatattagtatcggtaatagcggatttacgaaatgcgttttatgttttatttccgatatggtttcatttacaagaagcggttggtataaaactactatgggtagcggttataggtgattggttaaatctagtatttaaatggatattatttggtcaacgtccgtattggtgggttctagatacggattattattcgaatacgtcggtaccgttaataaaacaatttccggttacgtgtgaaacgggtccgggttcgccgtcgggtcatgcgatgggtacggcgggtgtttattatgttatggttacgtcgacgttatcgatatttcaaggtaaaataaaaccgacgtatcgatttcgatgtctaaatgttatactatggctaggtttttgggcggtacaattaaatgtatgtttatcgcgtatatatttagcggcgcattttccgcatcaagttgtagcgggtgttttatcgggtatagcggtagcggaaacgttttcgcatatacattcgatatataatgcgtcgttaaaaaaatattttttaataacgttttttctattttcgtttgcgataggtttttatctactactaaaaggtctaggtgtagatttattatggacgttagaaaaagcgcaacgatggtgtgaacaaccggaatgggtacatatagatacgacgccgtttgcgtcgttactaaaaaatttaggtacgctatttggtttaggtttagcgttaaattcgtcgatgtatcgtgaatcgtgtaaaggtaaattatcgaaatggttaccgtttcgtctatcgtcgatagttgcgtcgttagtattattacatgtatttgattcgctaaaaccgccgtcgcaagttgaattagttttttatgtactatcgttttgtaaatcggcggtagttccgctagcgtcggtttcggtaataccgtattgtttagcgcaagtactaggtcaaccgcataaaaaatcgtta

SEQ ID NO: 12963 - DNA, 1071 bp, synthetic construct
  misc_feature 1..1071: note = source = /note="Description of Artificial Sequence: Synthetic coding sequence"
  source 1..1071: mol_type = other DNA
atggaggaaggaatgaacgtccttcacgattttgggatacagtctacccactaccttcaggtgaactatcaggattcacaggattggtttatattagtttcagtaatagccgatctccggaatgctttttacgtgctcttccccatctggtttcacctgcaggaggcagtcggcataaagctcctgtgggtcgcagtgatcggagactggctgaatctggtcttcaagtggattttgttcgggcagcggccctattggtgggtattggatactgactactatagcaacaccagcgtgcccctgataaagcaattccctgtgacgtgcgagaccggacccgggagcccgtctggccatgccatgggtactgccggggtctactatgtgatggtaacatcaaccttgtcaatcttccaagggaagatcaagcctacttatcggttcaggtgtctgaacgtgattctctggctcggtttctgggccgtccagctgaatgtttgcctgtctcgtatttacctcgctgctcacttcccacatcaggtagtggccggggtgctgagtggaattgcagtagcggagactttctcccatatccacagcatctacaatgcaagcctcaaaaagtacttcctaatcaccttctttcttttcagcttcgccatcggattctatctgctgttgaagggtcttggcgtcgatctgttatggaccttggagaaagcccagagatggtgtgagcaacctgagtgggtacacatcgatactactccttttgcatcactactgaaaaatctgggcaccctattcggactggggctggccctcaatagcagcatgtaccgcgaaagttgcaaagggaaattgtctaaatggctaccattccgtctgagttccattgtggccagtctggtgttactgcacgtgtttgacagtcttaaaccccctagtcaggtggagcttgtattttatgtgttgtccttctgcaagtcggcagtggtgccactagcctccgtgtctgtgattccctactgcctcgcccaggtgctagggcagccacacaagaagtctttg

SEQ ID NO: 12964 - DNA, 1071 bp, synthetic construct
  misc_feature 1..1071: note = source = /note="Description of Artificial Sequence: Synthetic coding sequence"
  source 1..1071: mol_type = other DNA
atggaggaggggatgaatgtgctgcacgattttgggatccaatcaacgcactatctgcaagttaactaccaagacagccaggattggttcatcctggtgtcagtcattgccgatctgagaaatgccttctacgtgctgtttcccatctggttccatttgcaggaggctgtcggaatcaagctcctctgggtggctgtcattggcgattggctcaacctcgtgttcaagtggattctgtttggccaacgcccatactggtgggttctggacactgactattattctaatacctctgtcccactcatcaaacaattccctgtcacttgcgagactgggccaggctcacctagcggtcacgcaatgggcactgccggggtgtactacgtaatggttactagtacgttgagcatcttccagggcaaaataaagcccacatatcggttcaggtgcctgaacgttattctctggctgggattttgggctgtgcagctgaacgtgtgcttatcgagaatctaccttgccgctcattttccccatcaggtggtggccggagtactttctggaattgctgtagccgaaactttcagtcatatacacagtatttacaacgcctccttaaagaaatacttccttatcaccttctttctcttcagtttcgccattggtttttacctgctgctgaaaggcttaggcgtcgatctactgtggacattggagaaggcccaaagatggtgcgaacagccggaatgggtacatatagatacaactcctttcgccagtctccttaaaaatctggggacactgttcggtctggggctggccctgaactccagcatgtaccgcgagagctgtaaaggaaaactgtccaagtggctgcccttccgcctgagtagcattgtcgcatccctcgtgctcttacacgtctttgattcgctgaagcccccgtcccaggttgagctagtgttttatgtgctgtccttctgcaagagcgccgtggttcctctggctagcgtctccgtgattccatactgccttgcacaagtactggggcaaccccacaagaaaagtctg

SEQ ID NO: 12965 - DNA, 1071 bp, synthetic construct
  misc_feature 1..1071: note = source = /note="Description of Artificial Sequence: Synthetic coding sequence"
  source 1..1071: mol_type = other DNA
atggaagagggtatgaacgtcttgcacgacttcggcatccagtctacacactatctgcaggttaattaccaggacagccaggactggttcatcttggtgtctgtgattgccgacctacggaatgccttctatgtgcttttccctatttggtttcacctgcaggaggccgttggaattaaattgctctgggtcgctgtgattggcgattggcttaacttagtgttcaaatggatcctgtttgggcaaaggccctattggtgggtgctggatacggattattactccaacacttccgttcccctgattaagcaattccctgtgacatgtgaaacaggtccaggatcacctagcggccacgctatggggaccgccggagtttactatgtgatggtaacctctactctctcgatatttcagggcaagattaagccgacttacagattccgctgtctgaacgttatcctgtggctggggttctgggctgtgcagctgaacgtgtgcctctcccgaatttaccttgccgcgcatttcccacaccaggtcgtcgcaggtgttctgagcgggatcgccgtcgcagagactttctctcacatccattctatctataacgcctctctgaaaaaatactttctgatcacctttttcctattctccttcgcaataggcttttacctattgctgaagggtctcggggtcgatctgttgtggactctggagaaggcgcagagatggtgtgagcagcccgaatgggtgcacattgacaccactccatttgcttccctgctgaaaaatcttgggactttattcggcctgggtttagctcttaacagctccatgtatcgcgagagctgcaagggaaagcttagcaagtggttgccattcaggctgtcctctatagttgctagtctggtgctgctccacgtcttcgatagcttaaagcccccctctcaggtcgaactggtgttttatgttctgtccttctgcaaatccgcagtggttcctttagcctccgtgagtgtcataccgtactgccttgctcaagtcctgggccagccccacaagaagtccctg

SEQ ID NO: 12966 - DNA, 1071 bp, synthetic construct
  misc_feature 1..1071: note = source = /note="Description of Artificial Sequence: Synthetic coding sequence"
  source 1..1071: mol_type = other DNA
atggaggaagggatgaacgttctgcatgactttggcattcaatctacccactatctgcaggttaactatcaggactcccaggactggttcatcttggtcagcgtgatagctgatctcagaaacgccttttatgtgctgttccctatctggtttcacttgcaggaggccgtaggcatcaaactgctttgggtcgcagttatcggggactggctcaatctcgtgttcaagtggattctgttcggccagagaccgtattggtgggtgctggacacagattattattctaatacatccgttcccctcataaagcagttcccagtcacatgcgagactggcccaggaagcccctccgggcatgcaatgggcaccgccggagtgtactacgtcatggtgaccagtaccctcagtattttccaaggaaagatcaagcctacctatcgcttcaggtgcctcaatgtaattttgtggctcggattttgggcagtccaactgaacgtttgtctctctaggatctacttggctgcacactttcctcaccaggttgtagctggtgtcttgtctggaatcgctgtggcggagacattcagccacatccattccatctataatgcttctttgaaaaagtactttctcattaccttcttcctgttctcattcgccattggtttctacctgctgctgaagggactgggggtcgacctgctgtggacactggaaaaagcccagaggtggtgcgagcagccggagtgggtgcacatcgacaccaccccattcgcctcattgctcaaaaacctcggaactcttttcggtttgggactggctttgaactctagcatgtaccgggagtcttgtaagggcaagctgtcaaagtggctcccctttcggttgtcaagcattgtcgcgtcacttgtgttgctccacgttttcgattctctcaagccgccaagccaggtggagctggtcttttacgtgctgtccttttgtaaatctgccgtcgtcccactcgcaagcgtttccgtcatcccatattgtttggcccaagtcctgggccaacctcataagaaaagtctg

SEQ ID NO: 12967 - DNA, 1071 bp, synthetic construct
  misc_feature 1..1071: note = source = /note="Description of Artificial Sequence: Synthetic coding sequence"
  source 1..1071: mol_type = other DNA
atggaagaggggatgaatgtgttgcatgactttgggattcagtcgacccattatctccaggtgaactatcaggactcgcaggactggttcattctagtatccgtcattgccgatctgcggaatgcattttacgtactcttccccatctggttccacctgcaagaggcggttggtataaaactgctgtgggtggcggtgatcggggactggttgaatcttgtcttcaaatggatcctattcgggcagcgcccttattggtgggtgctggataccgactattactctaacacctctgtgcctcttattaagcagtttcctgtgacatgtgaaaccggtcctggcagtccttccggccacgccatgggaactgcaggcgtttattacgtcatggtgacaagcacactgagcatttttcagggaaaaatcaagccaacatatcgcttccgttgcttgaacgttatcctatggctcggcttctgggccgtccagctgaatgtgtgcttgtcacgaatctatctcgcagcgcatttcccacaccaagtggtcgctggtgtcttaagcggcatagccgtggctgagactttttcacacatccattccatctataacgcatctttaaaaaaatatttcctcatcacattctttttattttcctttgctattgggttctatctgctgctcaaggggctgggagttgacctgctttggacgctggagaaggcacagaggtggtgtgaacagccagagtgggtgcacattgataccacacctttcgcgtccttgttaaagaacctcggtactctgtttggcctgggactggcccttaattcaagtatgtatcgcgaatcctgcaagggcaagctatctaaatggcttcctttccggctgtccagcattgttgccagtctagttttactgcatgtctttgacagcctgaaaccccccagtcaagtggaattggtcttctatgttctctcattctgtaaatccgcggtggttccattggctagcgtgagtgtgattccctattgtcttgcccaggtgctgggccagcctcacaaaaaatctctt

SEQ ID NO: 12968 - DNA, 1071 bp, synthetic construct
  misc_feature 1..1071: note = source = /note="Description of Artificial Sequence: Synthetic coding sequence"
  source 1..1071: mol_type = other DNA
atggaagagggaatgaacgttcttcacgacttcggtatccagagcacgcactaccttcaagtgaactaccaagactcacaggattggttcatcctggtgtctgtgattgctgacctgagaaacgcgttttatgttttgttcccaatctggtttcatcttcaggaggccgtgggaattaagctactgtgggtagctgtgatcggcgactggctcaacctggttttcaaatggatactcttcggacagcggccatattggtgggtattggacaccgactactacagcaatactagcgtgccactaattaagcagttcccggtgacatgcgagaccggaccaggctcgccctccggtcatgcaatggggacagcgggtgtttattatgtcatggtgacatctaccttgagcatttttcagggcaagattaagcctacttatcgctttcgatgcctcaatgtgatattgtggcttgggttttgggccgtccaattgaatgtgtgcctttctaggatttaccttgcggcccatttccctcaccaggtggttgcaggcgtgctctccgggattgcagtcgctgagactttcagtcatatacatagcatctacaacgctagcctcaagaaatatttcctgatcaccttttttctctttagttttgccattgggttctacctattactgaaaggcttgggcgttgaccttctctggacactcgagaaagctcagagatggtgcgagcaacccgagtgggtgcacatcgatactaccccattcgcctcccttctgaagaatctcggcacactgtttggcctggggcttgcactcaattcgtctatgtatcgggagtcgtgcaagggcaagttaagcaaatggttgccattccggctgagctcaattgtggcttccctcgttttgctccatgtttttgactccctgaagcctccctcccaggtggaattggttttctacgtgctgagcttctgtaaatccgcggtcgtgcctctggcatccgtgagtgttatcccctattgtcttgcccaggtcctaggtcagccccataaaaagagcctg

SEQ ID NO: 12969 - DNA, 1071 bp, synthetic construct
  misc_feature 1..1071: note = source = /note="Description of Artificial Sequence: Synthetic coding sequence"
  source 1..1071: mol_type = other DNA
atggaagaggggatgaatgtattgcacgactttggaatccagagcacacactacctgcaggttaactatcaggacagccaggattggtttattcttgtgtcggtgatcgctgacctgagaaatgctttctatgtcttgtttcctatctggttccatctgcaagaggcggtgggcattaagctactttgggttgctgttatcggggattggctgaacctggttttcaaatggattctgtttggccaaaggccctactggtgggttttggacacagattactattctaacacgagcgtgccactgatcaagcaatttccagtaacatgcgaaaccggtcccgggtctccttctggccatgccatgggcactgcgggagtgtattatgtgatggtgaccagcaccctttcaatatttcagggaaagatcaaacctacctatcgatttcgctgcctgaacgtgatcttgtggctcggattctgggctgtccagctgaacgtgtgccttagtaggatatacctggctgctcacttcccccaccaggtagtcgccggggttttgagtggcattgcagtcgccgagactttttcccacatccactcaatttataatgcttctctgaagaagtactttcttatcacttttttcctattctcattcgccatcgggttctacctgttgctgaagggtctcggggttgatctgctttggacccttgagaaagcccaaaggtggtgtgaacagccggaatgggtgcatatcgatacaaccccgttcgcctcccttctgaagaacttgggcactcttttcggtctgggtcttgctctcaactcttcgatgtatcgagagagctgcaagggtaagttgtctaagtggctgcccttcaggctatctagtattgtggcatcattagtgctgttgcatgtcttcgatagcttgaaacctccaagccaggtggagctagtattttacgtactatcattttgcaagagcgccgtcgtacctttggctagcgtgtccgtcatcccctactgcctggcacaggttttagggcaaccccataagaagtcactg

SEQ ID NO: 12970 - DNA, 1071 bp, synthetic construct
  misc_feature 1..1071: note = source = /note="Description of Artificial Sequence: Synthetic coding sequence"
  source 1..1071: mol_type = other DNA
atggaggaaggtatgaacgtcttgcacgactttggcatacagagcacacactacctgcaggtgaactaccaggatagtcaagactggtttatcttagtgagcgtgattgctgatctgcgcaacgctttctacgtcctctttcccatatggttccatctgcaggaggctgtcggcatcaagctactgtgggttgccgtcatcggcgactggctgaatctggttttcaaatggattctgtttggtcagagaccctactggtgggtcctggacacagattattactccaacacatctgtgcccctgatcaagcagtttccagtgacctgcgagactggaccgggcagtcccagcggccacgctatgggcactgctggagtatattacgtcatggtgactagcaccctgagcatcttccaaggcaagatcaagccgacatataggtttagatgtctgaatgttatactgtggcttggcttttgggccgtacaattaaacgtttgtctcagtaggatctaccttgccgcacacttcccacatcaagtggtggctggcgtgctttcaggaatcgcagtggctgagacattcagtcacatccatagcatctacaacgcaagcctcaaaaagtattttctgatcacctttttcttgttcagcttcgccatcggtttttatttgctcctgaagggactgggagtcgacttgctgtggacactcgagaaggcacaaaggtggtgtgagcagccagaatgggtgcacattgacaccactcctttcgccagcctgctgaaaaacctggggaccctttttggcttgggactcgcgttgaacagctcaatgtatcgggaatcttgcaaaggaaaactttcgaagtggttgccttttcggctgtcaagcattgttgccagcctcgttctgctacatgtctttgatagcttaaagcctcctagtcaagtagaactggtgttctacgttttaagtttttgcaagtctgcggttgtcccactggcctcagtgtctgtaatcccatactgcctcgcccaagtgttgggccagcctcacaaaaaatctctg

SEQ ID NO: 12971 - DNA, 1071 bp, synthetic construct
  misc_feature 1..1071: note = source = /note="Description of Artificial Sequence: Synthetic coding sequence"
  source 1..1071: mol_type = other DNA
atggaggaaggcatgaatgtccttcacgatttcggtatccaatctacccattacttgcaggtgaactatcaggattctcaggactggttcatactcgtaagcgtgatcgctgatctccggaacgctttttatgtgctttttcccatttggtttcaccttcaggaggcggtgggcatcaaacttctatgggttgccgtgattggcgactggttaaatctggtcttcaaatggattttatttggccagcgaccctattggtgggtgcttgacacagattactactccaacacttctgtgcccctcatcaaacagttccccgtgacttgtgagaccgggccaggatccccaagcggtcacgccatgggaacagcaggagtttactatgtgatggtaacttctacgctgtctatattccaagggaaaattaagccaacatacaggtttcggtgcttgaacgttattctctggctgggcttttgggcagtccagctgaacgtgtgtttgtcaaggatctacctggcagctcactttcctcaccaagtcgttgcaggcgttttgagtgggattgccgttgccgagaccttttctcatattcactccatatacaacgcgtcccttaaaaaatatttcttgatcaccttttttctatttagctttgctatcggtttttacctcctcctgaaaggtctgggagtcgatctgctgtggactttagagaaagctcagcgctggtgcgagcagccggaatgggtgcacatagacacgacacctttcgcgtcactgctgaaaaatcttggtacattattcggtcttggcctggctctcaactcatctatgtatcgggagagctgtaaaggtaagctgtccaaatggcttccttttcgactgtcatcaattgtcgctagtctcgtgctgctgcatgtcttcgactcgcttaaaccccccagtcaggttgaactggtgttttatgtgttatcgttctgtaaaagcgcagttgtacctctggcatcagtttccgtcattccctattgtttggcccaggtgctgggccaaccacacaaaaaatccctc

SEQ ID NO: 12972 - DNA, 1071 bp, synthetic construct
  misc_feature 1..1071: note = source = /note="Description of Artificial Sequence: Synthetic coding sequence"
  source 1..1071: mol_type = other DNA
atggaagagggcatgaacgtcttgcatgacttcggtattcagagtacccattatcttcaggtgaactaccaagattctcaggactggtttatcttagtgtctgttatcgccgatctgcgtaacgcattctacgtgctcttcccaatctggttccaccttcaggaggcggtggggatcaagttattgtgggttgcggtgatcggagattggcttaatctggtcttcaaatggattctgtttggacagcggccttactggtgggttctcgacacagactactatagcaacacatccgtaccgctgataaaacagttcccagtgacatgtgaaacagggccagggagcccctcaggccatgctatggggaccgctggcgtgtattatgtaatggtcacttctaccctgtcaatatttcaggggaaaattaaaccgacttatcggtttaggtgcctgaatgtgatcctgtggctcgggttttgggccgtgcaacttaatgtgtgtctgtcgcgcatttacctggcagcccacttcccccaccaggttgtcgccggcgtgttatccggtatcgccgtggcggaaacattcagccatatccattccatatataatgcatctttgaagaagtacttcctgattaccttttttctcttcagctttgctataggtttttatctgttgctgaaagggcttggagtggacctcctgtggaccctggagaaagcccagcgctggtgtgagcagccagagtgggttcacattgacactactccctttgcttcattgttgaagaacctcggtacgttgttcgggttgggcctggctttgaatagtagtatgtaccgggagtcatgtaagggaaagctctctaagtggctgccctttcggctgtccagtattgtagccagccttgtgctattgcatgtctttgactctcttaagcccccttcgcaggtggagttggtattttacgtgctatctttttgtaagagtgcagttgtgcctctcgcaagcgtctcggtgatcccctattgcctggctcaggtgctgggacagccacacaagaagtctctc

SEQ ID NO: 12973 - DNA, 1071 bp, synthetic construct
  misc_feature 1..1071: note = source = /note="Description of Artificial Sequence: Synthetic coding sequence"
  source 1..1071: mol_type = other DNA
atggaggagggtatgaatgttctgcatgacttcggcattcaatcaacccactatttgcaggtgaactaccaggacagccaggattggttcatcctagtgagcgtcatcgctgacctgaggaacgccttttatgtattgtttccaatctggtttcacctccaggaggctgtgggtatcaaactgctgtgggtagcagtcattggtgactggcttaaccttgtatttaaatggattcttttcggccaacggccctattggtgggtactcgacacagactattattctaatacaagtgtgcccttgatcaagcagttccctgtcacatgtgagacggggccgggctcaccttctgggcatgccatgggaactgccggtgtgtactacgtcatggtgaccagtaccttgtctatctttcagggaaagattaaacccacatacaggttcagatgtctgaacgttattctctggctgggattttgggctgtgcagctgaatgtctgcctcagccggatatatcttgccgctcatttcccccatcaggttgtggcaggagtgctctcagggattgccgtcgctgagactttttcgcatattcactctatttacaacgcatcactcaaaaagtatttcctgattaccttttttctgtttagtttcgccatcggtttctatctcctgttaaaaggacttggcgttgacttactgtggactttggaaaaggctcagcgatggtgcgaacagccagagtgggttcatatcgacaccactccattcgcttccctcttgaaaaatttaggcaccctgtttggactggggctagctctgaacagttcaatgtaccgggaaagctgtaaaggcaaactgtctaagtggttaccgtttagactgtcatcaatcgtggcttcactggtactgctgcacgtcttcgatagcctgaagccccctagccaggtggagctcgtgttttacgttctgtcattttgtaagtccgcagtcgttccccttgcttccgtgtccgtgataccatattgcctggcgcaggtgctcggccagcctcacaagaaaagtttg

SEQ ID NO: 12974 - DNA, 1071 bp, synthetic construct
  misc_feature 1..1071: note = source = /note="Description of Artificial Sequence: Synthetic coding sequence"
  source 1..1071: mol_type = other DNA
atggaagagggaatgaatgtgcttcacgattttgggattcagagcacgcactatctacaagtcaactaccaggattctcaggattggttcatcctagtaagcgtcatcgctgaccttcgaaatgccttttacgttctatttccaatctggttccatttgcaggaggcggtaggtattaaactcctttgggtcgcggtgataggagattggcttaacctcgtgtttaaatggattttgttcggacaacggccttactggtgggtccttgatacagactactattcgaatacctctgtcccactaatcaagcaatttccagtcacttgcgagacgggtcctggttctccctccgggcatgcaatgggcactgctggagtgtattacgtgatggttaccagtactctctctatctttcaagggaagattaagcctacctatcgattcagatgtctgaacgtcatactctggctggggttttgggctgtgcaattgaacgtctgtctctctcgcatttaccttgcagctcactttccacatcaagtcgttgcaggggtgttgtcagggatcgctgttgcagagactttctcacatattcattcaatttacaacgcgtcactgaagaagtatttcttgatcacattttttttgttctcgttcgctatcgggttttacctgctgctcaaaggtctgggagtagatcttctttggaccctcgagaaggctcaacgatggtgcgaacaaccagaatgggtccatattgacacaacgcccttcgcgtcattattaaagaacctcggaacgctgttcggcctgggtcttgccctcaattccagtatgtacagggaatcctgtaaggggaagttatctaaatggctaccatttaggctctcttctatagtcgcatctctcgtgttgcttcatgtgtttgactctttgaaacctccttctcaggtggaacttgtcttctatgttctttcgttctgtaagtccgccgtcgtccccttggcctcagtatctgtgattccgtattgtttagcgcaagtgctgggccagccccataaaaagtcgttg

SEQ ID NO: 12975 - DNA, 1071 bp, synthetic construct; identical to SEQ ID NO: 12965
  misc_feature 1..1071: note = source = /note="Description of Artificial Sequence: Synthetic coding sequence"
  source 1..1071: mol_type = other DNA

SEQ ID NO: 12976 - DNA, 1071 bp, synthetic construct
  misc_feature 1..1071: note = source = /note="Description of Artificial Sequence: Synthetic coding sequence"
  source 1..1071: mol_type = other DNA
atggaagaagggatgaacgtgttgcatgattttggtatacagtccacccactaccttcaggtaaattaccaggattcccaagactggtttatactcgtgtcagtgatcgcagacttaaggaatgctttctacgtgctgttcccgatttggtttcacttgcaagaggcagtggggatcaagttgctttgggtcgcagtgatcggggattggctgaacctagtgtttaaatggatcctgtttggccagagaccatactggtgggtgttggacactgattattactctaacacaagcgtgcccctcatcaagcagtttccagtcacttgtgaaactgggccaggatcaccctccggacatgctatgggcactgccggcgtgtactatgtcatggttacctctaccctaagcatcttccagggaaaaatcaagcccacgtaccggttcagatgcctcaatgtgattctttggctaggattctgggccgtgcagctgaacgtatgtctgagtagaatttacttggccgcccattttccgcaccaagtcgtggctggcgtgctgtcgggtatcgcagttgcggagacattctcacacatccactcaatctataatgcatctctcaaaaagtattttcttattacattctttctgttctcctttgccataggattctacttgctgctcaaaggcctcggagtcgacctgctctggacccttgagaaagctcagaggtggtgcgaacagcccgagtgggtgcacattgataccacgccgttcgcttcactgcttaagaatctcggtacactcttcgggttagggttagccttgaacagttctatgtatagggagagctgcaaaggcaagttaagtaaatggctcccttttaggctctcgagcattgtagccagcctggtgttgctacatgtcttcgacagcctaaaacccccatcacaggttgaactagtattctacgtcctctctttctgcaagtctgctgtggtgccgctggctagcgtttccgtcataccatactgcctggctcaggtgctcggccaaccacacaaaaaatccctc

SEQ ID NO: 12977 - DNA, 1071 bp, synthetic construct
  misc_feature 1..1071: note = source = /note="Description of Artificial Sequence: Synthetic coding sequence"
  source 1..1071: mol_type = other DNA
atggaggagggcatgaacgtgcttcacgactttggaattcaatccactcactacctccaggttaattaccaggattcacaggattggttcatcctggtttcagtgatcgcagatctgaggaacgcattttatgtgctatttccaatctggttccacctgcaggaggctgtggggatcaagctcttgtgggtggctgtgattggcgactggttgaatctggtcttcaagtggatactattcggacagcggccgtactggtgggtgctggacaccgattattactccaataccagtgtgcctcttatcaagcagtttccggttacatgcgagaccggccccggctcccctagtggccacgccatgggaaccgcaggagtctattacgtcatggtgaccagtacactctcaatttttcaggggaaaatcaagccaacctatcggtttcggtgcctgaatgtgatattgtggctgggcttttgggctgtacagttgaacgtgtgtttgagccgaatctacctggccgcccatttcccccaccaggtcgtcgcaggcgtgctcagcggaatcgccgttgcagagactttcagccatatccattccatctacaacgccagccttaagaaatactttctgatcacctttttcctcttttcattcgcaattgggttctacctgctgctgaagggtcttggggtcgacctcctttggactctcgagaaggcacagcggtggtgtgaacaaccagagtgggtccatatcgacacaactccattcgccagcctgctgaagaatctgggtacgctctttggactaggcctcgccctgaactctagcatgtatagagaaagttgcaaaggtaaactgtccaaatggctgcctttcaggctcagtagcatagtggcttcactggtcctgctgcatgtgtttgactccctgaagcctccctcacaggtcgagctcgtcttctatgtgctatccttttgcaagagtgccgtggtgccattggcttctgtttcggtcataccatattgcctcgctcaagtcctgggacagccacataaaaaaagtttg

SEQ ID NO: 12978 - DNA, 1071 bp, synthetic construct
  misc_feature 1..1071: note = source = /note="Description of Artificial Sequence: Synthetic coding sequence"
  source 1..1071: mol_type = other DNA
atggaagagggtatgaacgtcttgcatgactttggcatccagagcactcactatctccaggtgaattatcaggattctcaggattggttcatccttgtatccgtcatcgctgatctgcgcaatgctttctatgttttgttccctatatggttccatcttcaggaggccgtgggcatcaaactgctttgggtcgctgtgatcggcgattggctgaatctcgtcttcaagtggatcctgttcggacaaagaccctattggtgggtcttggatacagactattactcaaatacttctgtcccattgatcaagcagttccccgtgacctgcgagactggtccaggctctccctctggtcacgccatgggaaccgctggagtctactacgttatggtgactagtaccttgtctatcttccagggtaagatcaagcccacataccgtttccgctgcctcaacgtgatcctgtggctcggcttctgggccgtccagttgaacgtgtgcctgtcccgtatctatctggccgctcactttccacaccaggtcgtcgctggtgttctttctggaatagcagttgccgagacatttagtcatattcactccatatacaacgcttctttgaagaaatactttcttattacattcttcttgttttctttcgccatcggcttttacctgctgctgaagggtttgggagtggatcttctctggaccctggagaaagcccagcgctggtgtgagcagcccgagtgggtccacatcgatactacaccctttgcttcactgctcaaaaacctcggcaccctgttcggtctgggcttggccctcaactctagtatgtatagggagtcctgtaaaggtaagctgtctaagtggctgccttttcgtctgagctccattgttgcttcactcgtcctgctgcacgtcttcgattccttgaagcctccatcacaagttgagttggtgttctatgttttgagtttctgtaaatcagctgtagtaccactcgcctccgtaagcgttattccttattgtctcgcacaggtcctgggacagccccacaaaaagtccctc

SEQ ID NO: 12979 - DNA, 1071 bp, synthetic construct
  misc_feature 1..1071: note = source = /note="Description of Artificial Sequence: Synthetic coding sequence"
  source 1..1071: mol_type = other DNA
atggaagaagggatgaacgtgttgcacgacttcggcattcaatccactcattacctccaggttaattaccaagattcacaagattggttcatactcgtttcagttattgcagatttaaggaacgctttctacgtgctgtttccgatttggtttcatcttcaagaagcagtgggaatcaagcttttatgggttgctgtcatcggtgattggctcaatctggtgtttaagtggatcttatttggtcagagaccttactggtgggtcctcgacacagattattactctaatacatcagttcccctaattaaacagtttccagtgacatgtgagaccggtcctggttctcccagtggccacgcaatgggcaccgcaggtgtgtattatgttatggtgacttcgactctgagcatcttccaaggtaagattaagcctacctatagatttcgctgtctgaacgtgattttgtggctgggcttttgggctgttcaacttaacgtttgtctttcaagaatttatcttgccgcacatttccctcatcaggtagttgccggagtcctctcgggcatagctgttgcagaaacatttagccatatacattccatttacaacgcctcactaaaaaaatatttcttgatcactttcttcctgttctcgtttgctatcggcttttatctgttacttaagggtttgggtgtggatcttttgtggacccttgagaaggctcagagatggtgtgagcagccagaatgggtgcacatagatacaactcctttcgcctctttattaaagaatcttgggactctattcgggcttggactcgctctgaatagtagcatgtaccgtgagagctgtaaaggtaaattgtctaagtggcttccattccgtttgtcttcgatcgtggcctcacttgtactactgcatgttttcgactccctcaagccaccttcccaagtagaattggtattctatgtgctttcattttgcaaatccgctgttgttcctttggcttcagtatcagtcatcccatattgtttggcacaggttcttggacaacctcataaaaagtccctg

SEQ ID NO: 12980 - DNA, 1071 bp, synthetic construct
  misc_feature 1..1071: note = source = /note="Description of Artificial Sequence: Synthetic coding sequence"
  source 1..1071: mol_type = other DNA
atggaggaaggcatgaatgtcctgcacgactttgggatccagtccacccactatctgcaggtgaattaccaggatagccaggactggtttatattggtgtcagtgatcgccgacttgagaaatgcattttacgtcctcttccctatttggttccacctacaggaagccgtcggcattaagctgctgtgggtggccgtgatcggggactggctgaacctcgtctttaagtggatcctgttcgggcagagaccttactggtgggttctagataccgactactacagcaacacttcagtgcccctcataaaacagttccccgtcacctgcgagaccggtccaggaagccctagcggccatgctatgggcacggctggcgtttactatgtgatggtgacaagtactctgtccatcttccagggaaagatcaagcccacatacaggtttcgatgcctgaatgtgattttatggctgggattctgggccgtgcaattgaatgtgtgcctcagcagaatatacctcgctgcccactttcctcatcaggtcgtagctggcgtcttaagcggaattgccgttgcagagactttcagtcatatacactctatctataatgcttccctcaaaaagtatttcctcataacctttttccttttctccttcgccattggattctatcttttgctgaaggggctcggcgtggatctactttggacactcgagaaggcccagaggtggtgcgaacagccagagtgggttcacattgacacgacgcccttcgcatcacttctgaagaaccttggcaccctgttcggactggggctggctcttaacagctctatgtaccgcgaatcatgtaaaggtaagctctccaaatggctgcctttccgcttgtcaagtatcgtggcatctcttgtgttgctacacgtgtttgactcactcaagcccccctcccaagtggaattggtcttttacgtactgtccttctgtaaatctgcggtggtacccctggccagtgtttctgtgattccatactgcctggctcaagtactgggacagccacacaaaaagtccctc

SEQ ID NO: 12981 - DNA, 1071 bp, synthetic construct
  misc_feature 1..1071: note = source = /note="Description of Artificial Sequence: Synthetic coding sequence"
  source 1..1071: mol_type = other DNA
atggaagaaggtatgaacgttttgcatgattttggaattcaatcgacgcactatctgcaagtgaattatcaagattctcaagattggtttattcttgtatcggttattgctgatctccgtaatgcgttttacgttctcttcccaatttggtttcaccttcaagaggcagttggtatcaagttattgtgggtagcagtcatcggagactggctgaatcttgtgttcaagtggattctcttcgggcaacgaccatactggtgggtgctcgacactgattattacagcaacacctcagtgccgctcattaaacaattcccagtgacttgtgaaacaggtccaggtagtccatctggacatgctatgggcacagcgggtgtttactatgtgatggttacttctacgctttcaatttttcagggcaaaattaaacctacgtatcgattccgctgtcttaatgtaatattatggcttggcttttgggctgttcagttaaatgtttgtttgagtagaatttatcttgcagcacattttcctcatcaggttgtcgctggagtcctttcaggcatcgcagtggccgaaacattcagccatattcattcaatttataatgcttcactgaaaaaatattttttgatcactttcttcttattctcatttgccattggattctatctgttactcaagggcctgggagttgatctgctctggacacttgaaaaggcacagagatggtgcgagcaaccagagtgggttcacatagatacgacaccgttcgcaagcctgctcaaaaacctcggaacacttttcggactcggattagccttgaactcctcaatgtaccgagaaagttgcaaaggaaaacttagcaagtggctcccgtttcgcttatctagcatagtagcgagcctggtgttgttacatgtctttgacagtttgaagccaccatcccaggtcgaacttgttttttatgtcctatctttttgtaagtcagctgtggtaccgcttgcaagcgtctccgttattccttattgtttggcgcaggtattgggacagccccataaaaagtcactt

SEQ ID NO: 12982 - DNA, 126 bp, synthetic construct
  misc_feature 1..126: note = source = /note="Description of Artificial Sequence: Synthetic coding sequence"
  source 1..126: mol_type = other DNA
atgggagttagacacccaccttgtagccatcgcctgctggccgtctgcgccctggtgagtctggcaaccgcggccttattgcctcagaattctaagatcccaggccctacatttctcgatccccac

SEQ ID NO: 12983 - DNA, 126 bp, synthetic construct
  misc_feature 1..126: note = source = /note="Description of Artificial Sequence: Synthetic coding sequence"
  source 1..126: mol_type = other DNA
atgggcgttagacatccgccatgttctcatcgcttgcttgccgtctgtgcgctcgtgagcttagctacagcggcactgctgccacagaacagtaaaattcccggaccgaccttcctggatccccat

SEQ ID NO: 12984 - DNA, 126 bp, synthetic construct
  misc_feature 1..126: note = source = /note="Description of Artificial Sequence: Synthetic coding sequence"
  source 1..126: mol_type = other DNA
atgggtgtgcggcacccaccctgcagtcatcggttgctggctgtttgtgccttggtctcactcgccacggccgcattgctgccgcagaatagtaaaatacccggcccaacattcctagatccgcat

SEQ ID NO: 12985 - DNA, 126 bp, synthetic construct
  misc_feature 1..126: note = source = /note="Description of Artificial Sequence: Synthetic coding sequence"
  source 1..126: mol_type = other DNA
atgggcgtgaggcaccccccgtgttcccatcgcctgcttgcagtgtgcgcgctcgtaagcctggctaccgcagcccttctgcctcagaatagcaaaatccccgggcccacattcctggatccacac

SEQ ID NO: 12986 - DNA, 126 bp, synthetic construct
  misc_feature 1..126: note = source = /note="Description of Artificial Sequence: Synthetic coding sequence"
  source 1..126: mol_type = other DNA
atgggagtacgtcaccctccatgttctcatagactattagcagtatgtgctctggtaagtcttgctaccgctgcattgctcccacaaaattcgaaaataccaggaccaactttccttgatccgcat

SEQ ID NO: 12987 - DNA, 126 bp, synthetic construct
  misc_feature 1..126: note = source = /note="Description of Artificial Sequence: Synthetic coding sequence"
  source 1..126: mol_type = other DNA
atgggtgtgcgccatccgccgtgttcgcacagactgctggcggtgtgcgcactcgtgtcgctcgcaaccgcggctttgctccctcagaactccaaaatcccgggacctactttcctcgatcctcac

SEQ ID NO: 12988 - DNA, 126 bp, synthetic construct
  misc_feature 1..126: note = source = /note="Description of Artificial Sequence: Synthetic coding sequence"
  source 1..126: mol_type = other DNA
atgggagtaagacatcctccttgctcccatagacttcttgccgtgtgcgcactagtatccttagctactgccgcactgttgccacagaacagcaagatccccgggcctacctttctcgacccccat

SEQ ID NO: 12989 - DNA, 126 bp, synthetic construct
  misc_feature 1..126: note = source = /note="Description of Artificial Sequence: Synthetic coding sequence"
  source 1..126: mol_type = other DNA
atgggcgttcgccaccccccctgtagccacaggctccttgcagtgtgcgccctggtatcactggccaccgcagcgttgctccctcagaactctaaaattcccggtcccacattcttggaccctcat

SEQ ID NO: 12990 - DNA, 126 bp, synthetic construct
  misc_feature 1..126: note = source = /note="Description of Artificial Sequence: Synthetic coding sequence"
  source 1..126: mol_type = other DNA
atgggtgtgaggcaccctccctgcagccatagacttctggcagtgtgtgcccttgtgtccctggcgaccgctgcccttctgccccagaatagcaagatccccgggccaacttttctggatccacac

SEQ ID NO: 12991 - DNA, 126 bp, synthetic construct
  misc_feature 1..126: note = source = /note="Description of Artificial Sequence: Synthetic coding sequence"
  source 1..126: mol_type = other DNA
atgggagtgcgtcacccaccttgttcccatcggctgctcgccgtgtgtgcgctcgtgtcactcgccaccgcggcattgcttccacagaatagcaagattccaggccccacctttctggatccgcat

SEQ ID NO: 12992 - DNA, 126 bp, synthetic construct
  misc_feature 1..126: note = source = /note="Description of Artificial Sequence: Synthetic coding sequence"
  source 1..126: mol_type = other DNA
atgggcgttcgccaccctccatgcagccatcggcttcttgcagtctgtgccctcgtgtcactggcaaccgccgctctgttgcctcaaaactccaagattcccggtcctacttttctggatccacat

SEQ ID NO: 12993 - DNA, 126 bp, synthetic construct
  misc_feature 1..126: note = source = /note="Description of Artificial Sequence: Synthetic coding sequence"
  source 1..126: mol_type = other DNA
atgggagttcgtcaccctccatgctcacacagattgttggctgtgtgcgccttggtttctttggctacagctgccctgctccctcaaaactcaaaaattccaggaccaacattccttgatcctcac

SEQ ID NO: 12994 - DNA, 126 bp, synthetic construct
  misc_feature 1..126: note = source = /note="Description of Artificial Sequence: Synthetic coding sequence"
  source 1..126: mol_type = other DNA
atgggcgtccggcacccgccttgctcgcatcgcctgctggccgtgtgcgccctcgtgagcctggcgaccgctgccctgttgccacagaattccaagatacctggccctacgtttctcgatccacac

SEQ ID NO: 12995 - DNA, 126 bp, synthetic construct
  misc_feature 1..126: note = source = /note="Description of Artificial Sequence: Synthetic coding sequence"
  source 1..126: mol_type = other DNA
atgggagtgcgacatccgccatgctcccaccgtctgcttgcagtctgtgccctcgtgtcgcttgcgacggctgcacttctgccccaaaactcaaagatccctggccctacctttttggatccgcat

SEQ ID NO: 12996 - DNA, 126 bp, synthetic construct
  misc_feature 1..126: note = source = /note="Description of Artificial Sequence: Synthetic coding sequence"
  source 1..126: mol_type = other DNA
atgggcgtgagacatcctccttgttcgcataggctcctggcagtgtgtgctctcgtgtcacttgccactgcggcactgctcccacaaaattccaagattcctggacctacctttctcgatcctcat

SEQ ID NO: 12997 - DNA, 126 bp, synthetic construct
  misc_feature 1..126: note = source = /note="Description of Artificial Sequence: Synthetic coding sequence"
  source 1..126: mol_type = other DNA
atgggagtccgccatccgccgtgcagccaccggctcctggccgtgtgcgcacttgtgtcgttggccactgctgcacttctgccgcagaactccaaaatccctgggccaaccttccttgatcctcac

SEQ ID NO: 12998 - DNA, 126 bp, synthetic construct
  misc_feature 1..126: note = source = /note="Description of Artificial Sequence: Synthetic coding sequence"
  source 1..126: mol_type = other DNA
atgggtgttcgccaccccccctgttctcatcggttattggctgtatgcgcccttgtgtccctggcaactgcagcgctgttgccgcaaaatagcaagatccccggtccaacatttttagaccctcac

SEQ ID NO: 12999 - DNA, 126 bp, synthetic construct
  misc_feature 1..126: note = source = /note="Description of Artificial Sequence: Synthetic coding sequence"
  source 1..126: mol_type = other DNA
atgggggtccgccatcctccttgcagccaccggttacttgccgtatgtgccctcgtctcactcgctacggcagctttgcttcctcaaaacagtaagatcccaggaccaacgttcctggacccgcac

SEQ ID NO: 13000 - DNA, 126 bp, synthetic construct
  misc_feature 1..126: note = source = /note="Description of Artificial Sequence: Synthetic coding sequence"
  source 1..126: mol_type = other DNA
atgggcgtcagacacccgccctgcagtcaccgactcctcgccgtgtgcgcactggtctcgctcgccacagctgcgctgctgccccagaatagcaaaattcccggccctacatttctggatccgcac

SEQ ID NO: 13001 - DNA, 126 bp, synthetic construct
  misc_feature 1..126: note = source = /note="Description of Artificial Sequence: Synthetic coding sequence"
  source 1..126: mol_type = other DNA
atgggggtgagacacccgccatgttctcataggcttcttgcagtctgcgctcttgtgagccttgcaactgcggcattgcttccgcaaaattcgaagattcctggacctacgtttttggatccgcat

SEQ ID NO: 13002 - DNA, 126 bp, synthetic construct
  misc_feature 1..126: note = source = /note="Description of Artificial Sequence: Synthetic coding sequence"
  source 1..126: mol_type = other DNA
atgggtgtgagacacccaccatgttcgcacagactcctagctgtctgcgctctggtatcactggcaaccgccgctctgctacctcagaatagtaagattcctgggccgactttccttgatccccat

SEQ ID NO: 13003 - DNA, 126 bp, synthetic construct
  misc_feature 1..126: note = source = /note="Description of Artificial Sequence: Synthetic coding sequence"
  source 1..126: mol_type = other DNA
atgggtgtacgtcatccgccgtgttcgcatcgactactagcggtatgtgcgttagtttcgctagcgacggcggcgttactaccgcaaaattcgaaaataccgggtccgacgtttttagatccgcat

SEQ ID NO: 13004 - DNA, 126 bp, synthetic construct
  misc_feature 1..126: note = source = /note="Description of Artificial Sequence: Synthetic coding sequence"
  source 1..126: mol_type = other DNA
atgggagtgaggcacccgccttgcagccatagactcttggcagtctgtgccctggtgtccttggcgaccgctgccttgctgcctcaaaactcgaagatcccaggcccgacctttctcgacccgcat

SEQ ID NO: 13005 - DNA, 126 bp, synthetic construct
  misc_feature 1..126: note = source = /note="Description of Artificial Sequence: Synthetic coding sequence"
  source 1..126: mol_type = other DNA
atgggagtgcgacatcccccatgctcacacagactgctcgccgtgtgcgctttggtctccctggctacagccgccttgcttccgcagaacagcaaaattcccggccccacctttcttgacccccac

SEQ ID NO: 13006 - DNA, 126 bp, synthetic construct
  misc_feature 1..126: note = source = /note="Description of Artificial Sequence: Synthetic coding sequence"
  source 1..126: mol_type = other DNA
atgggagtgcggcaccctccttgttcacatcggttgctggcagtatgtgcactggtgtctctcgcaaccgcagccctgcttcctcagaatagtaaaatacccggaccgacttttctcgatccccac

SEQ ID NO: 13007 - DNA, 126 bp, synthetic construct
  misc_feature 1..126: note = source = /note="Description of Artificial Sequence: Synthetic coding sequence"
  source 1..126: mol_type = other DNA
atgggagtccgacaccctccgtgttctcaccgactgctagccgtgtgcgccctggtcagtttagcaaccgccgccctgctaccacagaactcaaagatccctggaccaactttcctggatccacac

SEQ ID NO: 13008 - DNA, 126 bp, synthetic construct
  misc_feature 1..126: note = source = /note="Description of Artificial Sequence: Synthetic coding sequence"
  source 1..126: mol_type = other DNA
atgggtgtcagacatcccccatgttcgcataggctgcttgcagtgtgtgcacttgtctccctggccactgctgcccttcttcctcagaactcgaaaatcccagggccaacctttctggaccctcac

SEQ ID NO: 13009 - DNA, 126 bp, synthetic construct
  misc_feature 1..126: note = source = /note="Description of Artificial Sequence: Synthetic coding sequence"
  source 1..126: mol_type = other DNA
atgggagtgcgccacccaccgtgttcgcatcgattgctcgcagtctgcgcgctcgtgtccctcgccactgctgcattgctgccccagaactccaagatcccgggcccgaccttccttgaccctcac

SEQ ID NO: 13010 - DNA, 126 bp, synthetic construct
  misc_feature 1..126: note = source = /note="Description of Artificial Sequence: Synthetic coding sequence"
  source 1..126: mol_type = other DNA
atgggagtacggcacccaccttgctcacataggctactagccgtatgtgccttagtctcattagctacagcggccctccttcctcagaactctaaaattcccggacctactttccttgacccccac

SEQ ID NO: 13011 - DNA, 126 bp, synthetic construct
  misc_feature 1..126: note = source = /note="Description of Artificial Sequence: Synthetic coding sequence"
  source 1..126: mol_type = other DNA
atgggggtgcgccaccccccatgctctcaccgcctgttagccgtatgtgcactagtgagcttggcgaccgcggctctgctgccgcaaaactcaaagatccccggaccaacgttcctggatccgcat

SEQ ID NO: 13012 - DNA, 126 bp, synthetic construct
  misc_feature 1..126: note = source = /note="Description of Artificial Sequence: Synthetic coding sequence"
  source 1..126: mol_type = other DNA
atgggagttcggcaccccccatgtagccatagactcctcgcagtgtgcgcgcttgtgtcgcttgccaccgctgcactgttgcctcaaaactccaagattccggggccgacttttctggatcctcat

SEQ ID NO: 13013 - DNA, 126 bp, synthetic construct
  misc_feature 1..126: note = source = /note="Description of Artificial Sequence: Synthetic coding sequence"
  source 1..126: mol_type = other DNA
atgggcgtgcgccacccgccatgttctcaccgcctcctcgctgtttgtgccctggtgtccctggccactgcagctctgcttccccagaacagtaagattcctggtcccactttccttgacccacac

SEQ ID NO: 13014 - DNA, 126 bp, synthetic construct
  misc_feature 1..126: note = source = /note="Description of Artificial Sequence: Synthetic coding sequence"
  source 1..126: mol_type = other DNA
atgggggtgaggcacccgccctgcagccacaggcttctcgcagtgtgtgccctggtcagcttagcaacagccgccctgctgcctcagaactctaaaattccagggccaacattcctagatccccac

SEQ ID NO: 13015 - DNA, 126 bp, synthetic construct
  misc_feature 1..126: note = source = /note="Description of Artificial Sequence: Synthetic coding sequence"
  source 1..126: mol_type = other DNA
atgggcgtgcgacatccaccgtgctcgcatcgtctgctggcagtttgtgcattggtcagtcttgccactgcagcactgttaccacaaaattcaaagatcccaggccctacattcctggatcctcac

SEQ ID NO: 13016 - DNA, 126 bp, synthetic construct
  misc_feature 1..126: note = source = /note="Description of Artificial Sequence: Synthetic coding sequence"
  source 1..126: mol_type = other DNA
atgggcgtgcgtcatccaccttgcagccacagacttttggcagtctgcgccttggtgagtctggcaaccgccgcattgcttcctcaaaactcaaagattccaggacctacctttctagacccacat

SEQ ID NO: 13017 - DNA, 126 bp, synthetic construct
  misc_feature 1..126: note = source = /note="Description of Artificial Sequence: Synthetic coding sequence"
  source 1..126: mol_type = other DNA
atgggcgtgcggcatcctccttgttcacaccgcctgctggcggtgtgtgcgctggtgtcccttgccacggcagcactgcttccccaaaactcgaaaattcctggtcctactttcctcgatccccac

SEQ ID NO: 13018 - DNA, 126 bp, synthetic construct
  misc_feature 1..126: note = source = /note="Description of Artificial Sequence: Synthetic coding sequence"
  source 1..126: mol_type = other DNA
atgggggtgcgtcatcccccttgtagccatagactgcttgcagtgtgcgcactggttagccttgccaccgcggcactccttcctcaaaactcaaaaatccccggtcctacctttctggacccacac

SEQ ID NO: 13019 - DNA, 126 bp, synthetic construct
  misc_feature 1..126: note = source = /note="Description of Artificial Sequence: Synthetic coding sequence"
  source 1..126: mol_type = other DNA
atgggcgtgcgccacccaccgtgctcgcaccggctgctggcggtgtgtgccctcgtctccctcgcaactgccgctttgcttccgcagaacagcaagatccccggacctaccttcctggacccgcat

SEQ ID NO: 13020 - DNA, 126 bp, synthetic construct
  misc_feature 1..126: note = source = /note="Description of Artificial Sequence: Synthetic coding sequence"
  source 1..126: mol_type = other DNA
atgggggtccgtcatcctccctgttcccaccgattgttggctgtgtgcgccctagttagcctggcaaccgcggccctgctgccacagaatagtaagatacccggcccgaccttcctggacccacat

SEQ ID NO: 13021 - DNA, 126 bp, synthetic construct
  misc_feature 1..126: note = source = /note="Description of Artificial Sequence: Synthetic coding sequence"
  source 1..126: mol_type = other DNA
atgggagtcagacatccgccctgtagccatcggctgctcgcagtctgcgccctggtgagcctcgccactgcagccttgctccctcaaaactcaaagatcccggggccgactttcctggacccacac

SEQ ID NO: 13022 - DNA, 126 bp, synthetic construct
  misc_feature 1..126: note = source = /note="Description of Artificial Sequence: Synthetic coding sequence"
  source 1..126: mol_type = other DNA
atgggtgtgcggcaccccccatgtagtcacagacttctggcagtatgtgctctggtgtctttagcaaccgcggccttgctccctcaaaactccaagatccctggacccacctttttagatcctcac

SEQ ID NO: 13023 - DNA, 126 bp, synthetic construct
  misc_feature 1..126: note = source = /note="Description of Artificial Sequence: Synthetic coding sequence"
  source 1..126: mol_type = other DNA
atgggagtgcgccatccgccatgttcccacagacttcttgctgtgtgtgcactggttagccttgcgacagctgcactgttgccacagaatagtaagatccctggacccaccttccttgacccccat

SEQ ID NO: 13024 - DNA, 126 bp, synthetic construct
  misc_feature 1..126: note = source = /note="Description of Artificial Sequence: Synthetic coding sequence"
  source 1..126: mol_type = other DNA
atgggagttaggcatcccccctgcagtcaccgactattggccgtgtgcgcattggtcagtctcgccaccgctgcactcctgccacaaaacagtaagatacctggccctactttcctggacccgcac

SEQ ID NO: 13025 - DNA, 126 bp, synthetic construct
  misc_feature 1..126: note = source = /note="Description of Artificial Sequence: Synthetic coding sequence"
  source 1..126: mol_type = other DNA
atgggggtcagacacccaccgtgctcacataggctgctggctgtctgtgctcttgtgtcgctcgccaccgcggctcttctgccccagaactcgaagatcccaggaccgactttcctggatccgcat

SEQ ID NO: 13026 - DNA, 126 bp, synthetic construct
  misc_feature 1..126: note = source = /note="Description of Artificial Sequence: Synthetic coding sequence"
  source 1..126: mol_type = other DNA
atgggagtcaggcatcccccatgcagccatagactcttagctgtttgcgctttagttagcttggctacagctgccttattgcctcaaaatagtaagatcccaggtcctaccttccttgaccctcat

SEQ ID NO: 13027 - DNA, 126 bp, synthetic construct
  misc_feature 1..126: note = source = /note="Description of Artificial Sequence: Synthetic coding sequence"
  source 1..126: mol_type = other DNA
atgggggtgagacatccgccatgttcgcatcgcctactggctgtatgcgccctcgtgtcattggcgaccgccgcccttctgcctcaaaacagcaaaatacccggaccaacctttcttgacccccac

SEQ ID NO: 13028 - DNA, 126 bp, synthetic construct
  misc_feature 1..126: note = source = /note="Description of Artificial Sequence: Synthetic coding sequence"
  source 1..126: mol_type = other DNA
atgggagtgaggcatcctccgtgctctcacaggctgctcgcggtttgtgcgcttgtgagtcttgctaccgctgcactccttcctcagaactctaaaatcccgggtcccacctttctggacccccac

SEQ ID NO: 13029 - DNA, 126 bp, synthetic construct
  misc_feature 1..126: note = source = /note="Description of Artificial Sequence: Synthetic coding sequence"
  source 1..126: mol_type = other DNA
atgggagttaggcacccgccgtgttcccaccgtttactggccgtatgtgcattggtctctttggctactgccgcccttctgccccagaatagcaaaatccctgggcctacattcctggacccccat

SEQ ID NO: 13030 - DNA, 126 bp, synthetic construct
  misc_feature 1..126: note = source = /note="Description of Artificial Sequence: Synthetic coding sequence"
  source 1..126: mol_type = other DNA
atgggagttcgacatccaccttgtagtcatcgattattagcagtttgcgcacttgtatcattagcaacagcagctttgttaccacaaaattctaagattcctggaccaacattcttagatccacat

SEQ ID NO: 13031 - DNA, 126 bp, synthetic construct
  misc_feature 1..126: note = source = /note="Description of Artificial Sequence: Synthetic coding sequence"
  source 1..126: mol_type = other DNA
atgggagttagacatccgccatgttcacatcggctccttgcggtgtgtgcccttgtctcgctggccaccgccgcactgcttccacagaacagcaaaattcccggtcccacttttctggacccacac

SEQ ID NO: 13032 - DNA, 126 bp, synthetic construct
  misc_feature 1..126: note = source = /note="Description of Artificial Sequence: Synthetic coding sequence"
  source 1..126: mol_type = other DNA
atgggagtcaggcatcctccttgctcgcatcggctgctggcggtgtgtgcccttgtttcactggcgactgctgctctcctcccacagaacagcaagattccggggccgaccttcctggacccacac

SEQ ID NO: 13033 - DNA, 126 bp, synthetic construct
  misc_feature 1..126: note = source = /note="Description of Artificial Sequence: Synthetic coding sequence"
  source 1..126: mol_type = other DNA
atgggggtgaggcaccctccatgctctcaccggctgctggctgtgtgcgccctggtgagcttagcaactgctgcacttctgccacagaatagcaagattcccggccccacattcctggaccctcac

SEQ ID NO: 13034 - DNA, 126 bp, synthetic construct
  misc_feature 1..126: note = source = /note="Description of Artificial Sequence: Synthetic coding sequence"
  source 1..126: mol_type = other DNA
atgggcgtccggcatccgccgtgcagccaccgcttgctggctgtgtgtgcattggtgtcgctcgccactgcggcccttctgcctcagaactcgaagatcccaggaccgacgttcctcgacccgcac

SEQ ID NO: 13035 - DNA, 126 bp, synthetic construct
  misc_feature 1..126: note = source = /note="Description of Artificial Sequence: Synthetic coding sequence"
  source 1..126: mol_type = other DNA
atgggagtgcgtcacccgccttgttcccatcgcctgttggccgtgtgcgcgcttgtctcattggcaaccgcggctttgcttccacagaacagcaagatcccgggccccactttcctggacccccac

SEQ ID NO: 13036 - DNA, 126 bp, synthetic construct
  misc_feature 1..126: note = source = /note="Description of Artificial Sequence: Synthetic coding sequence"
  source 1..126: mol_type = other DNA
atgggggtgcggcatccgccttgttcgcacaggctcctggcagtgtgtgcactcgtgtcccttgcaaccgcggccctgctgcctcaaaattctaagattccgggaccaacttttctggatccccac

SEQ ID NO: 13037 - DNA, 126 bp, synthetic construct
  misc_feature 1..126: note = source = /note="Description of Artificial Sequence: Synthetic coding sequence"
  source 1..126: mol_type = other DNA
atgggcgttagacacccaccatgcagtcaccgcctgctggccgtctgtgctctggtatccctagctaccgccgctctgctgccccagaacagtaagatcccaggccctaccttcctggaccctcac

SEQ ID NO: 13038 - DNA, 126 bp, synthetic construct
  misc_feature 1..126: note = source = /note="Description of Artificial Sequence: Synthetic coding sequence"
  source 1..126: mol_type = other DNA
atgggcgttcggcaccctccctgctcccatcggctgcttgccgtatgtgcgctagttagcctggctactgccgctttattgccacaaaacagcaagatccctggtcccaccttcttagacccacac

SEQ ID NO: 13039 - DNA, 126 bp, synthetic construct
  misc_feature 1..126: note = source = /note="Description of Artificial Sequence: Synthetic coding sequence"
  source 1..126: mol_type = other DNA
atgggagttaggcaccctccttgtagccatagattgctcgcggtctgcgctttggttagcctcgccacagcggctctgctgccacaaaactcgaagatcccaggacctaccttcctcgaccctcac

SEQ ID NO: 13040 - DNA, 126 bp, synthetic construct
  misc_feature 1..126: note = source = /note="Description of Artificial Sequence: Synthetic coding sequence"
  source 1..126: mol_type = other DNA
atgggcgtcagacaccctccgtgctctcataggctgctggcggtgtgtgcccttgtgagccttgctactgcggccctgctgcctcagaattccaagatcccaggaccgacgttcctcgatccgcat

SEQ ID NO: 13041 - DNA, 126 bp, synthetic construct; identical to SEQ ID NO: 13014
  misc_feature 1..126: note = source = /note="Description of Artificial Sequence: Synthetic coding sequence"
  source 1..126: mol_type = other DNA

SEQ ID NO: 13042 - DNA, 126 bp, synthetic construct
  misc_feature 1..126: note = source = /note="Description of Artificial Sequence: Synthetic coding sequence"
  source 1..126: mol_type = other DNA
atgggagtcagacacccaccctgttcccatcgcctgctggcagtgtgtgcattggtcagcctcgccactgcagcgttgctcccacaaaactcgaaaataccgggacctaccttcctggatccacat

SEQ ID NO: 13043 - DNA, 126 bp, synthetic construct
  misc_feature 1..126: note = source = /note="Description of Artificial Sequence: Synthetic coding sequence"
  source 1..126: mol_type = other DNA
atgggagtcaggcacccaccatgctcacaccgcttgctcgctgtgtgtgcactcgtgtcgttggcaactgccgctctgcttccgcagaacagcaagattccgggccctacgttcctggacccgcat

SEQ ID NO: 13044 - DNA, 126 bp, synthetic construct
  misc_feature 1..126: note = source = /note="Description of Artificial Sequence: Synthetic coding sequence"
  source 1..126: mol_type = other DNA
atgggcgtgcgccacccgccgtgtagccatcgactgctagccgtatgcgcgctcgttagccttgcgacagccgccctcctgccgcagaactcaaagattcccggcccgacgtttctggatccccac

SEQ ID NO: 13045 - DNA, 126 bp, synthetic construct
  misc_feature 1..126: note = source = /note="Description of Artificial Sequence: Synthetic coding sequence"
  source 1..126: mol_type = other DNA
atgggcgtccgacacccgccctgtagccaccgcctgcttgctgtctgtgcacttgtgtcgttggccaccgctgctctcctgccccagaactccaagattcctggccccacctttttggatcctcac

SEQ ID NO: 13046 - DNA, 126 bp, synthetic construct
  misc_feature 1..126: note = source = /note="Description of Artificial Sequence: Synthetic coding sequence"
  source 1..126: mol_type = other DNA
atgggcgtgcgacatccgccatgctcacacagactcctggcagtctgcgcgctggtgtccctggcgaccgccgcgctgctgccccagaattcgaagatcccgggaccgactttcctggatccgcat

SEQ ID NO: 13047 - DNA, 126 bp, synthetic construct
  misc_feature 1..126: note = source = /note="Description of Artificial Sequence: Synthetic coding sequence"
  source 1..126: mol_type = other DNA
atgggagtccggcacccgccttgcagccaccgactcttggcggtgtgcgctctcgtgtccctggcaactgcggcactgttgcctcagaactcaaagatcccaggaccgactttcctggacccacat

SEQ ID NO: 13048 - DNA, 126 bp, synthetic construct
  misc_feature 1..126: note = source = /note="Description of Artificial Sequence: Synthetic coding sequence"
  source 1..126: mol_type = other DNA
atgggtgtgagacatcccccctgctcccatcgcctgttggccgtgtgtgcactggtcagccttgccactgcagccctgctgccgcagaactccaagattcctgggccaactttcctggatcctcat

SEQ ID NO: 13049 - DNA, 126 bp, synthetic construct
  misc_feature 1..126: note = source = /note="Description of Artificial Sequence: Synthetic coding sequence"
  source 1..126: mol_type = other DNA
atgggtgtcagacatccaccgtgctctcatcgccttctcgcggtttgcgccctcgtatcccttgccacagccgcattgctgccccagaactcaaaaatccccggcccaacttttttggatccgcat

SEQ ID NO: 13050 - DNA, 126 bp, synthetic construct
  misc_feature 1..126: note = source = /note="Description of Artificial Sequence: Synthetic coding sequence"
  source 1..126: mol_type = other DNA
atgggagtgagacaccctccctgttcccatcgattgctggcagtgtgcgcgctggtgagtctggccaccgccgcactccttcctcagaatagcaaaatcccaggcccaacattcctcgatccacac

SEQ ID NO: 13051 - DNA, 126 bp, synthetic construct
  misc_feature 1..126: note = source = /note="Description of Artificial Sequence: Synthetic coding sequence"
  source 1..126: mol_type = other DNA
atgggtgtccgtcatcccccctgctcacacaggctactggctgtgtgcgcgcttgtgagtttggccaccgcagcactcctgccacaaaattctaagatacccggacccacttttcttgatccacac

SEQ ID NO: 13052 - DNA, 126 bp, synthetic construct
  misc_feature 1..126: note = source = /note="Description of Artificial Sequence: Synthetic coding sequence"
  source 1..126: mol_type = other DNA
atgggcgtgagacacccaccatgttctcatagactgctggcagtgtgtgctcttgtctctctagccacggccgcactgctgccacagaactccaaaatcccgggaccgacttttctggacccccat

SEQ ID NO: 13053 - DNA, 126 bp, synthetic construct
  misc_feature 1..126: note = source = /note="Description of Artificial Sequence: Synthetic coding sequence"
  source 1..126: mol_type = other DNA
atgggagtgagacaccccccttgctcgcatagactgcttgcagtgtgtgcactggtcagcctggcaactgcagcactcctcccccaaaattcgaaaatccctggccctacctttcttgatcctcac

SEQ ID NO: 13054 - DNA, 126 bp, synthetic construct
  misc_feature 1..126: note = source = /note="Description of Artificial Sequence: Synthetic coding sequence"
  source 1..126: mol_type = other DNA
atgggagtgaggcaccctccgtgcagccatcgactgctggccgtctgcgccctggtgtcgttggcgactgccgctctgttgccacagaactcgaaaatccccggaccgaccttcctggacccgcac

SEQ ID NO: 13055 - DNA, 126 bp, synthetic construct
  misc_feature 1..126: note = source = /note="Description of Artificial Sequence: Synthetic coding sequence"
  source 1..126: mol_type = other DNA
atgggagtgcgtcatcctccttgctctcacaggctgcttgccgtgtgtgccctcgtatccctggccaccgcagcgttgttgccacagaatagcaagattcccggacccactttccttgaccctcac

SEQ ID NO: 13056 - DNA, 126 bp, synthetic construct
  misc_feature 1..126: note = source = /note="Description of Artificial Sequence: Synthetic coding sequence"
  source 1..126: mol_type = other DNA
atgggggttcgccatcccccttgttcccaccgtctgcttgcggtgtgcgcgttggtatctctagctaccgctgctcttttacctcagaactctaagattcccggaccaacctttctggacccacat

SEQ ID NO: 13057 - DNA, 126 bp, synthetic construct
  misc_feature 1..126: note = source = /note="Description of Artificial Sequence: Synthetic coding sequence"
  source 1..126: mol_type = other DNA
atgggagttcgccatcctccatgttcccaccggctgctggccgtatgtgccctagtgtccttggctacagccgctctgttgcctcagaatagcaaaatcccggggcctactttcctcgatccacat

SEQ ID NO: 13058 - DNA, 126 bp, synthetic construct
  misc_feature 1..126: note = source = /note="Description of Artificial Sequence: Synthetic coding sequence"
  source 1..126: mol_type = other DNA
atgggtgtaaggcatcccccatgcagccaccgtctgctggcggtttgtgcgctggtgagcttagccaccgccgccctgttaccgcagaacagcaaaattcctgggccaacctttctggacccgcat

SEQ ID NO: 13059 - DNA, 126 bp, synthetic construct
  misc_feature 1..126: note = source = /note="Description of Artificial Sequence: Synthetic coding sequence"
  source 1..126: mol_type = other DNA
atgggggtgaggcaccccccgtgctcccaccggcttctcgccgtgtgtgcacttgtctcgctggccactgcagcgctcctcccgcagaattccaagatcccaggaccgacttttctggacccgcac

SEQ ID NO: 13060 - DNA, 126 bp, synthetic construct
  misc_feature 1..126: note = source = /note="Description of Artificial Sequence: Synthetic coding sequence"
  source 1..126: mol_type = other DNA
atgggagtgcgacatcctccgtgctctcatcgcctgctcgcggtctgtgctttggtgtctctagccacggctgccctcctgccccagaattcgaaaattcctgggccgacgttcctcgaccctcat

SEQ ID NO: 13061 - DNA, 126 bp, synthetic construct
  misc_feature 1..126: note = source = /note="Description of Artificial Sequence: Synthetic coding sequence"
  source 1..126: mol_type = other DNA
atgggcgtgcggcaccctccttgctcgcatcgactgttggctgtttgcgcccttgtctcactcgcgaccgcagcacttcttcctcaaaacagcaaaattccaggacccaccttcctggatccgcac

SEQ ID NO: 13062 - DNA, 126 bp, synthetic construct
  misc_feature 1..126: note = source = /note="Description of Artificial Sequence: Synthetic coding sequence"
  source 1..126: mol_type = other DNA
atgggtgtgagacatccaccatgctcccaccgcctgctggcagtgtgcgcgttggtgagcctcgcgaccgctgcccttcttcctcagaactctaagatcccgggccccacgttcttggacccgcat

SEQ ID NO: 13063 - DNA, 126 bp, synthetic construct
  misc_feature 1..126: note = source = /note="Description of Artificial Sequence: Synthetic coding sequence"
  source 1..126: mol_type = other DNA
atgggtgtgaggcatcccccatgctcgcacagactcctcgccgtttgtgcactggtgtccttggctaccgcggcactccttcctcaaaattcaaagattcccggaccaacgtttttggatcctcac

SEQ ID NO: 13064 - DNA, 126 bp, synthetic construct
  misc_feature 1..126: note = source = /note="Description of Artificial Sequence: Synthetic coding sequence"
  source 1..126: mol_type = other DNA
atgggagtcagacatccaccatgttctcatcgattgcttgccgtgtgcgcacttgtctcgcttgcgactgctgcgctccttccccaaaactccaagattccagggcctacctttcttgatccacac

SEQ ID NO: 13065 - DNA, 126 bp, synthetic construct
  misc_feature 1..126: note = source = /note="Description of Artificial Sequence: Synthetic coding sequence"
  source 1..126: mol_type = other DNA
atgggagtgcgccacccaccatgctcgcaccgcttactcgcagtatgtgctctggtaagtctagccacagccgccttactaccccagaactcaaaaatacccgggcctacattcctggatccccac

SEQ ID NO: 13066 - DNA, 126 bp, synthetic construct
  misc_feature 1..126: note = source = /note="Description of Artificial Sequence: Synthetic coding sequence"
  source 1..126: mol_type = other DNA
atgggagtcagacacccgccttgcagccatcgcctgctcgcagtgtgcgccctcgtgagcctggcaactgctgccttgctccctcagaattccaagatcccggggcctactttcctggacccgcac

SEQ ID NO: 13067 - DNA, 126 bp, synthetic construct
  misc_feature 1..126: note = source = /note="Description of Artificial Sequence: Synthetic coding sequence"
  source 1..126: mol_type = other DNA
atgggggtgcggcacccgccttgctcccaccgcctccttgcggtctgtgcccttgtgtctctggcaaccgctgccctcttgccacagaactcaaaaatcccaggacccactttcctggacccacat

SEQ ID NO: 13068 - DNA, 126 bp, synthetic construct
  misc_feature 1..126: note = source = /note="Description of Artificial Sequence: Synthetic coding sequence"
  source 1..126: mol_type = other DNA
atgggcgtccgacacccgccttgctcccacaggctgctggctgtttgcgctctggtctccttggcaacagctgccctgcttccacagaatagcaagatccccgggcctaccttcctcgaccctcac

SEQ ID NO: 13069 - DNA, 129 bp, synthetic construct
  misc_feature 1..129: note = source = /note="Description of Artificial Sequence: Synthetic coding sequence"
  source 1..129: mol_type = other DNA
atgggcgtgcgccatccaccctgctcgcatcggctgctggctgtgtgcgctttggtcagccttgcaaccgccgcactgctggcaaataccccttgtggaccttacacgcatgattgtccagtgaaaagg

SEQ ID NO: 13070 - DNA, 129 bp, synthetic construct
  misc_feature 1..129: note = source = /note="Description of Artificial Sequence: Synthetic coding sequence"
  source 1..129: mol_type = other DNA
atgggcgtacgacatcctccatgctctcaccggctgctcgcagtgtgtgcgctcgtgtcccttgcgacagctgcgctactggccaacaccccctgcggtccgtacacacacgactgtcccgtgaaacga

SEQ ID NO: 13071 - DNA, 129 bp, synthetic construct
  misc_feature 1..129: note = source = /note="Description of Artificial Sequence: Synthetic coding sequence"
  source 1..129: mol_type = other DNA
atgggagtgcggcatccgccttgctctcaccgactgctcgctgtgtgtgccttggtttctttggctaccgcggcactcctggcaaacaccccatgcgggccctatactcatgactgccctgtcaaacgg

SEQ ID NO: 13072 - DNA, 129 bp, synthetic construct
  misc_feature 1..129: note = source = /note="Description of Artificial Sequence: Synthetic coding sequence"
  source 1..129: mol_type = other DNA
atgggagtgcggcacccaccttgctcgcaccggttgctcgctgtgtgtgccttggtgtcgctggcaaccgctgccctcctggcgaacactccatgcggtccgtacacccatgactgccccgtgaagaga

SEQ ID NO: 13073 - DNA, 129 bp, synthetic construct
  misc_feature 1..129: note = source = /note="Description of Artificial Sequence: Synthetic coding sequence"
  source 1..129: mol_type = other DNA
atgggagttagacatccgccgtgctcgcacagactgctggccgtgtgcgcgctcgtgagcctcgctaccgcggccttgctggcgaacactccgtgcggaccgtacactcacgactgtccagtgaagagg

SEQ ID NO: 13074 - DNA, 129 bp, synthetic construct
  misc_feature 1..129: note = source = /note="Description of Artificial Sequence: Synthetic coding sequence"
  source 1..129: mol_type = other DNA
atgggggtcagacacccaccgtgtagtcacaggctgctggcggtttgtgccctggtgtctttggccacggccgcactgttggccaacaccccctgcggcccatatacacacgactgtcctgttaaaagg

SEQ ID NO: 13075 - DNA, 129 bp, synthetic construct
  misc_feature 1..129: note = source = /note="Description of Artificial Sequence: Synthetic coding sequence"
  source 1..129: mol_type = other DNA
atgggggttaggcaccccccctgctcccaccgtctcctggccgtgtgcgctctcgtgtctctcgcaacagcagccctgctggctaacacgccatgcggcccatatacccatgactgtcctgtgaagcgg

SEQ ID NO: 13076 - DNA, 129 bp, synthetic construct
  misc_feature 1..129: note = source = /note="Description of Artificial Sequence: Synthetic coding sequence"
  source 1..129: mol_type = other DNA
atgggtgtgagacatccgccttgctcccatagattattagctgtatgtgcgttggtatccctggctacagctgctttacttgcgaataccccttgcggtccatatacgcatgattgccctgtaaagcgc

SEQ ID NO: 13077 - DNA, 129 bp, synthetic construct
  misc_feature 1..129: note = source = /note="Description of Artificial Sequence: Synthetic coding sequence"
  source 1..129: mol_type = other DNA
atgggagtgagacatcccccatgttcgcataggctcttggcagtctgtgctctagtttccctggccaccgccgcactgcttgcaaatactccatgtggaccatacacccacgactgccccgtgaagcgg

SEQ ID NO: 13078 - DNA, 129 bp, synthetic construct
  misc_feature 1..129: note = source = /note="Description of Artificial Sequence: Synthetic coding sequence"
  source 1..129: mol_type = other DNA
atgggagtcagacatcctccatgctcgcatcggctgttggccgtgtgcgcacttgtgtcgctcgccaccgcggccctgttggcgaacaccccatgcggcccatacacgcacgactgcccggtgaagcgc

SEQ ID NO: 13079 - DNA, 129 bp, synthetic construct
  misc_feature 1..129: note = source = /note="Description of Artificial Sequence: Synthetic coding sequence"
  source 1..129: mol_type = other DNA
atgggtgttcgccatccaccttgttcgcatcgtctgctggcagtctgtgcacttgtcagcctcgctaccgcagcacttctggcgaatactccgtgcgggccttacacgcacgattgtcctgtgaagcgc

SEQ ID NO: 13080 - DNA, 129 bp, synthetic construct
  misc_feature 1..129: note = source = /note="Description of Artificial Sequence: Synthetic coding sequence"
  source 1..129: mol_type = other DNA
atgggcgtccgccacccaccttgcagccatcggctgctcgcagtgtgcgcactcgtgagcctggccactgcagcattgctcgccaatacaccttgcggtccgtacacccacgactgcccagttaaacgg

SEQ ID NO: 13081 - DNA, 129 bp, synthetic construct
  misc_feature 1..129: note = source = /note="Description of Artificial Sequence: Synthetic coding sequence"
  source 1..129: mol_type = other DNA
atgggtgtacgtcatccgccgtgttcgcatcgtctattagcggtatgtgcgctagtatcgttagcgacggcggcgttattagcgaatacgccgtgtggtccgtatacgcatgattgtccggttaaacgt

SEQ ID NO: 13082 - DNA, 129 bp, synthetic construct
  misc_feature 1..129: note = source = /note="Description of Artificial Sequence: Synthetic coding sequence"
  source 1..129: mol_type = other DNA
atgggcgtccggcatcccccgtgtagccaccgcttgctggccgtgtgcgcactggtctccctggccacagcagcactgcttgcaaatactccgtgtggcccttacacacacgattgtcccgtgaagaga

SEQ ID NO: 13083 - DNA, 129 bp, synthetic construct
  misc_feature 1..129: note = source = /note="Description of Artificial Sequence: Synthetic coding sequence"
  source 1..129: mol_type = other DNA
atgggtgtcaggcaccctccatgttcccatcggcttctcgcggtttgcgccctggtgtcgctcgccactgctgcattgctggcaaacaccccttgtggaccatacacccacgattgtccggtgaagaga

SEQ ID NO: 13084 - DNA, 129 bp, synthetic construct
  misc_feature 1..129: note = source = /note="Description of Artificial Sequence: Synthetic coding sequence"
  source 1..129: mol_type = other DNA
atgggggtacgacatcctccgtgcagccaccgacttctggccgtgtgtgctctggtgtctttggcgacagccgctttgctggctaatacaccctgcggaccttacacgcatgactgccctgtgaaacgc

SEQ ID NO: 13085 - DNA, 129 bp, synthetic construct
  misc_feature 1..129: note = source = /note="Description of Artificial Sequence: Synthetic coding sequence"
  source 1..129: mol_type = other DNA
atgggggtgaggcatcccccttgctctcatcgcctgttggccgtgtgcgcccttgtgagcctggccaccgccgcattgctagccaacacaccctgcggcccctatacacatgactgccctgttaagagg

SEQ ID NO: 13086 - DNA, 129 bp, synthetic construct
  misc_feature 1..129: note = source = /note="Description of Artificial Sequence: Synthetic coding sequence"
  source 1..129: mol_type = other DNA
atgggagtccgccatccaccttgctcgcaccggctgctggctgtctgcgccctggtgtccctcgcaaccgcggctctcctggccaatactccttgtggtccttacacgcatgattgtcccgtgaagagg

SEQ ID NO: 13087 - DNA, 129 bp, synthetic construct
  misc_feature 1..129: note = source = /note="Description of Artificial Sequence: Synthetic coding sequence"
  source 1..129: mol_type = other DNA
atgggcgttcggcatccaccatgtagtcatagacttttggctgtgtgtgctcttgtctcccttgcgactgcagctctgttagcaaatactccttgcggcccatacacacatgattgcccggttaaacga

SEQ ID NO: 13088 - DNA, 129 bp, synthetic construct
  misc_feature 1..129: note = source = /note="Description of Artificial Sequence: Synthetic coding sequence"
  source 1..129: mol_type = other DNA
atgggcgtccgacatcctccctgctcacatagactgcttgcagtctgtgcgcttgtgtcgctcgcaactgcagccctgcttgccaacaccccatgtgggccatacactcatgattgtccggtcaagcgc

SEQ ID NO: 13089 - DNA, 129 bp, synthetic construct
  misc_feature 1..129: note = source = /note="Description of Artificial Sequence: Synthetic coding sequence"
  source 1..129: mol_type = other DNA
atgggggttcggcatccaccttgctcccatcggctgctggccgtgtgcgccttggtgtcgctagctacggcagctttgctggccaatacaccctgcggcccgtacacacacgactgtccagtcaagaga

SEQ ID NO: 13090 - DNA, 129 bp, synthetic construct
  misc_feature 1..129: note = source = /note="Description of Artificial Sequence: Synthetic coding sequence"
  source 1..129: mol_type = other DNA
atgggcgtaagacaccccccatgctctcaccgactgctggctgtttgcgctctggtgagtctcgcaacagctgccctgctggcaaacacaccttgcggcccttatacccatgactgccctgtcaagcgc

SEQ ID NO: 13091 - DNA, 129 bp, synthetic construct
  misc_feature 1..129: note = source = /note="Description of Artificial Sequence: Synthetic coding sequence"
  source 1..129: mol_type = other DNA
atgggcgttcgccatccgccctgcagccaccgcctgctggctgtgtgtgcgttggtgtcacttgccactgcggctttgctggccaacactccgtgcggaccctacacccacgattgcccagtcaagcgg

SEQ ID NO: 13092 - DNA, 129 bp, synthetic construct
  misc_feature 1..129: note = source = /note="Description of Artificial Sequence: Synthetic coding sequence"
  source 1..129: mol_type = other DNA
atgggggtgcggcaccctccctgtagccataggctcttagctgtttgcgccctcgtttctcttgccacagcggccctgctggccaacactccctgtgggccttatacacacgactgcccagtgaagaga

SEQ ID NO: 13093 - DNA, 129 bp, synthetic construct
  misc_feature 1..129: note = source = /note="Description of Artificial Sequence: Synthetic coding sequence"
  source 1..129: mol_type = other DNA
atgggcgtgagacaccctccttgcagccacagactcctggctgtttgcgcactggtgagcctggccacagccgctcttctcgcaaacacaccttgcggtccctacacccatgattgcccagtgaagaga

SEQ ID NO: 13094 - DNA, 129 bp, synthetic construct
  misc_feature 1..129: note = source = /note="Description of Artificial Sequence: Synthetic coding sequence"
  source 1..129: mol_type = other DNA
atgggggttagacaccctccatgttcccatcggttgcttgcagtatgcgcactcgtcagcctggcgacggctgccttgcttgcaaataccccatgcggaccatacactcatgattgtcccgtgaagaga

SEQ ID NO: 13095 - DNA, 129 bp, synthetic construct
  misc_feature 1..129: note = source = /note="Description of Artificial Sequence: Synthetic coding sequence"
  source 1..129: mol_type = other DNA
atgggcgtccgtcacccgccgtgttcccatcgcctgctggcggtctgcgccctggtgtcgctcgccactgccgcactgttggcgaacacgccatgcgggccttacacccatgactgccccgtgaagaga

SEQ ID NO: 13096 - DNA, 129 bp, synthetic construct
  misc_feature 1..129: note = source = /note="Description of Artificial Sequence: Synthetic coding sequence"
  source 1..129: mol_type = other DNA
atgggtgtgaggcatcccccatgcagccaccggctcctggctgtatgtgccttggtgtccctggcaacagctgcccttcttgccaacacgccttgtggaccatatacccacgattgcccggtgaagagg

SEQ ID NO: 13097 - DNA, 129 bp, synthetic construct
  misc_feature 1..129: note = source = /note="Description of Artificial Sequence: Synthetic coding sequence"
  source 1..129: mol_type = other DNA
atgggagttagacatccgccctgcagccaccggctgctggcagtctgcgcgctggtgtcgctggccaccgccgccctgcttgctaacactccgtgtggtccttacacccacgactgtccagtgaagagg

SEQ ID NO: 13098 - DNA, 129 bp, synthetic construct
  misc_feature 1..129: note = source = /note="Description of Artificial Sequence: Synthetic coding sequence"
  source 1..129: mol_type = other DNA
atgggcgtccgtcatcctccttgctctcatcggctactagccgtgtgtgctttggtatctcttgccaccgctgcgctccttgccaataccccgtgtggaccgtatactcacgattgtcccgttaaacgc

SEQ ID NO: 13099 - DNA, 129 bp, synthetic construct
  misc_feature 1..129: note = source = /note="Description of Artificial Sequence: Synthetic coding sequence"
  source 1..129: mol_type = other DNA
atgggggtgcgccaccctccttgctcccacagattactggctgtatgcgcgttggtatcgctggctaccgcagcactgctggcaaacaccccctgtggaccctacactcacgattgccccgtgaaacga

SEQ ID NO: 13100 - DNA, 129 bp, synthetic construct
  misc_feature 1..129: note = source = /note="Description of Artificial Sequence: Synthetic coding sequence"
  source 1..129: mol_type = other DNA
atgggagtgagacatcctccctgctcgcaccgccttctcgcagtgtgcgcgctggtgtcgctcgccactgccgctcttctcgctaatactccatgcggaccgtacactcacgactgcccggtcaagcgc

SEQ ID NO: 13101 - DNA, 129 bp, synthetic construct
  misc_feature 1..129: note = source = /note="Description of Artificial Sequence: Synthetic coding sequence"
  source 1..129: mol_type = other DNA
atgggcgtccgtcacccaccatgttcccacagacttctcgcagtctgtgctttggtcagtctcgccacagccgccttactggcaaatactccctgcgggccgtatacccacgactgtcccgtgaagcgg

SEQ ID NO: 13102 - DNA, 129 bp, synthetic construct
  misc_feature 1..129: note = source = /note="Description of Artificial Sequence: Synthetic coding sequence"
  source 1..129: mol_type = other DNA
atgggcgtaaggcacccaccgtgctctcacaggttgctggcagtatgcgcactggtgagcctggcgacagctgctctcctcgcaaatacgccttgcggcccctatacccacgattgccccgtcaaacgg

SEQ ID NO: 13103 - DNA, 129 bp, synthetic construct
  misc_feature 1..129: note = source = /note="Description of Artificial Sequence: Synthetic coding sequence"
  source 1..129: mol_type = other DNA
atgggggttaggcaccctccctgttcacataggcttctagcagtgtgcgctttggtcagtctagccacagcagcccttctagctaacactccatgtgggccctatacacacgattgccctgtgaaaaga

SEQ ID NO: 13104 - DNA, 129 bp, synthetic construct
  misc_feature 1..129: note = source = /note="Description of Artificial Sequence: Synthetic coding sequence"
  source 1..129: mol_type = other DNA
atgggagtgcggcatcccccgtgctcgcacagactgctcgccgtgtgtgcattggtgtccctggccaccgcggctctcctggcgaacactccgtgcggcccttacacccacgactgcccagtcaagcgc

SEQ ID NO: 13105 - DNA, 129 bp, synthetic construct
  misc_feature 1..129: note = source = /note="Description of Artificial Sequence: Synthetic coding sequence"
  source 1..129: mol_type = other DNA
atgggcgtcagacaccccccttgtagccatcgtctgttggccgtctgcgctctggtgtccctggccactgcagcgcttctggcaaataccccgtgtgggccatacactcatgactgtcctgtcaagaga

SEQ ID NO: 13106 - DNA, 129 bp, synthetic construct
  misc_feature 1..129: note = source = /note="Description of Artificial Sequence: Synthetic coding sequence"
  source 1..129: mol_type = other DNA
atgggggttaggcacccaccttgttctcatcgactgcttgccgtgtgcgcacttgtgtctttagccactgctgctctactagctaatacaccctgtgggccttatacacatgactgtcccgtaaaacgg

SEQ ID NO: 13107 - DNA, 129 bp, synthetic construct
  misc_feature 1..129: note = source = /note="Description of Artificial Sequence: Synthetic coding sequence"
  source 1..129: mol_type = other DNA
atgggagtccggcaccctccttgcagccacaggctccttgccgtctgtgcgttggtttctttagcaaccgctgccttacttgccaacactccctgtggtccatacacacatgactgtccagtgaaaaga

SEQ ID NO: 13108 - DNA, 129 bp, synthetic construct
  misc_feature 1..129: note = source = /note="Description of Artificial Sequence: Synthetic coding sequence"
  source 1..129: mol_type = other DNA
atgggggtcaggcacccgccctgctcccatcggttgctggcggtgtgcgctctggtgtctctggccaccgccgcgctgttggccaacactccatgtggtccatacactcacgattgcccagtaaagcgc

SEQ ID NO: 13109 - DNA, 129 bp, synthetic construct
  misc_feature 1..129: note = source = /note="Description of Artificial Sequence: Synthetic coding sequence"
  source 1..129: mol_type = other DNA
atgggagtgaggcacccgccgtgcagccaccgcctgctggccgtctgtgccctggtctcactggccacagccgctctgctggccaacactccttgcggcccttatacacacgattgccctgtgaagaga

SEQ ID NO: 13110 - DNA, 129 bp, synthetic construct
  misc_feature 1..129: note = source = /note="Description of Artificial Sequence: Synthetic coding sequence"
  source 1..129: mol_type = other DNA
atgggagtgaggcatcccccttgttcccaccgcctgttggccgtgtgtgccctcgtctcgcttgccaccgctgcactgctcgccaacaccccatgtggtccttacacccatgactgtccagtgaaaaga

SEQ ID NO: 13111 - DNA, 129 bp, synthetic construct
  misc_feature 1..129: note = source = /note="Description of Artificial Sequence: Synthetic coding sequence"
  source 1..129: mol_type = other DNA
atgggagtgcggcaccctccgtgctcgcataggctcctcgctgtttgcgccctggtgtcgctggcaactgccgcgctgttggcgaataccccgtgcggtccttacactcacgactgtccagtcaagcgg

SEQ ID NO: 13112 - DNA, 129 bp, synthetic construct
  misc_feature 1..129: note = source = /note="Description of Artificial Sequence: Synthetic coding sequence"
  source 1..129: mol_type = other DNA
atgggagtaaggcacccgccgtgctcccaccggcttttggcggtttgtgctctcgtgtcgctcgccactgccgcgctgctggccaacacgccttgcgggccatacacccatgactgcccggtgaagcgc

SEQ ID NO: 13113 - DNA, 129 bp, synthetic construct
  misc_feature 1..129: note = source = /note="Description of Artificial Sequence: Synthetic coding sequence"
  source 1..129: mol_type = other DNA
atgggagtgagacatccgccatgctcccatcgacttcttgcagtttgtgccttagttagcttggcaacggctgctctactcgcaaacacgccatgcggaccgtatacccatgattgccctgtgaagaga

SEQ ID NO: 13114 - DNA, 129 bp, synthetic construct
  misc_feature 1..129: note = source = /note="Description of Artificial Sequence: Synthetic coding sequence"
  source 1..129: mol_type = other DNA
atgggtgtgcgccatcctccttgcagtcacaggctgcttgctgtctgcgctctcgtaagtctcgcaaccgccgcacttctcgcaaacactccttgtggtccctatacacacgactgccccgtgaagagg

SEQ ID NO: 13115 - DNA, 129 bp, synthetic construct
  misc_feature 1..129: note = source = /note="Description of Artificial Sequence: Synthetic coding sequence"
  source 1..129: mol_type = other DNA
atgggagtgcgccacccgccctgttcgcatcgtttgcttgccgtttgcgccctggttagcctggctaccgctgcgctcctggctaacactccgtgtggcccctacacccacgattgcccggttaagcgc

SEQ ID NO: 13116 - DNA, 129 bp, synthetic construct
  misc_feature 1..129: note = source = /note="Description of Artificial Sequence: Synthetic coding sequence"
  source 1..129: mol_type = other DNA
atgggcgtcagacaccctccatgttctcaccgccttctggcagtgtgcgccctggtaagcctcgcgacagcggccttgctagcaaacactccctgcgggccatatacccacgattgtcctgtaaagcgt

SEQ ID NO: 13117 - DNA, 129 bp, synthetic construct
  misc_feature 1..129: note = source = /note="Description of Artificial Sequence: Synthetic coding sequence"
  source 1..129: mol_type = other DNA
atgggtgtccggcatccaccttgcagtcatcgtctgctagctgtgtgcgccctggtgtctctggcaaccgctgctctgcttgccaacaccccatgcggcccatacacacacgattgccctgtgaagcgg

SEQ ID NO: 13118 - DNA, 129 bp, synthetic construct
  misc_feature 1..129: note = source = /note="Description of Artificial Sequence: Synthetic coding sequence"
  source 1..129: mol_type = other DNA
atgggggtgcggcatccaccgtgctcacataggctgcttgcagtgtgtgcactcgtctcgctcgcgacggcggcacttctcgccaacactccctgtggtccatacactcacgattgtcctgtgaagcgc

SEQ ID NO: 13119 - DNA, 129 bp, synthetic construct
  misc_feature 1..129: note = source = /note="Description of Artificial Sequence: Synthetic coding sequence"
  source 1..129: mol_type = other DNA
atgggagtgagacatccaccctgctcacacaggctccttgcagtctgtgcccttgtgtcccttgcaaccgctgccctgttggcaaacactccttgtgggccgtacacccatgattgtcctgttaagcgt

SEQ ID NO: 13120 - DNA, 129 bp, synthetic construct
  misc_feature 1..129: note = source = /note="Description of Artificial Sequence: Synthetic coding sequence"
  source 1..129: mol_type = other DNA
atgggcgtgcgccaccctccctgttctcatcggctgttggcggtctgcgcactggtcagtctggccaccgctgccctgttagccaacactccttgcggtccctatacacacgactgccctgtgaagagg

SEQ ID NO: 13121 - DNA, 129 bp, synthetic construct
  misc_feature 1..129: note = source = /note="Description of Artificial Sequence: Synthetic coding sequence"
  source 1..129: mol_type = other DNA
atgggggttaggcacccaccctgctctcaccggctcctggcggtgtgcgcacttgtgagtctggctactgcagccctgctggcgaatactccttgcgggccatacacgcacgactgccccgttaaacgt

SEQ ID NO: 13122 - DNA, 129 bp, synthetic construct
  misc_feature 1..129: note = source = /note="Description of Artificial Sequence: Synthetic coding sequence"
  source 1..129: mol_type = other DNA
atgggcgtgagacatcctccatgcagccacagactcctagccgtgtgcgccctggtgagcttagcaactgccgcactattggccaacacaccctgcgggccttacactcacgactgcccagtgaaaaga

SEQ ID NO: 13123 - DNA, 129 bp, synthetic construct
  misc_feature 1..129: note = source = /note="Description of Artificial Sequence: Synthetic coding sequence"
  source 1..129: mol_type = other DNA
atgggtgtgcggcaccctccatgttcgcacaggctcttggccgtctgcgcactcgtgtctctcgcaaccgcagccctgcttgctaacaccccatgtggcccatacactcatgattgccctgttaagcgc

SEQ ID NO: 13124 - DNA, 129 bp, synthetic construct
  misc_feature 1..129: note = source = /note="Description of Artificial Sequence: Synthetic coding sequence"
  source 1..129: mol_type = other DNA
atgggcgtgaggcaccctccgtgtagccataggcttctggcagtttgcgcactcgtttccctggctacagccgcactgttggcaaacaccccttgcggaccgtacacgcatgactgtcccgttaaaagg

SEQ ID NO: 13125 - DNA, 129 bp, synthetic construct
  misc_feature 1..129: note = source = /note="Description of Artificial Sequence: Synthetic coding sequence"
  source 1..129: mol_type = other DNA
atgggagtgaggcacccaccctgctcgcatcgcctgctggcagtatgcgctctagtgagccttgcgaccgcggccctgctggcaaacactccatgtgggccatatacacacgactgcccggtgaaacgg

SEQ ID NO: 13126 - DNA, 129 bp, synthetic construct
  misc_feature 1..129: note = source = /note="Description of Artificial Sequence: Synthetic coding sequence"
  source 1..129: mol_type = other DNA
atgggcgtccgtcacccaccctgtagtcataggttactggctgtgtgcgctttggtatcactggccacagctgcactgcttgcaaacacaccctgcggcccatacacgcacgattgtccagtgaagagg

SEQ ID NO: 13127 - DNA, 129 bp, synthetic construct
  misc_feature 1..129: note = source = /note="Description of Artificial Sequence: Synthetic coding sequence"
  source 1..129: mol_type = other DNA
atgggcgtgcgtcatcccccctgtagccataggcttcttgccgtctgtgcactggtgtcgctggcaactgctgcactcctcgcgaacaccccttgtgggccgtacactcacgactgtccggtgaagaga

SEQ ID NO: 13128 - DNA, 129 bp, synthetic construct
  misc_feature 1..129: note = source = /note="Description of Artificial Sequence: Synthetic coding sequence"
  source 1..129: mol_type = other DNA
atgggagtacgccaccccccctgctcccatagactgttggcagtgtgtgcactcgtgtcactggccacagctgcgctgctggcgaacaccccttgcggaccctacactcacgattgtcccgtgaagcgc

SEQ ID NO: 13129 - DNA, 129 bp, synthetic construct
  misc_feature 1..129: note = source = /note="Description of Artificial Sequence: Synthetic coding sequence"
  source 1..129: mol_type = other DNA
atgggagtgcggcacccgccttgttcgcatcgcctgctggcagtgtgcgcgctcgtctcactcgcgaccgcagctctgctggccaacactccttgcggcccctacacccacgactgccccgttaaaaga

SEQ ID NO: 13130 - DNA, 129 bp, synthetic construct
  misc_feature 1..129: note = source = /note="Description of Artificial Sequence: Synthetic coding sequence"
  source 1..129: mol_type = other DNA
atgggagtgcgccatcctccatgttcccaccgactgctcgctgtgtgcgcacttgtgtctctggccactgcagccctgctcgcaaacactccttgcggcccctacacacatgattgcccggtgaaaaga

SEQ ID NO: 13131 - DNA, 129 bp, synthetic construct
  misc_feature 1..129: note = source = /note="Description of Artificial Sequence: Synthetic coding sequence"
  source 1..129: mol_type = other DNA
atgggcgttaggcatccaccttgtagccaccgcttgctcgccgtctgcgcacttgtgagtctggcaactgccgcactccttgcaaatactccatgtggtccctatacccacgattgtccggtgaagcga

SEQ ID NO: 13132 - DNA, 129 bp, synthetic construct
  misc_feature 1..129: note = source = /note="Description of Artificial Sequence: Synthetic coding sequence"
  source 1..129: mol_type = other DNA
atgggcgtccgacaccccccgtgctcccaccgcctgcttgcggtgtgtgcactcgtgagtctggccacagcggccctgctggccaacactccttgtggtccttatacccacgactgccccgtgaaacgc

SEQ ID NO: 13133 - DNA, 129 bp, synthetic construct
  misc_feature 1..129: note = source = /note="Description of Artificial Sequence: Synthetic coding sequence"
  source 1..129: mol_type = other DNA
atgggcgtccgccatcccccctgctcacaccggctgctcgcggtctgcgctctggtgagccttgccactgcagcgctgctggccaacaccccgtgtggcccttacacccatgattgcccagtgaaacga

SEQ ID NO: 13134 - DNA, 129 bp, synthetic construct
  misc_feature 1..129: note = source = /note="Description of Artificial Sequence: Synthetic coding sequence"
  source 1..129: mol_type = other DNA
atgggagtgcggcacccaccctgttcgcatcggcttctcgcagtttgtgcactggtcagcctggccaccgcggctctcctggcgaataccccctgtggtccttacactcacgactgcccagtgaaacgc

SEQ ID NO: 13135 - DNA, 129 bp, synthetic construct
  misc_feature 1..129: note = source = /note="Description of Artificial Sequence: Synthetic coding sequence"
  source 1..129: mol_type = other DNA
atgggcgtgaggcaccccccttgtagccatagactcctggccgtgtgtgctctcgtgtctttagccacagctgctcttttggctaacacaccatgtggaccatatactcacgactgccctgtcaagcgg

SEQ ID NO: 13136 - DNA, 129 bp, synthetic construct
  misc_feature 1..129: note = source = /note="Description of Artificial Sequence: Synthetic coding sequence"
  source 1..129: mol_type = other DNA
atgggagtccggcatccgccatgcagccacagactgcttgcagtgtgtgccctcgtgtcgctggcgactgcggctctgctcgccaacaccccctgcggtccgtacactcacgattgtcctgtgaaacgg

SEQ ID NO: 13137 - DNA, 129 bp, synthetic construct
  misc_feature 1..129: note = source = /note="Description of Artificial Sequence: Synthetic coding sequence"
  source 1..129: mol_type = other DNA
atgggagtgagacatcctccgtgttcgcatcggctcctggcggtgtgcgccttggtgtcactggccactgcagcccttcttgctaacaccccctgcggtccgtacacgcacgattgccccgttaagcgg

SEQ ID NO: 13138 - DNA, 129 bp, synthetic construct
  misc_feature 1..129: note = source = /note="Description of Artificial Sequence: Synthetic coding sequence"
  source 1..129: mol_type = other DNA
atgggagtgcggcatcctccttgcagccataggctgctggctgtgtgtgccctagtgagtctggctactgcagcactgctggccaacaccccttgtggcccctacacacacgactgcccagtcaaacgc

SEQ ID NO: 13139 - DNA, 129 bp, synthetic construct
  misc_feature 1..129: note = source = /note="Description of Artificial Sequence: Synthetic coding sequence"
  source 1..129: mol_type = other DNA
atgggcgtgagacacccgccgtgttcacataggctcctggcggtctgtgccctggtgagccttgcgaccgccgctttgctcgcaaacaccccatgcggaccgtacacccacgattgcccagtgaagcgg

SEQ ID NO: 13140 - DNA, 129 bp, synthetic construct
  misc_feature 1..129: note = source = /note="Description of Artificial Sequence: Synthetic coding sequence"
  source 1..129: mol_type = other DNA
atgggcgtgcgccacccaccatgcagccatcggctcctcgcggtgtgcgcactcgtctcactggccaccgccgccctgctggcaaatacgccgtgcggaccgtacactcacgactgtccagttaaaagg

SEQ ID NO: 13141 - DNA, 129 bp, synthetic construct
  misc_feature 1..129: note = source = /note="Description of Artificial Sequence: Synthetic coding sequence"
  source 1..129: mol_type = other DNA
atgggagtcagacatcctccatgttcccaccgccttctcgcagtgtgtgcactcgtgagtcttgcaactgcggcccttcttgctaacaccccgtgcggcccatacacgcatgattgtccagtgaagagg

SEQ ID NO: 13142 - DNA, 129 bp, synthetic construct
  misc_feature 1..129: note = source = /note="Description of Artificial Sequence: Synthetic coding sequence"
  source 1..129: mol_type = other DNA
atgggagttcggcaccccccatgctcacatcgtttgctcgctgtatgtgccctcgtgagcctggccacggctgctctattggcaaatactccctgtggtccttacacccacgattgcccggttaaaagg

SEQ ID NO: 13143 - DNA, 129 bp, synthetic construct
  misc_feature 1..129: note = source = /note="Description of Artificial Sequence: Synthetic coding sequence"
  source 1..129: mol_type = other DNA
atgggggtgcgccaccccccttgtagtcatcggctgttggctgtatgcgcactggtcagcctagcaaccgctgctctgttggccaataccccttgcggaccctatactcatgattgtcctgtgaaaagg

SEQ ID NO: 13144 - DNA, 129 bp, synthetic construct
  misc_feature 1..129: note = source = /note="Description of Artificial Sequence: Synthetic coding sequence"
  source 1..129: mol_type = other DNA
atgggtgtgcgccaccccccttgctcgcatcgtctgctcgcagtgtgcgccctggtatccttggcaactgcggccctgctcgccaacaccccatgtgggccgtacacgcacgactgcccggtcaagaga

SEQ ID NO: 13145 - DNA, 129 bp, synthetic construct
  misc_feature 1..129: note = source = /note="Description of Artificial Sequence: Synthetic coding sequence"
  source 1..129: mol_type = other DNA
atgggagtcaggcaccctccttgttcccaccgcttgttggcggtgtgcgcccttgtgagcctggccactgccgcactcctggccaacactccgtgtggcccctacactcacgattgcccggtgaagcgg

SEQ ID NO: 13146 - DNA, 129 bp, synthetic construct; identical to SEQ ID NO: 13116
  misc_feature 1..129: note = source = /note="Description of Artificial Sequence: Synthetic coding sequence"
  source 1..129: mol_type = other DNA

SEQ ID NO: 13147 - DNA, 129 bp, synthetic construct
  misc_feature 1..129: note = source = /note="Description of Artificial Sequence: Synthetic coding sequence"
  source 1..129: mol_type = other DNA
atgggcgtgcgacacccaccttgctcacatagactcctggcagtgtgtgcattggtgtccttggctactgccgctcttctggcgaacacgccttgtggaccatacacccatgattgccctgtgaagcgg

SEQ ID NO: 13148 - DNA, 129 bp, synthetic construct
  misc_feature 1..129: note = source = /note="Description of Artificial Sequence: Synthetic coding sequence"
  source 1..129: mol_type = other DNA
atgggagtgcgccaccccccttgttcccatcggctgttggctgtgtgcgcgctggtgtcactggccactgccgccctgcttgccaacacaccctgtggcccttacacacacgattgccctgtgaagcgc

SEQ ID NO: 13149 - DNA, 129 bp, synthetic construct
  misc_feature 1..129: note = source = /note="Description of Artificial Sequence: Synthetic coding sequence"
  source 1..129: mol_type = other DNA
atgggagtcagacacccaccgtgctcccatcgcctccttgcggtgtgtgcccttgtgtcactggctactgcggccttgctcgcaaacacgccgtgtggaccatacactcacgactgtcccgtgaagcgc

SEQ ID NO: 13150 - DNA, 129 bp, synthetic construct
  misc_feature 1..129: note = source = /note="Description of Artificial Sequence: Synthetic coding sequence"
  source 1..129: mol_type = other DNA
atgggagtccgtcatccgccctgctcccacagactgctagccgtatgcgccctagtgagtttggctacggccgctttgctagcaaatactccttgcggaccatacacgcacgattgcccggtaaagcga

SEQ ID NO: 13151 - DNA, 129 bp, synthetic construct
  misc_feature 1..129: note = source = /note="Description of Artificial Sequence: Synthetic coding sequence"
  source 1..129: mol_type = other DNA
atgggtgtcagacaccccccatgcagccatcgcctgttggccgtctgcgcccttgtgtctctggccacggcagccctcctcgcgaacaccccttgtggaccgtacacacacgactgcccagtgaaaaga

SEQ ID NO: 13152 - DNA, 129 bp, synthetic construct
  misc_feature 1..129: note = source = /note="Description of Artificial Sequence: Synthetic coding sequence"
  source 1..129: mol_type = other DNA
atgggagttagacatccaccatgctcacatagactacttgcagtttgtgctcttgtttcattagcaactgcagctttattagcaaacacaccatgtgggccttatactcatgattgtccagttaaaaga

SEQ ID NO: 13153 - DNA, 129 bp, synthetic construct
  misc_feature 1..129: note = source = /note="Description of Artificial Sequence: Synthetic coding sequence"
  source 1..129: mol_type = other DNA
atgggtgtccgccatccaccctgctcgcatcgtttgctggcagtgtgtgcgctggtgtcccttgcaaccgcagcacttctggcaaacactccttgcggcccatatactcatgattgtccagtgaagcgg

SEQ ID NO: 13154 - DNA, 129 bp, synthetic construct
  misc_feature 1..129: note = source = /note="Description of Artificial Sequence: Synthetic coding sequence"
  source 1..129: mol_type = other DNA
atgggagtgcgccatcccccctgctcacatcggctccttgctgtgtgtgcgcttgtcagccttgcaaccgcagcacttctggccaacaccccttgcggaccttacactcacgattgcccggtgaaacgc

SEQ ID NO: 13155 - DNA, 129 bp, synthetic construct
  misc_feature 1..129: note = source = /note="Description of Artificial Sequence: Synthetic coding sequence"
  source 1..129: mol_type = other DNA
atgggggtgaggcaccctccctgtagccatcgacttctggccgtgtgtgctctggtatcactggcgacggcagctctgttggccaacacaccttgtgggccgtacacgcatgattgccccgtgaagaga

SEQ ID NO: 13156 - DNA, 2109 bp, synthetic construct
  misc_feature 1..2109: note = source = /note="Description of Artificial Sequence: Synthetic coding sequence"
  source 1..2109: mol_type = other DNA
atgctgcggggccgctccctgtcggttactagcttgggtggactgcctcaatgggaagtggaggagcttcctgtggaagagttgcttctgtttgaagtcgcatgggaggtgaccaacaaggtgggaggtatttacaccgtgatacaaaccaaggcaaagaccaccgcagatgaatggggtgagaattactttctgattggcccttactttgagcataacatgaaaacccaggtggagcagtgtgaacctgtgaatgatgcagtcagacgagccgtggatgcaatgaataaacatggttgccaggtgcattttggaaggtggcttatcgaaggttccccttacgtcgtcctgtttgacattgggtacagcgcatggaatctggatagatggaaaggggacctttgggaagcgtgttcagtgggcatcccataccacgatagagaggcgaatgacatgctgatctttggttcccttaccgcttggttcctgaaggaagtgactgaccatgcagatggaaagtatgtcgtggcccaatttcacgaatggcaggctggtatcgggcttattctttcgcgggcccggaagctgccgattgctaccattttcactacccacgcaacgctcctgggaagatacctctgtgcagccaatatcgatttctacaaccaccttgataagttcaacattgataaggaagcgggagaacgccagatatatcacaggtattgcatggagcgcgcgagcgtccattgcgcgcatgtctttactaccgtgtccgagattaccgcaattgaggccgaacacatgctcaaaaggaaacctgatgtggtcaccccaaacggactgaacgtgaagaagttttcagccgtccacgagtttcaaaatctgcacgctatgtacaaggcgcgaatacaagatttcgtccggggccatttctacggacatctcgatttcgacctggaaaagaccctgttcctctttatagcaggtaggtacgagttttcaaacaagggagcggacatatttctggagtcgctctcgagactgaactttctccttcgaatgcataagtcggacataactgtgatggtgtttttcattatgcccgcaaaaaccaacaatttcaacgtggaaacccttaaaggtcaagcagtgcggaagcagctgtgggatgtggcacattccgtcaaggagaagtttgggaaaaagttgtacgatgcacttctgagaggagagattcctgacctgaatgacatcctcgatagagatgatctgaccatcatgaagcgggccattttctcaactcaaaggcaaagcctgcctcccgtgaccacccataacatgattgacgattcaaccgaccctatcctcagtaccatccggcgcatcggactgttcaataacagaactgacagagtcaaggtgattctgcatcctgaattcctttcgtccacttcgcctctgcttccaatggattacgaggagttcgtccgcggctgtcatctcggagtgtttccgtcctactacgaaccatggggatacactcctgcagaatgtaccgttatgggcatcccttcggtgactactaatctgtcgggttttggatgttttatgcaagaacacgtcgcagaccctaccgcgtatggaatctacatcgtggatcggagattcagaagccccgatgattcctgcaaccagctcaccaagtttctgtacggattttgcaagcaaagcagaaggcagagaatcatccagcgtaaccgaaccgaacggctcagcgaccttctcgattggaggtaccttggccgatactaccaacatgcaagacacctcacgctttccagagcgttcccagacaaatttcacgtggagcttacttccccacctaccaccgagggcttcaagtaccctcgaccttccagcgtgccgccgtcaccatcaggaagccaagcaagctcacctcaatcatccgatgtggaagatgaggttgaagatgagcggtacgacgaagaagaggaagcagaacgggatcgcctgaacattaagtccccattttcactcagccacgtccctcatggtaagaagaagctgcatggagaatacaaaaat

SEQ ID NO: 13157 - DNA, 2109 bp, synthetic construct
  misc_feature 1..2109: note = source = /note="Description of Artificial Sequence: Synthetic coding sequence"
  source 1..2109: mol_type = other DNA
atgttgcgagggagaagcttgtctgtgacgagcctgggaggcctgcctcagtgggaggtagaagagctccccgttgaagagctactactgttcgaggttgcctgggaggttactaacaaggtcggcggcatatatactgtaatacagaccaaggctaagactaccgcagacgagtggggcgaaaactacttcctgatcgggccgtatttcgagcataatatgaagacccaggtggagcagtgcgaacctgtgaatgatgcggtgcgccgagcagtggatgccatgaacaagcacggatgtcaggtccactttggccgttggctcatcgaggggagcccatacgttgtgctgttcgatatcggctatagcgcctggaatttggatcgttggaagggcgacctttgggaggcctgttccgtcggaatcccttaccacgatagggaggcgaatgatatgctaattttcggatcacttaccgcctggtttctgaaggaagtaaccgatcacgctgatggcaaatatgtggttgcgcagttccacgagtggcaggctgggataggtctcatactcagcagagcgagaaaactccccatagcaactattttcacgacccatgccaccttgctaggcaggtatctttgcgcagcaaatatagacttctataaccatctggacaaattcaacatagataaggaggctggtgagagacaaatttaccaccgatactgcatggaacgtgcttccgtgcactgtgctcatgtgtttacaaccgtctcagagataacagctatcgaagccgagcatatgcttaagcgaaagcccgatgtggtgacacccaacggcctaaatgtcaagaaatttagcgccgtgcatgagttccagaacctccatgcaatgtacaaagcccgaattcaggattttgtcagagggcacttttacgggcacttagattttgacctggagaagaccctattcctgttcatcgccggccgatacgaattctccaacaagggtgccgacatcttcttggaatccctttcacgactcaacttcctactacgaatgcacaaatctgatattactgtgatggtcttctttattatgccagccaagactaataacttcaatgtggagacgttgaaaggtcaggccgttaggaaacagctctgggatgtggcgcacagcgtgaaagagaagtttggcaagaagctgtacgacgcattgctgcgaggtgaaatccccgaccttaatgacatcctggatagagatgacctcactattatgaagcgtgctatttttagtacgcaacgtcagagtttgccccctgtgaccacacataatatgattgatgacagcacagatcccattcttagcaccataagaaggatcgggctgttcaataatcgtacagatagggttaaggtcatccttcaccctgaatttctttcttcgacttcccctctgctgcccatggactacgaggaattcgtgaggggatgccaccttggtgtgttcccgtcctattatgagccctgggggtatacccctgcagagtgcaccgtcatggggatcccttcggtgaccaccaatctatcaggcttcggatgtttcatgcaggaacacgttgcagaccccaccgcgtatggaatatatatcgtggataggagatttcgatctccagatgactcctgtaaccagctcacaaagttcctctatggtttttgcaagcagtctaggaggcagagaattattcagcgaaaccgtacagaaagactgtccgacctgctcgattggcggtatctgggtcgatactaccagcatgcacggcatctcacacttagcagggccttccccgataagtttcatgtggaacttacttctcctccgactactgaaggctttaaatatccgagaccttccagcgtgcctcctagcccaagtgggtcacaggcgagtagcccgcagtcaagtgatgtggaagacgaagtggaggacgaacgatacgacgaagaggaagaggctgaaagagaccgcttaaacatcaagtctccatttagcctgagtcatgtgcctcacggcaagaagaagctgcacggagagtacaaaaat

SEQ ID NO: 13158 - DNA, 2109 bp, synthetic construct
  misc_feature 1..2109: note = source = /note="Description of Artificial Sequence: Synthetic coding sequence"
  source 1..2109: mol_type = other DNA
atgctgcggggaagatcactttccgtgacctcccttgggggacttcctcagtgggaagtcgaagagctgccggtggaagaactgctgctctttgaagtggcttgggaagtgactaacaaggtcggtggcatctacaccgtcatccagaccaaggcaaagaccactgccgatgagtggggtgagaattactttctgattggtccatactttgaacataacatgaaaactcaagttgagcaatgtgaaccagtcaacgatgcagtcagaagagcagtggacgctatgaataagcacggatgtcaggtgcattttggtaggtggctgattgagggttccccttacgtcgtgttgttcgacattgggtactcggcatggaaccttgacaggtggaaaggggatctctgggaagcctgctccgtcggaattccttaccatgaccgcgaggccaatgatatgcttatcttcgggtccttgaccgcttggtttctgaaggaagtgactgatcacgcagatgggaaatatgtcgtggcacaattccacgaatggcaagcaggaatcggccttatcctttccagagcacgtaaactccctatagcgaccatattcactacccatgcaacccttctcggacggtacctgtgtgccgccaacattgacttttacaatcacctggataagttcaacattgataaggaagcaggagagagacagatctaccatcggtactgtatggaaagggcgtcagtccactgtgcacatgtgtttacgaccgtcagcgaaattacggcaattgaagcagagcatatgctgaagagaaaacccgatgtggtgactcctaatggattgaatgtgaagaagttttcggccgtccacgaatttcagaacctgcatgccatgtacaaggcacgtatacaagattttgtgcgaggtcatttctatggacatctcgattttgatttggaaaagaccttgtttttgtttattgcaggccgctatgaattttccaataagggtgcagacatttttcttgagtcactgtcgagactgaacttcctccttcggatgcataagtcggatattactgtgatggtgtttttcatcatgcctgcaaagaccaacaactttaacgtggaaactttgaaggggcaagcagtccgcaagcaactctgggacgtggcgcattctgtcaaagagaagttcggtaaaaagctgtacgatgcactgcttcgaggtgaaatcccggaccttaatgacattctggatagggatgatctcaccatcatgaagagagctattttctcaactcaacgtcagtcgctgcctcctgtcactactcacaatatgatcgatgattccacggaccctatcctctcgaccataaggcgcatcggtttgtttaacaaccggactgacagggtcaaggtgatcctccatccagaattcctctcgtcaacgtcccccctgcttcccatggactacgaagaatttgtcaggggctgtcatctcggtgtgtttccttcctactacgagccctggggatacaccccagctgaatgtaccgtcatggggattccttcggtgacgactaacctttccggatttgggtgttttatgcaagaacacgtcgctgaccctaccgcatacggaatctacattgtggaccggagattcaggagcccagatgactcctgcaaccagctgaccaaatttctctatggattctgcaagcaatcaagacgacaaagaatcattcaacggaaccgcaccgagcgtctttcagatcttctggattggaggtacttggggagatactaccagcatgcgcgccatctcactttgagccgagccttccctgataagttccacgtagagttgacctcgcccccaactaccgaggggtttaagtacccacggccctccagcgtgccgccttctccgtcaggatcccaagcgtcctcaccacagtcatcggacgtggaggatgaagtggaggatgagaggtacgacgaggaggaagaagccgagagagatagactcaacatcaagtcgcccttctccctgtcgcatgtgcctcacgggaagaagaagctgcacggagagtacaaaaac

SEQ ID NO: 13159 - DNA, 2109 bp, synthetic construct
  misc_feature 1..2109: note = source = /note="Description of Artificial Sequence: Synthetic coding sequence"
  source 1..2109: mol_type = other DNA
atgttaagaggaagatcattgtcagttacatcattgggaggtttaccacaatgggaagtagaggaattaccagtagaagaacttttgttattcgaagttgcatgggaagttactaataaagtaggaggaatttatacggttattcaaacaaaggctaaaactacagctgatgaatggggagaaaattattttttaattggaccatattttgaacataatatgaaaactcaagttgaacaatgtgaaccagttaatgatgcagttcgtagagctgttgatgctatgaataaacatggatgtcaagttcatttcggtagatggcttatcgaaggaagtccttatgttgttttatttgatattggatattctgcatggaatttagatagatggaaaggagacctttgggaagcatgttcagttggtattccttatcacgatagagaagcaaatgatatgttaatttttggatctcttactgcttggttcttgaaggaagtaactgatcatgcagatggaaaatacgttgttgctcagtttcatgaatggcaagccggaatcggtttaattctttcaagagctagaaaacttccaattgcaaccatttttacaactcacgctactttacttggtagatatttatgtgcagctaacattgatttttataatcacttagataagtttaatattgataaagaagctggtgaaagacaaatttatcatagatattgcatggaaagagcatctgttcattgcgctcatgtatttactacagttagtgaaataactgcaattgaagcagaacatatgttaaagagaaagccagatgtagtaactccaaatggattaaacgtgaaaaaatttagtgcagttcatgaattccaaaatttacatgccatgtataaagctaggatacaagatttcgttagaggacacttttatggacatcttgattttgatcttgaaaaaactttatttctttttatagccggtcgttacgaattctcaaacaaaggagcagatatttttttagaatcattaagtaggttaaatttccttttaagaatgcataaatcagacattactgtaatggttttttttattatgccagcaaaaactaataattttaatgttgaaacattaaaaggtcaagctgttagaaaacaactttgggacgttgctcattcagttaaagagaaattcggaaaaaaactttatgatgcacttttacgtggagaaattccagatcttaacgacatattagatagagatgatttaacaattatgaagagagcaatattttcaactcaaagacaatcacttccaccagttactactcataatatgattgatgactcaactgatccaatcctttctacaattagacgaattggactttttaataatagaacagacagagttaaagtaattcttcatcctgaatttctttcatctacatcaccacttttaccaatggattatgaagaatttgtaagaggatgtcatttaggagtgtttccaagttattatgaaccatggggatatacaccagctgaatgtacagttatgggaattccttcagttactactaatctttctggatttggatgtttcatgcaagaacatgtagctgatccaactgcttatggaatctatattgttgacagaagattcagatctccagacgattcatgtaatcaacttacaaaatttttatatggtttttgtaaacaaagccgtagacaaagaataattcaaagaaatagaactgaaagattgtcagatttattagattggagatatcttggtagatattatcaacatgctagacatcttactctttctagagcatttccagataaatttcatgtagaacttacaagtccaccaacaacagaaggatttaaatacccaagaccatcttctgttccaccttcaccaagcggatcacaagcatcttctccacaatcatcagatgttgaagacgaagttgaagatgaaagatatgatgaagaagaagaagcagaaagagatagattaaatattaaatctccttttagtttatctcatgtaccacatggaaaaaaaaagttacatggtgaatataaaaat

SEQ ID NO: 13160 - DNA, 2109 bp, synthetic construct
  misc_feature 1..2109: note = source = /note="Description of Artificial Sequence: Synthetic coding sequence"
  source 1..2109: mol_type = other DNA
atgctgaggggcaggtctctatcggtgacgtcgctgggcggtttgccgcaatgggaggtggaggagctccctgtcgaggagcttctgctgtttgaggttgcctgggaggtaaccaataaggttggcggcatctataccgtcatccagactaaggccaagaccacagccgacgagtggggtgagaactactttctgataggtccgtattttgagcacaacatgaagacacaagtggagcagtgtgagcccgtcaacgatgccgtgcgtagagccgttgacgcaatgaacaagcacggttgccaggttcacttcggtcgctggctgattgagggctctccctacgtcgtcctgttcgacatcggctactcagcttggaacctcgatcgttggaaaggcgatctctgggaggcttgctctgttggtatcccttaccacgatcgtgaggccaacgacatgctgatcttcggttctctcactgcctggttccttaaggaggttactgaccacgcagatggcaagtacgtggtagcgcagttccacgagtggcaggccggtatcggtctcattctaagccgtgcccgcaagttacctatcgcaaccatattcaccactcatgcgactcttttgggacgctacttgtgcgccgcaaatattgatttttataaccatttggacaagttcaacattgataaggaagctggtgagagacagatctaccaccgttactgtatggagcgtgcctcggtccactgcgcccatgtcttcaccacggtgtcggagatcaccgccatcgaagccgaacacatgctgaagcggaaacctgacgtcgtgacccccaacggcctaaacgttaagaagttctctgctgtccatgagtttcaaaacctccatgccatgtacaaagcccgcatccaagacttcgtccgcggacacttctacggccacctcgatttcgatttggaaaagacactgtttctattcatcgcgggaagatacgaattctctaataagggagccgacattttcctggagtcgctctcccgtttgaacttccttctccggatgcataagtctgacatcaccgtcatggtgttcttcatcatgcctgccaagaccaacaacttcaacgtggagactctcaagggtcaggctgtgcgtaagcaactttgggatgttgcacactccgtcaaggagaagtttggtaagaagttatacgacgctcttcttcgtggcgagattcccgacctgaacgatatccttgatagggacgatcttaccattatgaagcgtgctatcttctcaacgcagcggcagtctctcccgcctgtaacgacgcataatatgattgacgattctacggacccaatccttagcacaatccgtaggatcggcttattcaacaacaggacggaccgcgtcaaggtgattctccaccccgagtttttgagtagtacgagcccattgctgcctatggattacgaggaatttgtgcggggttgccacctcggtgtcttcccttcctactatgagccgtggggctatacccccgccgagtgcactgtcatggggatcccttccgtcactacgaacctttccggttttggctgtttcatgcaagaacacgttgctgaccccaccgcctacggcatctacattgtagacaggcgctttcgcagccccgatgactcttgcaaccagttgaccaaattcctctacggtttctgcaaacaatctcgccggcaacgcatcattcagcgtaaccgcaccgaacgtctatccgatctcctcgactggcgctacctcgggaggtactaccagcatgcccgtcacctcacactttccagggcattcccggacaagttccacgtcgagctcacctctccccctacaacggagggttttaagtatccgcgcccaagctccgttcccccgtccccctcgggtagccaagcaagttcaccccagtcctcggacgttgaggacgaagtggaggacgagcgctacgatgaggaggaggaggccgagcgcgaccgtcttaacatcaaatctccgttttctctgtctcatgtaccccatggcaagaagaagctgcatggcgagtacaagaac

SEQ ID NO: 13161 - DNA, 2109 bp, synthetic construct
  misc_feature 1..2109: note = source = /note="Description of Artificial Sequence: Synthetic coding sequence"
  source 1..2109: mol_type = other DNA
atgttgcgagggcgcagcctgtctgtgacaagtttggggggcctcccacagtgggaggtggaagagctgcctgtggaagaactgttgctgtttgaagtggcgtgggaggtgaccaacaaagtcggggggatatacacggtgatccagacaaaagcaaaaacaacagccgatgaatggggtgagaactatttccttataggcccttactttgaacataacatgaaaacccaggtggagcagtgcgagccagttaacgatgccgtgcgacgggcggtggacgcgatgaacaaacacggatgccaggttcatttcgggagatggcttatagagggttccccatacgttgtgctcttcgatataggctatagcgcgtggaatctggaccggtggaaaggcgatctctgggaggcttgttccgtcggcatcccgtatcacgatagagaggctaacgatatgctgattttcgggagcttgaccgcctggttcttgaaggaagtgaccgaccacgctgacggcaaatatgtcgttgcccagttccatgagtggcaggccggtattggtttgatactctctcgcgccaggaagcttcccatagctaccatcttcaccacccacgcaacccttttgggtaggtacttgtgcgcagctaatatcgacttttacaatcatctcgacaagtttaacatcgataaggaggctggggaaaggcagatataccatcgatattgtatggagagagcaagcgtccactgcgcccacgtgtttaccactgtttcagaaataaccgccatcgaggctgagcatatgttgaaacgtaagcctgatgtcgttacccccaacgggctgaacgtgaagaaattctcagccgtccacgagtttcagaacctccacgcgatgtataaggcccgaatacaggacttcgtacgcgggcatttttacgggcacctagactttgatctcgaaaagacactgtttctgtttattgctgggcggtacgagttttctaacaagggggcggatatcttcctcgaaagtcttagccgcctgaactttcttctcagaatgcataagtcagatattacagtaatggtcttctttataatgcctgcaaaaacgaataatttcaacgtggagaccctgaagggacaggccgtgagaaaacagttgtgggacgtggcccactctgtgaaagaaaagtttgggaagaagctttatgacgccctgctgagaggtgagattccagatttgaacgacatcctcgaccgggatgacctgacaataatgaaacgagccattttctcgacacagcgtcagagtctcccccccgtgacaacccacaatatgatcgacgactcaaccgacccaattttaagcactattagaaggattggattgttcaataaccgaacggatcgggtcaaggtgatcctgcacccggaattcttaagctccaccagcccacttctccccatggactatgaagaattcgtgaggggctgccatctcggtgtgtttcctagttattacgaaccttggggatatacccctgcggagtgtacggtgatgggcatcccttcagtcacgaccaacttaagtggttttgggtgtttcatgcaggagcatgtagccgaccccacggcctatgggatctacatagtggataggagatttcggtcacctgacgattcctgcaaccagttgacaaagtttctttatggtttctgcaaacagtcccgacggcagagaattatacaaaggaatcgcactgaaaggctttccgatctgctggactggagatatcttggtagatactaccaacacgcccgccacttgacactgagtcgcgccttccccgataagttccatgtagagctgaccagtcctcccaccacggagggctttaagtatccgagaccctccagtgtcccgccatccccctcggggtcgcaggcctcttccccccagtccagtgacgtggaggacgaggtggaggatgaaaggtacgacgaagaggaggaagctgaacgggatcgcttaaatattaagtcccccttctcactgagtcatgtgccccatgggaagaagaagctgcatggcgaatacaaaaac

SEQ ID NO: 13162 - DNA, 2109 bp, synthetic construct
  misc_feature 1..2109: note = source = /note="Description of Artificial Sequence: Synthetic coding sequence"
  source 1..2109: mol_type = other DNA
atgcttcgcggacgctcgctttccgtaacttctcttggaggtctgccgcaatgggaagtggaagaactcccggtggaagaactattgttatttgaagttgcttgggaagtgacgaacaaagttggtggcatttataccgttattcagacaaaagcgaagactacggccgatgaatggggtgaaaactatttcctgattgggccgtattttgaacacaatatgaaaacacaagtagagcagtgcgagccggtgaacgatgctgttcgacgggccgtggacgctatgaataaacacggttgccaagtacactttggtcggtggttgatcgaaggtagcccttatgttgtcctctttgatattgggtactcggcctggaatttagatcgatggaaaggcgatctctgggaggcctgctctgttggcataccttaccatgatcgcgaagctaacgacatgttaatctttggatcacttacggcatggtttctgaaagaagtaacagatcatgcagatggaaagtatgtcgtagctcaattccacgaatggcaagccggaatcggcttaatccttagcagagctcgtaaacttccaatcgcaactatatttacgacgcatgctacactgctaggtagatacttatgcgcggcaaatattgatttttataatcatcttgacaaatttaatattgataaagaggcgggtgaacggcaaatttatcataggtactgtatggagcgcgcatccgttcactgtgcacatgtgttcacaacagtctcagaaatcacagcaatagaagcagaacatatgctgaagcggaaacctgatgtcgtcaccccaaatgggcttaatgtgaaaaaattcagcgctgtccatgagttccagaaccttcatgcaatgtacaaagctcgtatccaagattttgtacgcggccatttttacggtcacctggatttcgatctggaaaagacactgttcctgtttatcgctggccggtatgagttttcaaacaaaggtgcggatatctttttggaatctttgagccgcctcaatttcttacttaggatgcataaatcggatataacagttatggttttcttcatcatgccggctaaaacaaataattttaacgttgaaacattaaaaggacaagccgttcgtaaacaattgtgggacgtagcacatagtgtaaaggagaaattcggaaaaaaattatacgacgccttgctgcgtggcgaaatcccagatttaaatgacattttagatcgggacgaccttacgattatgaagagagcaatcttctcaacgcagagacaaagcctccctccggtaaccacacataatatgattgacgactctactgatccgatacttagcacaatacggcgtattggtctctttaataatcgtacagaccgagtgaaagtaatcttacaccctgagttccttagctctacgtcgccattattgcctatggattatgaagaattcgtccgaggatgccatcttggtgtgtttccgtcatattatgaaccatggggatacacgcctgcagagtgcacagttatgggtattccaagtgtgactacgaatctctctggcttcgggtgttttatgcaagaacatgtcgctgatccgacggcttacgggatttatatcgttgataggcggtttcggtcgccggacgattcatgcaaccaacttactaaatttctttatggattttgcaaacagtcacgtcggcagcggataattcagcggaatcgcaccgagcggctatcagacctccttgactggcgttatttaggtcgatattatcagcacgcccgacacctgacgctgtcgcgtgcttttcccgataaatttcacgttgaattgacttctccgcctacaacagagggatttaaatacccacgtccgagctccgttcctccgagtccgtcaggaagtcaggctagttcaccgcaaagttcagatgtcgaagacgaagtggaagacgaacggtatgacgaagaggaagaagccgagcgcgaccggctgaacatcaaatcaccttttagcttgagccatgtgcctcatggtaagaaaaaactgcatggcgaatataaaaac

SEQ ID NO: 13163 - DNA, 2109 bp, synthetic construct
  misc_feature 1..2109: note = source = /note="Description of Artificial Sequence: Synthetic coding sequence"
  source 1..2109: mol_type = other DNA
atgctgagaggccgctccctgtccgtgacttccctgggcggactcccgcaatgggaggtggaagaacttccggtggaggaactgctgctgttcgaagtggcatgggaagtcactaataaggtgggaggaatctacaccgtcatccagactaaggccaagactaccgccgatgaatggggcgaaaactacttcctgatcggaccctactttgagcataacatgaaaacccaagtggaacagtgcgagccggtgaatgatgcggtgagacgggccgtggatgctatgaataaacacggttgccaggttcatttcggaagatggctcatcgaaggcagcccgtacgtggtgctgttcgacatcggctactccgcgtggaatctcgacagatggaagggcgacctgtgggaagcatgctcagtcggaattccttaccatgatagagaggcgaacgatatgttgatctttggatcgctcactgcctggtttcttaaggaggtgactgatcacgccgacggtaagtatgtagtggcacagtttcatgaatggcaagcgggcatcgggctgattctgtcgcgggccaggaagctgcccatagctaccattttcactactcatgcgactctgctcggcagatacctgtgtgcagccaacatcgacttttacaatcacctggacaaattcaatattgacaaggaggcgggagaaagacaaatctaccatcgctactgtatggaaagagcgtctgtgcactgcgcgcacgtgttcaccaccgtgtcggagatcactgccatcgaagcagaacacatgctgaagcggaaaccggacgtcgtgaccccgaatggcctgaatgtgaaaaagttttcggccgtccatgaattccagaacctgcacgcaatgtacaaagcgcggattcaggactttgttcggggacacttttacggacatctcgacttcgacctcgagaaaaccctgtttctgtttatcgccggacgttacgaattctcgaacaaaggggccgacatcttcctggaaagcctctcgaggctgaatttcctgctgcggatgcataaaagcgatatcaccgtgatggtgttcttcatcatgcctgctaagactaacaacttcaacgtcgaaactctgaagggtcaagcagtgcggaaacagctgtgggacgttgcgcactcggtgaaggagaagtttggtaagaagctgtacgacgcgttgctccgcggagaaatccctgatctgaatgatatcctggaccgggacgatctgaccatcatgaaacgggctatcttctcaactcagcgtcaaagcctcccgccagttaccacccacaacatgattgacgattcgaccgacccgatcctgtcgaccatcaggcgcattgggcttttcaacaacagaaccgaccgcgtgaaggtgatccttcacccagaattcttgtcatcgacctcccctcttctccccatggattacgaagaatttgtccgcggttgccaccttggtgtgttcccgtcctactacgaaccgtggggctacacgccggcagagtgcactgtcatgggaatcccttccgttacgaccaacctttctggattcgggtgcttcatgcaggaacatgtggccgaccccaccgcgtacggtatttacatcgtggaccgaagatttcgctccccagacgatagctgcaaccagctgactaagtttctgtacggattctgtaagcaatcacgccgccaacggatcattcagcggaacaggactgagagactttctgacctgctcgattggcgttacctcggaagatactaccagcacgcaagacacctgacgctttcccgcgcattcccggataagttccatgtcgaactgacctcgcctccgaccactgaggggttcaagtacccgaggccctcgtccgtgccaccatcgccctcgggatcacaggcctcatccccgcaatcctccgatgtggaggacgaggtcgaggatgaacgctacgacgaggaggaagaagcggagagggacagactgaacatcaagtcccccttttcactctcgcatgtgccgcatggcaaaaagaagctgcacggagagtacaagaac

SEQ ID NO: 13164 - DNA, 2109 bp, synthetic construct
  misc_feature 1..2109: note = source = /note="Description of Artificial Sequence: Synthetic coding sequence"
  source 1..2109: mol_type = other DNA
atgctccgcgggcgatctctaagcgtaactagcctggggggcttacctcagtgggaagtagaggaactaccagtggaagagctgctgttgtttgaagtggcctgggaggtgacaaacaaagtgggcggcatctataccgtcatccagaccaaggccaagacgaccgcggacgagtggggcgaaaactactttctcatcggaccatacttcgaacacaacatgaagacacaggtggagcagtgtgagcccgtgaatgacgccgtacggcgtgcggtagatgcaatgaataaacacggctgccaggtgcattttggacgctggcttattgagggttcgccctatgtggtgcttttcgatattggttattccgcttggaatctagataggtggaaaggggatttatgggaggcttgctcggtcggaatcccctatcatgacagggaagccaatgacatgctgatctttggaagtcttaccgcatggtttttaaaagaagtgacagaccacgccgacgggaagtacgttgtggcgcaattccacgaatggcaagctgggatcggattgattctgtctagggcacgtaagctaccaatagcaaccatctttacgacgcatgcgacactcctgggacggtatctgtgcgccgccaatatcgatttttacaaccacctggataagtttaacatcgacaaggaagctggcgagcgccagatctatcataggtactgcatggaacgggctagtgttcattgtgctcacgtcttcaccacggtgtctgagattacagctatcgaagccgaacatatgcttaagcgtaagccagacgtggttacccctaacgggctgaatgtcaagaagtttagtgccgttcatgagtttcaaaatttgcacgctatgtataaagctagaattcaggactttgtgcggggacatttttacggtcacctggatttcgatctggagaagactttgttcctgttcatagctggacgttacgagttttccaataaaggcgcagacatttttctggaatccctgagccgcctgaacttcctgctccgaatgcataagtctgatattactgtgatggtgttttttatcatgcccgccaaaacgaataacttcaacgtggaaacgctgaagggccaggccgttagaaagcagctgtgggacgttgcccattcagttaaggaaaaattcggtaagaagctgtacgacgccctgctccggggggaaattccagacttaaacgacatcctggaccgggacgacctgacaatcatgaagcgtgcaatcttctcaacccagcggcaatccctgccccctgtgacaacccacaacatgatcgatgacagtacagacccaatcctgagcaccataaggcggattggcctgttcaacaaccgaaccgaccgagtaaaggttatccttcaccccgagttcctgtcttcaacttctcccctgcttcctatggactatgaagagttcgtcagagggtgccatctgggagtttttccttcctattatgaaccctggggttatactccagccgaatgtacggtgatgggaatcccaagtgtgactaccaatctgagtggatttggatgtttcatgcaggaacacgtggcagatccaaccgcatatggaatttatattgtggaccgtcgatttcgttcaccagatgacagctgcaatcaactgaccaagtttctgtatggattctgcaaacagtctcggagacagcggatcatacaaagaaacaggactgagagactgtcagacctgctcgactggaggtacctgggacggtattatcagcacgcgcgccacttaactctgagtagggcgttccctgataagtttcacgttgaattgacgtctccaccaaccaccgaggggttcaaatatcctcggccctcatcggtaccgccgtcgccctccggttcccaggcctcgtctccacagtcatccgatgtggaagacgaggtcgaggatgagcgctacgatgaagaggaagaggcggagcgggatcgtctgaacataaagagccctttttcattgtcccatgtgccgcatggaaagaaaaaacttcatggggaatacaagaac

SEQ ID NO: 13165 - DNA, 2109 bp, synthetic construct
  misc_feature 1..2109: note = source = /note="Description of Artificial Sequence: Synthetic coding sequence"
  source 1..2109: mol_type = other DNA
atgctgcgcggaagaagcctgtccgttacttcactgggaggacttccgcaatgggaagtcgaagagctgccggtggaagaactgctgctgtttgaggtggcttgggaagtgactaataaggtgggtggaatctatactgtgatccagaccaaggccaagactaccgcggatgaatggggagaaaactacttccttatcgggccgtacttcgagcacaacatgaaaacccaagtggagcaatgtgagccagtcaacgacgccgtgaggcgcgccgtggatgctatgaacaagcatggatgccaggtgcactttggacgctggctcattgaaggatcgccgtacgtggtgctctttgatattggttactcagcgtggaacctggacagatggaagggtgatctgtgggaggcttgctctgtcggaattccctaccacgaccgggaggcaaacgacatgctgattttcgggtccctcactgcctggttcctcaaggaagtgactgaccacgctgatgggaagtacgtcgttgcgcagttccatgagtggcaagctggcatcgggctcatcctctcgcgggcccgcaagttgccgatcgccactatcttcaccactcacgcaactctgttgggacgctacctgtgcgccgctaacattgacttttacaaccacctcgacaagttcaatattgacaaggaagccggagaaagacaaatctaccacagatactgcatggagcgcgcctcggtgcactgcgcccacgtgttcaccaccgtgagcgaaatcactgccatcgaagccgagcacatgctgaagcgcaaaccggacgtggtcaccccaaacggcctcaatgtgaaaaagttctccgcggtgcacgaattccagaatctgcacgcaatgtacaaggcgcggattcaggactttgtgcgcggtcacttctatgggcatctggattttgacttggaaaagaccctgttcttgtttatcgccggacggtacgaattctcgaataagggcgctgacatctttcttgagtcgctctctcgcctcaacttcttgttgcggatgcacaagtcagatatcaccgtgatggttttctttatcatgccagcaaagacgaacaacttcaacgtggaaaccctgaagggacaggccgtccggaagcagctgtgggatgtggcccattcagtcaaggagaagttcgggaaaaaactctatgacgcgctccttcgcggagaaatccctgatctcaacgatatccttgacagggacgacctgaccattatgaagcgcgctatcttttctacccagcggcaatcgctcccgccggtcactacccacaacatgattgacgattccaccgacccgatcctgtcgactatcaggagaatcggattgttcaacaacaggaccgatcgggtcaaggtgatcctccaccctgaattcttgtccagcaccagcccgctcctgccgatggactacgaagagttcgtgcgggggtgccatctgggagttttcccttcctactacgaaccatggggttatactccggcggaatgtaccgtgatgggaatcccgagcgtcactacgaacctgtccggattcggctgcttcatgcaggaacacgtcgcggacccaacggcttatggcatctacatcgtggaccgccggtttcggtccccagatgattcgtgcaaccaactgaccaagttcttgtacggattctgcaaacaaagccgcagacaacgcattattcagaggaaccgcactgaacgcttgagcgatctgctggactggaggtaccttggacgctactaccaacacgccagacaccttactctgtcccgtgccttcccggacaaattccacgtggagctcactagcccaccgactaccgagggatttaagtacccgcgcccttcaagcgtgcccccttccccgagcggttcacaagcctcctcacctcagtcatcagatgtggaggatgaggtggaggacgaacggtacgacgaagaggaagaggccgagagggaccgtctgaacatcaagtccccgttctcccttagccatgtcccacatggtaaaaagaaactgcacggcgagtataagaac

SEQ ID NO: 13166 - DNA, 2109 bp, synthetic construct
  misc_feature 1..2109: note = source = /note="Description of Artificial Sequence: Synthetic coding sequence"
  source 1..2109: mol_type = other DNA
atgttgcgaggtaggagtctctcagtgacgtcgctgggaggtcttcctcaatgggaagtagaggagctgccagtcgaagagttgctcctctttgaggtggcttgggaagttacaaataaggttggtggtatttatactgtgattcagactaaagcaaagaccactgccgacgaatggggcgagaattacttccttattgggccctattttgagcacaatatgaagacacaagttgagcaatgcgaaccagttaacgatgctgtcagaagagcggtggacgcgatgaacaaacatgggtgccaagtgcatttcggaagatggttaattgagggttcaccttatgttgttcttttcgatattgggtattctgcctggaaccttgatagatggaaaggagatctttgggaagcatgctcggtggggattccctaccacgatcgtgaagctaacgacatgctgatttttggaagtttgaccgcttggtttttgaaagaagttacggatcacgctgacggtaagtacgtcgttgctcaatttcatgaatggcaggcgggcatcggtctcatcttgtctagggctaggaagttgcctattgcaacaatttttactacacatgccacactcctgggtagatatctttgcgccgctaatattgacttctataatcacttggataagttcaacatcgataaggaagcaggggaacggcagatttatcacaggtattgcatggagcgggcttcggtccactgcgcccatgtttttactacggtttctgaaattacagctatcgaggcagaacacatgttgaaaaggaaaccagatgtcgtgacacctaacggtcttaacgtgaaaaagttctctgccgttcacgaatttcaaaacttacatgctatgtataaagcaagaattcaagattttgtcaggggacatttttatggacatctcgattttgacctcgaaaagactctctttcttttcattgctggccgttatgaatttagtaacaagggagccgacatctttttggagtccctctcgagattgaacttcctgctccgtatgcacaaaagtgatatcacagttatggttttttttataatgccagccaaaacgaacaatttcaacgtggaaacccttaagggccaagctgttcgaaagcaactttgggacgtggcacattccgtaaaagaaaagttcggtaaaaagctgtatgacgcgttgctacgcggtgagatccccgatttgaatgacattctcgaccgtgatgatcttactataatgaagagagcaattttcagcactcaacgtcagagccttcctccagttactacccataatatgatcgatgattccactgaccccatactttctactatccgaaggattggattgttcaataatcgtactgatagagttaaggtcattttgcatcctgaattcctgtcgtctacttcccctttactaccaatggattatgaagagttcgttcgaggctgtcatcttggtgtgtttccgagttattatgagccttgggggtacactccagctgagtgcacagttatgggtatcccctcagtaactaccaatctctccggatttggctgcttcatgcaagagcacgttgcagatcccacggcgtacggtatttacattgttgatagaagatttcggagccctgatgactcctgcaatcagcttactaagtttctctatggattctgtaagcaatcacgtagacaaagaattattcagcgaaacaggacggagcgtctttcggatctccttgattggcgttatcttggaagatactaccaacatgcacgacacctgaccctttcacgtgcttttcctgataagtttcacgttgaattgacaagccctccgactactgaagggttcaagtaccctaggccaagttccgtccctcctagcccttcgggttctcaagcctcctcgcctcaatcaagtgatgtggaggatgaggtggaggatgagaggtatgatgaagaggaagaagcagaacgggatcgccttaatatcaaatcccctttctctctgtcgcatgttccgcatggaaagaaaaagttacatggggagtataaaaat

SEQ ID NO: 13167 - DNA, 2109 bp, synthetic construct
  misc_feature 1..2109: note = source = /note="Description of Artificial Sequence: Synthetic coding sequence"
  source 1..2109: mol_type = other DNA
atgctgaggggcagatccttgtccgtgacctccttgggaggtctgccccagtgggaggtggaggaactccctgttgaagagctgctcctctttgaagtggcatgggaggtgactaataaggtggggggaatctacacggtgatccagaccaaggccaagaccactgcagatgaatggggagagaactacttcttgattggtccgtacttcgaacataacatgaaaactcaggtggaacagtgcgagcctgtcaacgacgccgtgcggcgggccgtggatgccatgaacaagcacggctgtcaggtgcactttggacgctggctgatcgagggaagcccatacgtggttctgttcgacatcggatacagcgcttggaacctggatcgttggaaaggtgatctgtgggaagcctgttcagtgggaattccctaccatgaccgcgaggccaatgacatgctgatattcggatcgctgaccgcttggttcttgaaggaggtcactgaccacgcagatggaaagtatgtggtggcccagtttcatgaatggcaggcgggaataggactcatcctctcgagagcacgcaaactgccgattgcgactattttcaccactcacgcgacgctgctgggcaggtacctgtgcgcggccaatatcgacttttacaatcacctcgacaagttcaacatcgacaaagaagccggggaaagacagatctaccatcgctactgcatggagagagcgtcggtgcactgcgcgcacgtgttcactaccgtcagcgagatcaccgcgattgaggcagaacatatgctcaagcggaagccggacgtcgttactccgaatggcctcaacgtgaagaagttcagcgccgtgcacgagttccagaacctgcacgcaatgtacaaggccaggattcaagacttcgtgcgggggcacttctatggacacctggatttcgacctcgagaaaactctcttcctgttcatcgcgggaaggtatgagttttcgaataagggggcagatatctttctggaatccttgtcgcggctcaatttccttctgaggatgcataagtccgacatcaccgtgatggtgttctttatcatgcctgccaagaccaataacttcaacgtggagactctgaaagggcaagctgtcagaaaacaactgtgggatgtcgcacactctgtcaaagaaaagttcggaaagaagctgtacgacgcactgcttaggggcgagatccctgatctcaatgacatcctggaccgggacgatctgacgatcatgaagcgcgccatcttctccactcagaggcaaagcctgccgcccgtcactacgcataacatgatcgacgattccaccgatccgatcctctcaaccatcagaagaatcggcctcttcaataacaggactgaccgcgttaaagtgatcctgcacccggaatttctctcctccacttcccctctgctcccaatggattatgaggaattcgtgcggggctgccacctcggagtatttccaagctactacgagccgtgggggtacaccccagcagaatgtaccgtgatgggaatcccctcggtcaccaccaacctgagcggattcggatgcttcatgcaagagcatgtggcggatcctaccgcctacggcatctacattgtggaccggcggttcagatcgcctgacgattcatgtaaccagctgaccaagttcctgtacggcttctgtaagcagtccagaaggcagcgcatcatccagcgaaatcggactgagcggttgagcgacctgcttgactggagatacctgggaagatactatcaacacgcgcggcaccttactctgtccagggccttccccgacaaattccacgtagagcttacctcgccacccactaccgagggtttcaaatacccaaggccgagctcagtgccaccgtcgccgtcgggctctcaggcttccagcccgcaatcaagcgacgtcgaggacgaggtcgaggacgaacgctacgatgaggaagaggaggccgaacgcgatcgcctgaacatcaaatccccgttttcgctgtcgcatgtgccccatggcaaaaagaagctgcacggcgagtataagaac

SEQ ID NO: 13168 - DNA, 2109 bp, synthetic construct
  misc_feature 1..2109: note = source = /note="Description of Artificial Sequence: Synthetic coding sequence"
  source 1..2109: mol_type = other DNA
atgctccgaggtcgcagcctttcagtgacttcgcttggcggtttgccacagtgggaggtggaggaactgcctgtcgaagagctcctcttgttcgaggtggcgtgggaagtgactaacaaagtcggaggaatctacactgtcatccaaaccaaagctaagactaccgccgatgaatggggagaaaactacttcctgatcggaccgtacttcgaacacaatatgaaaactcaggtcgaacagtgcgaaccggttaacgatgccgtgagaagagcggtggacgccatgaacaagcatggttgtcaggtgcacttcggccgctggctgatcgaaggatccccttacgtcgtacttttcgacatcggatatagcgcctggaatcttgataggtggaagggtgacctgtgggaggcgtgctcggtgggcattccataccacgacagagaggccaacgacatgctgatctttggctcactgaccgcttggttcctgaaggaggtcaccgaccacgctgatggaaagtacgtggtggcccagttccacgaatggcaggccggaatcgggctcatactgtccagggctcgcaagctgccaattgccactatcttcaccacccatgcgaccctgctcgggagatacctgtgcgccgctaacattgacttctataaccacctcgataaattcaatatcgataaagaagcgggagagcggcagatctaccatcggtactgcatggagcgcgcgagcgtgcactgtgcacatgtgttcaccactgtgtcagagatcactgcaatcgaagcggagcacatgctcaagcgcaagccagacgtggtcactcctaacggactcaatgtgaagaaattctcagctgtgcacgaattccaaaatctccacgcaatgtacaaggcacggattcaagacttcgtccgtggacatttttacggccatctggactttgatctcgaaaaaacgctgttcctgtttatcgcagggcggtacgagttcagcaataagggcgccgacatctttctggaatcattgtcgcggctcaacttccttctgcggatgcacaagtcggacatcaccgtgatggtcttttttatcatgccggccaaaaccaacaacttcaatgtggagactctcaagggccaagcagtgcgcaagcagttgtgggacgttgcacacagcgtgaaagaaaagtttggaaagaagctctacgacgcactccttcgcggcgaaatccctgacctcaacgatattctggacagggacgacctgactatcatgaagagagcgatcttttcaactcagagacaaagcctgccgcccgtcactacgcacaacatgatcgatgactcgactgatccgatcctgtccaccatccggcgcatcggactgttcaacaacaggaccgatagagtgaaggtgatcctgcatcccgaatttctgagctcgacctcacctttgctgccaatggactacgaggaatttgttcgcggatgtcatttgggagtgttcccatcatactacgaaccttgggggtacacccccgccgaatgcacggtcatgggcatcccgtccgtgaccacgaacctctccggtttcgggtgcttcatgcaggagcacgtggccgatccaactgcctacggcatttacatcgtcgaccgccgcttccggtccccggacgattcctgcaatcagctgaccaagttcctgtacggattctgcaagcaaagtcgacggcagagaatcattcagcggaatagaaccgaacggctctcggacttgctggattggcgctacctgggaaggtactaccaacacgctcgacacctgactctgtcgcgcgccttcccagataaattccatgtggaacttaccagccctccgaccacggaggggttcaaatacccgcggccctcgagcgtcccgccgtctccgagcggatcccaggcgtcgtcgccacaatcctccgatgtggaggacgaagttgaggatgaacgctacgacgaggaagaggaggccgagcgcgaccggctgaatatcaagtcgccgttctctctgtcccatgtgccgcatggtaagaagaagctccacggagaatataagaac

SEQ ID NO: 13169 - DNA, 2109 bp, synthetic construct
  misc_feature 1..2109: note = source = /note="Description of Artificial Sequence: Synthetic coding sequence"
  source 1..2109: mol_type = other DNA
atgttgagaggacggtctcttagtgtgacatccctgggtggtctgccgcagtgggaggtggaagagttgcccgttgaggagctgctgctgttcgaggttgcttgggaggttacaaataaagtcggcggtatctacaccgttatccagacaaaagctaagactaccgctgacgagtggggcgagaactattttcttatcggaccctacttcgagcacaacatgaagacccaggtcgaacagtgtgagcccgtaaacgatgcggtgcgacgggctgtggacgcgatgaacaaacatggttgccaggtgcactttggaaggtggctcatcgaagggtccccgtatgttgtgttgttcgacattgggtacagtgcatggaatttggacaggtggaagggcgacctttgggaagcttgcagtgtaggtatcccctaccacgacagggaggcaaatgacatgcttatcttcggaagtctcaccgcttggtttctgaaagaggtaacagatcacgcggacggcaaatatgtggtagcgcagttccacgaatggcaggccggaattggtctcatcttgagccgcgccagaaagcttcccatagctaccatcttcacaacgcatgctactctgcttgggcgctatctctgcgcagcaaacatagacttctataaccacctggataaatttaacattgacaaggaagcgggggagcgccagatctatcataggtactgcatggagcgcgcctccgtgcactgcgcccatgtcttcaccaccgtgtctgagatcaccgcaatcgaagctgaacacatgctcaaaaggaaacccgatgtcgttacccctaacggactgaatgtcaaaaaatttagtgccgtgcacgaattccagaacctgcacgctatgtataaagctagaatccaggacttcgtgaggggccacttttatggacatttggacttcgatctggagaaaacactgtttctgtttattgccggtagatatgaattctctaacaaaggcgctgacatctttctcgaatctctctcacgactcaattttctcctgcgcatgcataaaagcgatattactgttatggtgttcttcataatgcccgctaaaacaaataacttcaacgttgaaactctcaaagggcaggcagtgcggaaacagttgtgggacgttgcccactcagtgaaagagaagttcgggaagaaactctacgacgccttgctgaggggtgagattcctgacctgaacgacatcttggatcgcgacgatctgacaattatgaagcgcgctatcttctcaactcagcggcagtccctcccgcccgtgacaacccataacatgatcgatgactcaactgatcctatcttgtccacaatacggcgaatcggattgttcaacaatcggactgatcgagtgaaagtcatcctgcacccagagtttttgtcttccaccagtcctctcctgccaatggactacgaggaatttgtgaggggatgccacctgggagtctttccaagttactatgagccgtggggttatactccagccgaatgtactgtcatgggtatcccctcagtgacaactaacctgtcaggctttggatgcttcatgcaggagcatgtggctgaccctactgcttacggcatctatattgtggaccgcagattcagatcacccgatgatagttgcaatcagctgacgaagttcctgtacggattttgcaaacagtcacggcggcagcggatcattcagcggaataggactgagcgcctgagtgatctcttggattggaggtatctgggcagatactaccagcatgcccgccacctcacactttctagagcattccccgataagttccacgtggagctgactagtccgcccacaactgaaggatttaaataccctcggccttctagcgttcctcctagcccgtccggcagccaggcctctagcccacagagttccgacgttgaggacgaagtggaggacgagcggtacgacgaggaggaagaggctgagagggacaggctgaatataaagagcccttttagcctgagccacgtgcctcacggaaagaagaagctgcacggtgagtacaagaat

SEQ ID NO: 13170 - DNA, 2109 bp, synthetic construct
  misc_feature 1..2109: note = source = /note="Description of Artificial Sequence: Synthetic coding sequence"
  source 1..2109: mol_type = other DNA
atgctacgcggccggtctctctccgtgacatcccttggtgggctgccccagtgggaagtcgaagagctgcctgtggaggaactactactctttgaggtggcctgggaggtgactaacaaggttggaggtatttatacggtgattcaaacaaaggctaagactacggccgatgagtggggtgaaaattactttctgatcggaccctattttgagcataacatgaagacgcaagtcgagcaatgcgagccggtgaacgacgccgtcagaagggcggttgacgcgatgaacaaacacggctgtcaggtgcacttcggccgttggcttatagagggaagcccatacgtcgtcctgtttgacataggctactcagcttggaatctggataggtggaagggtgacctctgggaagcttgcagtgtgggcatcccttaccacgacagggaggcaaacgatatgttaatttttggctctctaaccgcctggttcctgaaggaggtgactgatcatgcagatgggaaatacgtggtagcccagttccacgagtggcaggctggtatcggcctgatcctatctcgggctaggaaactgcccatcgcaaccatatttacaactcatgccactctgctaggccgttatctatgcgctgccaacattgatttctacaaccatttggataaatttaacattgataaagaggccggggagagacaaatctatcacagatactgtatggagagagcctctgtccactgcgcccatgtgttcaccaccgtgagcgagattaccgctatcgaagctgaacatatgctgaagcggaagcctgatgtcgtgaccccaaatggtctcaatgttaaaaagttctctgccgtgcacgagtttcagaatctgcacgccatgtacaaggctaggatacaggacttcgtgaggggacacttttacggccatcttgatttcgatcttgagaaaacactgttcctgttcatcgcggggaggtacgagtttagtaacaagggagccgacatctttctcgagtctcttagcagactgaacttcttactgagaatgcacaaaagcgacataaccgtcatggtgttttttattatgcctgccaagacgaataacttcaatgtggagactctgaaaggccaggctgttaggaaacaattatgggacgtggcacactccgtcaaagaaaagttcggaaaaaagctctatgacgccctgctgaggggggagattcccgaccttaacgatattcttgatcgggatgatttgaccattatgaaacgagcaattttcagcacacagcgccaaagcttgccgcctgtgacaactcacaacatgatcgacgactctactgaccctatcctgtccacaatccgtaggatcggcctgttcaacaaccgcacagatagggtgaaagtcatcctccatccagagttcctgtcttccacgtctccactgttgcctatggattacgaagagttcgttcgagggtgccacctcggtgtatttccatcttactatgaaccctggggttacacacctgctgaatgcaccgtaatggggatcccatccgtgaccaccaacctgtccggattcggctgctttatgcaggagcatgtagcggacccaactgcatacggaatttatatcgtggatcggaggttccggtccccggacgattcatgcaaccagctcacaaaatttttatacggattctgcaaacagagtcgtagacaacgcattatacagaggaacagaactgagcgcttgagcgatctgctggattggcgatatctgggccgttactaccagcacgctcgccaccttacactcagcagggcttttccagacaagttccacgtggaattgacttctcccccaacaaccgaaggtttcaaataccccaggccttcctcagtgcctcccagcccatctggctctcaagcttccagcccacaatcctccgatgtggaagacgaagtcgaagatgaaagatacgacgaagaggaagaggctgaaagagacagactgaacattaagtctcccttctccctgagccacgtcccccatgggaaaaagaagcttcacggcgagtataagaat

SEQ ID NO: 13171 - DNA, 2109 bp, synthetic construct
  misc_feature 1..2109: note = source = /note="Description of Artificial Sequence: Synthetic coding sequence"
  source 1..2109: mol_type = other DNA
atgctgcgcggacggtccctttctgtgacctctctgggggggttgccgcagtgggaagtcgaagaactgccagtggaggaactcctgcttttcgaagttgcctgggaggtgaccaacaaggtcggaggaatctacaccgtcattcaaaccaaagcaaagaccacagccgacgagtggggtgagaactatttcctgatcggaccttacttcgaacataacatgaaaacccaggttgagcaatgtgaaccggtcaacgatgctgtgcgccgggccgtggacgctatgaacaagcatggatgtcaagtccactttggacgatggttgatcgaggggtctccatacgtggttctctttgatatcggatatagcgcctggaatctcgaccgctggaagggcgacctttgggaggcctgctccgtgggcatcccctatcacgaccgcgaagcgaatgatatgctcatcttcgggagcctgaccgcatggtttctcaaggaagtcactgatcatgcagatggaaaatatgtagtggctcagtttcacgagtggcaggcaggaattggtttgatcctgtccagagctagaaagctgcccattgctaccatcttcactacacacgccacactcctgggacgctatctctgcgccgccaacattgacttctacaaccatctcgacaaatttaacatcgataaggaggctggtgaacgacagatttatcacagatattgcatggaacgggcgagtgttcactgcgctcatgtgtttactactgtgtcagagataactgcgatcgaagcggaacatatgcttaaaagaaaaccagacgtagtgactccgaacgggctgaatgtcaagaaattctctgcagtgcacgagttccagaacctgcacgccatgtacaaagctaggatccaagacttcgttaggggccacttctacggccatctggactttgacctcgagaagacgctctttctcttcatcgctgggcgctacgagtttagcaacaagggtgcggacatctttctggagtctctgagtagactcaacttcttgctgagaatgcacaagtccgacattactgtcatggtttttttcatcatgcccgcaaagacaaataatttcaatgtggagacactcaagggccaggcagtgaggaaacagctttgggatgtggctcactccgtgaaggagaaattcggtaagaaactctatgatgcccttctgagaggggagatccccgacctgaacgatatcctggaccgagatgacttgactatcatgaaacgcgcaatcttcagtacccaacgccagtctctcccaccagtgacaacgcacaatatgattgatgacagtaccgatcctatactttcaactatccggaggattggcctgtttaataacagaacagatagggtgaaagtaatactccatcccgaatttctgtcaagcacaagtcctcttctgccaatggactatgaagaatttgttagggggtgtcacctgggagtcttcccatcttactatgagccctggggttacacaccagctgagtgtactgtgatggggataccctcagtcacgacgaacctgtctggcttcggatgttttatgcaggagcatgtggcagacccaaccgcttacgggatttatatcgtggatagacgctttagaagcccggacgacagctgcaaccagctgacgaaattcttgtacggcttttgtaagcagagccggaggcagcgaataatccagcgcaaccggaccgagaggctgtcagacctgctggattggagatatctgggcaggtattatcagcacgcgcggcatctgacacttagcagggcctttcccgataagttccatgtggagttgacctctccgccgaccacagaaggctttaaatatccaaggccttcttctgtaccaccttctccaagcggtagccaagctagtagcccccagtcctctgacgtggaagatgaggtggaggatgagcggtatgacgaggaagaagaggccgaacgcgatagactcaatataaagtcaccgttctctctttctcacgtgccacacggaaagaaaaagttgcacggagagtataaaaac

SEQ ID NO: 13172 - DNA, 2109 bp, synthetic construct
  misc_feature 1..2109: note = source = /note="Description of Artificial Sequence: Synthetic coding sequence"
  source 1..2109: mol_type = other DNA
atgttgcggggccgaagtctgagtgtgactagcctggggggcctgcctcagtgggaagttgaggagctgcctgtcgaggagctccttcttttcgaagttgcctgggaggtgaccaacaaggttggtggaatatacaccgtgatacagactaaggcaaagacaacagcagacgaatggggtgagaattactttctgataggaccctactttgagcacaatatgaagacccaggtggaacagtgtgagccagtaaatgacgctgtgaggcgcgccgtggatgccatgaacaagcacggctgccaagtgcacttcggacggtggctgattgagggctccccttacgtcgtgttgttcgacataggctattcagcgtggaatctggatcgctggaagggagacctgtgggaagcctgcagtgtgggaattccctaccacgacagagaagcaaacgacatgctcatcttcgggagtttaacggcttggtttctgaaagaggtaactgatcacgcggatgggaaatacgtcgtggcccagttccacgagtggcaagccgggatagggctgattctgtcccgagcgcggaagctgcctatcgccacaatttttactacccatgccactctattaggccgctacctgtgtgcggctaatattgatttctataaccatctggataaattcaacattgataaagaagccggggaacgccagatttaccatcggtactgcatggaacgagcctccgtgcattgtgcacacgtgttcacgaccgtgagtgagattaccgcaatcgaggccgagcacatgctgaagaggaaacccgatgtggtgacacccaacggcctgaatgtgaagaagttcagtgcagtgcatgaatttcagaatctgcacgcaatgtacaaggcaaggatccaggatttcgtgcgaggacacttttatgggcacctggacttcgacttggagaaaacactgttcctgttcatcgctggtaggtacgaattctcgaacaagggcgccgatattttccttgaaagcctgagcaggctgaattttctccttagaatgcacaaatctgatatcacagtgatggtgttctttattatgcctgcaaagacaaataacttcaatgtcgagacactcaagggccaagctgtgcgaaagcaactctgggatgtcgctcactcagtgaaggagaagtttggcaaaaagctgtacgatgctctgttgaggggagagattcctgacctcaacgatatccttgacagagatgatctcacaataatgaaacgtgcgatctttagcacacagaggcagtccctgccacctgtcaccactcacaacatgattgacgattctaccgacccgatcctgtcgaccatccgtcggatcggcctgtttaataatcgcactgaccgcgtcaaggtgatcctgcaccccgagttcctgagttcgacaagtccccttctgccaatggactatgaagaatttgtgcggggctgccacttaggcgtctttccaagctattacgagccatgggggtacacccccgcagagtgcactgtaatgggcattccctcggtgaccactaacctctccgggttcggatgttttatgcaggagcatgttgctgatccaacagcttatggaatatacattgtggacagaaggtttagaagtcctgacgacagttgcaaccagctgaccaagtttctatatgggttctgcaagcaatccagacggcagaggattatacagcggaacaggactgagcggctcagcgatctgctggattggcgctacttgggcaggtactaccagcatgcaagacacctgacgctctcaagggcattccctgataagtttcacgtagaactgacgtcccctcccactactgaggggttcaagtatccacggcccagctccgtacctccatctcccagcggctctcaggctagttccccacagtcctctgacgtagaggatgaggtggaagacgaacggtacgacgaggaggaagaggccgaacgtgatagactgaacatcaagagcccattctctctgagccacgtcccacatggaaaaaaaaagctccatggagagtataaaaac

SEQ ID NO: 13173 - DNA, 2109 bp, synthetic construct
  misc_feature 1..2109: note = source = /note="Description of Artificial Sequence: Synthetic coding sequence"
  source 1..2109: mol_type = other DNA
atgctaaggggccgatcactgtccgtgaccagtctcggtggtcttccacagtgggaagtagaagaactacccgtggaagaattgctcctcttcgaagtggcttgggaggtgacgaacaaagtaggggggatctacactgttatacagacaaaggcaaagacaaccgccgatgagtggggtgagaactactttctgattggtccatattttgaacacaacatgaagacccaggtggaacagtgcgagccagtgaatgacgctgtgagaagggctgtggatgccatgaataaacacggatgtcaggtgcactttggtcgctggttgattgaggggtccccctacgtggttctgtttgacattgggtactcagcttggaatctggatcgatggaaaggagacctttgggaagcttgctcagtggggatcccctatcacgatcgagaagccaacgacatgctcatctttggttccttaacagcctggtttctgaaagaagttactgatcacgctgatgggaaatacgtggtggcccaatttcatgaatggcaggcaggcatcgggctgatactctctagagcgcgaaaactgccaattgcaacgatctttacgacacacgccacactgctcgggcgatatctgtgtgctgccaacatcgatttttataaccacctggataagttcaacatcgataaggaagccggggagcgacagatttaccacaggtactgcatggaaagagcaagcgtgcattgcgctcacgtttttaccaccgtcagcgaaataactgccatcgaggctgaacatatgctcaagaggaagccagatgtggtaaccccgaacgggctcaatgttaaaaaattctccgcagtgcacgagttccaaaacttacacgccatgtacaaagcgcgaatccaggacttcgtgaggggacacttttatgggcatctggatttcgatctggagaaaaccctgttcttatttattgccgggcgatatgagttcagtaataagggagccgacatcttccttgagtctctgagtaggttaaatttcctcctgaggatgcataaatctgacattacagttatggtgttcttcatcatgcctgctaagacaaacaactttaatgtcgaaacattgaaaggacaggccgtccgtaaacagctctgggacgtggcgcattcagtgaaggagaaatttgggaaaaaactgtacgatgctcttctacgaggggagataccggatctcaatgacatcttggatcgggatgatctcaccattatgaaaagggcgattttcagtacgcaaagacagtccctgcctccagtgaccacgcataatatgattgacgacagtactgatcccatcctaagtacaatccggagaatcggcctctttaataaccgaaccgatagggtgaaggtgatcttgcatcccgaattcctgagttctacctcccccttattgcccatggactacgaagaatttgttcgaggctgtcacttgggcgtgttcccgtcgtactacgaaccttggggctatactcctgctgagtgcactgtcatggggatcccttccgtaacaacaaatcttagtgggtttgggtgcttcatgcaggagcacgtcgcggatccaactgcctatggcatctacattgtcgataggcggttccggagccccgatgattcctgcaaccaactgaccaaatttctgtacgggttctgcaagcagtcaaggaggcaacggataatccagcgaaatcgaaccgagaggttgtcagacctgctggactggcggtaccttggcagatattatcaacacgcgcgtcatctcacactctctagagcatttcccgataaattccacgtcgagctgacttctccccccacaaccgaagggttcaagtacccccgcccatctagtgtcccccctagtcctagtggttcacaagccagctcgccacagtcctcggacgtagaggacgaggttgaggatgaaagatacgatgaagaggaagaggccgagagagatcgacttaatatcaagtcaccattcagtctatcccacgtccctcacgggaaaaagaaactgcatggggaatacaagaac

SEQ ID NO: 13174 - DNA, 2109 bp, synthetic construct
  misc_feature 1..2109: note = source = /note="Description of Artificial Sequence: Synthetic coding sequence"
  source 1..2109: mol_type = other DNA
atgttgagaggacggtccctgtccgtgacatcgcttggcgggcttcctcaatgggaggttgaagagcttccagtggaggaactgcttctcttcgaggtggcctgggaagtaaccaacaaagtcggcggcatttacacggtcatccagaccaaagcaaaaaccaccgcagatgagtggggtgagaattacttcctcatcggaccttatttcgaacataatatgaagacccaggtggaacagtgtgagcccgtcaacgacgcagttaggcgagccgtcgatgctatgaataagcatggatgtcaagtgcacttcggtcgctggctcatcgagggtagcccttacgtagtgctcttcgatattggctattcggcttggaaccttgataggtggaagggcgatctctgggaggcgtgttccgttggaattccgtaccacgatagagaagccaatgacatgctgatattcggcagcctgacagcttggtttttgaaggaggtaacggatcacgcagacgggaagtacgtggtcgcgcaatttcatgaatggcaggctggaattggccttatcctgagtagagccaggaaattacctattgcgaccatatttactacccacgctactctacttggtcgctacctatgcgcggcaaacattgatttctacaatcatctggacaaatttaatatagataaggaggcaggcgaacggcagatctaccaccggtattgtatggagagggctagcgtgcactgtgctcatgtgttcacaactgtttcggaaatcacagctatagaggccgaacacatgttgaaacgtaagcccgacgtggttacccccaacgggctcaatgtaaagaaattctccgccgtgcatgaattccaaaaccttcatgccatgtataaggccagaatccaagacttcgttagaggacacttctacggccacctcgacttcgacttggagaagacgctgttcttgttcatcgcagggagatacgagttttcaaataagggcgcagatatattccttgaaagcctgagccggctgaacttcctgttacggatgcataagtccgacattaccgtgatggttttctttatcatgcctgctaaaaccaacaatttcaatgtcgaaaccctcaaaggccaggcggttaggaaacaactgtgggacgtagcacattcagtaaaggagaagtttggcaagaaattgtatgatgccttgctgcgaggagagattcctgacttgaacgatatactggatcgcgatgacttgacaatcatgaaaagagcgatctttagcactcagcgtcaatccctcccacccgtaaccacacataacatgatcgatgattctactgatcccatcctgtctactattcgcaggatcggcctgtttaacaaccgtactgatagagttaaagtgatcctccatcccgaatttctaagctcaacaagccctctactgcccatggactacgaggaatttgtgaggggatgccacctcggcgttttcccaagctattacgagccctgggggtatacgcccgccgaatgcactgtcatgggcattccgagcgtcacaaccaacttgtccggttttggatgcttcatgcaagagcacgtcgcagatccgacggcatacgggatttatattgttgataggcgcttccgcagccccgatgacagctgtaaccagctcaccaaattcctttatggcttctgcaaacagtcacggagacagcgaataatacagcgcaatagaacagagagactcagcgacctgttggattggcgttatttgggcagatactatcaacacgctcgccacctgaccctgtcacgagccttccctgataaattccatgtcgagcttacttccccacccacaacagaaggctttaagtacccacgccctagttctgtgcccccttccccttcaggcagccaggctagctccccccaatcctccgatgtggaggatgaagttgaggatgaacgctatgatgaggaggaggaagccgagcgtgaccgactcaacatcaagtctcctttcagcctttcacacgtgccgcacggcaagaagaaactgcatggggagtataagaac

SEQ ID NO: 13175 - DNA, 2109 bp, synthetic construct
  misc_feature 1..2109: note = source = /note="Description of Artificial Sequence: Synthetic coding sequence"
  source 1..2109: mol_type = other DNA
atgttgcgaggaaggtcattgtcagtgaccagcctgggggggctcccccagtgggaagtcgaggagctgcctgtcgaagagctccttctattcgaggtggcttgggaggttactaacaaagtagggggaatttacacagttatacagacaaaggccaagaccacagccgatgaatggggggagaactattttctgataggcccctactttgagcacaatatgaagacacaagtcgagcagtgtgagcccgttaatgacgcggtcagacgcgctgtagatgcgatgaacaagcacgggtgtcaggtacactttggacgatggctgattgaagggtctccttatgtcgtcctcttcgatatcggttacagcgcttggaacctcgatagatggaaaggcgacctctgggaggcttgttctgtaggtatcccttaccatgatcgtgaagctaatgatatgttgatttttggctcactgacggcgtggttccttaaggaggttaccgatcatgctgacggaaagtatgtggtggcccagtttcacgaatggcaggccggtattggcctaatcctgtctagggctcggaaactccccatcgcaacaatatttactacacacgcgaccttgctagggcgctatctgtgtgctgcgaacattgatttctacaaccacttagataagttcaatatagacaaggaggcaggagaacggcagatttatcatcgctactgcatggaacgagcttcagtccattgcgcccacgttttcacaacagtttcagagatcacagctattgaggcggaacacatgctgaaacgaaaacctgatgtagtaacccccaatggattgaatgtcaagaagttctctgctgttcacgagttccagaacctgcacgcgatgtacaaggcacggatccaggattttgtccgcggtcacttttacggccatcttgatttcgaccttgaaaagaccctgttcttgtttattgcaggacgatacgagttttctaacaaaggggctgacatcttcctcgagtctcttagtcgacttaactttctcctcagaatgcacaagtcagatatcacagtcatggtgtttttcataatgcctgctaagaccaacaacttcaacgtcgagaccttaaagggacaagcggtccgtaaacaactgtgggacgttgcgcactccgtgaaagaaaaatttgggaagaagctctatgatgccttgctgcgcggggagatccctgaccttaatgacattctagatagagacgacctgactattatgaagagagcaatcttcagtacccaacgccagtccctgccgccagtgaccacacataatatgattgatgattccaccgatcccatcctgtccactatcagaaggatcggcctattcaacaatcgtaccgacagggtgaaggtcatcctgcatcccgagttcctgtctagtactagccccctcttgcctatggactacgaagagttcgttcggggttgccatctgggcgtgttccccagctattatgagccctggggctatacacccgctgagtgtacggtcatgggtatcccctccgtaactacaaatcttagtggattcggttgtttcatgcaggagcacgtcgcagacccaactgcctatggcatctacattgtcgatcggcgctttaggagccctgacgactcttgtaaccagttgacaaagttcctgtacggcttttgtaagcagagtagacgccagcggataatccagagaaataggaccgaaagactctccgatctgttagactggagatacctgggcaggtattaccagcacgcccgacacctaacactgtcacgcgcgttcccggataaattccacgtggagttaactagtccccctaccaccgaagggttcaaatatccgagaccgtcgtcagtgccgcccagtccctccggcagccaggcgtcctctccacagtccagtgatgtcgaagatgaggtggaggacgagaggtacgatgaggaggaggaagcagagcgtgaccggcttaacatcaagagcccattcagtttatcccacgtgcctcacgggaaaaagaagctgcatggcgaatacaagaac

SEQ ID NO: 13176 - DNA, 2109 bp, synthetic construct
  misc_feature 1..2109: note = source = /note="Description of Artificial Sequence: Synthetic coding sequence"
  source 1..2109: mol_type = other DNA
atgcttagagggcggagcttgtcagtcacctctctcggaggtctgcctcagtgggaagttgaagaactccctgtggaagaactgttgctgtttgaggtagcatgggaggttacaaataaagtgggcgggatttacacagtaattcagaccaaagctaagactaccgctgacgaatggggagaaaactacttccttatcggaccgtattttgagcataacatgaagacacaggtcgagcagtgtgagcccgtcaacgacgcagtgcggcgagcagtggacgccatgaataaacacggatgtcaggtccactttggacgttggcttattgagggcagcccatacgtagtcctctttgacatcggttactcggcgtggaatttagatcgctggaaaggagacctttgggaggcttgttctgtgggcatcccataccacgatcgggaagccaacgatatgttgatcttcggctctctcacagcttggttcctgaaagaagtcacagatcatgcagatggaaaatatgtcgtagcccaattccatgaatggcaggccggaatcggactaatcctctctcgcgctcgaaagctcccgatcgccaccatcttcaccacccacgccaccctgctgggccgttatttgtgcgccgccaatatcgatttctataaccacttagataaatttaatatcgacaaggaggccggggagcgccagatttaccatcgctattgcatggagcgggcctccgttcactgcgcacatgtcttcaccaccgtaagtgaaattacagccatcgaggctgaacatatgctgaaaagaaaacccgacgtggtgactcccaacggcctaaacgttaagaagttcagcgctgtacacgagttccagaacctgcatgctatgtacaaggcgcgcatacaggatttcgtccgaggacatttctatggccacctggactttgatctagagaagacattattccttttcatagccggacggtacgagttctccaacaagggagccgatatctttttggaatccctatccagactgaactttctactgcgtatgcataagagcgatatcacagtcatggtctttttcatcatgcctgccaaaaccaacaacttcaacgttgagactcttaaggggcaggccgtgcgcaagcaattgtgggatgtggctcacagcgtaaaagaaaagttcggaaagaagctctacgacgcgctactgcgcggggagatacctgacctgaatgatatcttagaccgcgacgacctgacaatcatgaaacgggcgattttctctacacagcgccagagtcttcctcccgtaacaacccacaacatgattgacgatagcaccgaccctatcctcagcactattaggcggatagggttgtttaataataggactgacagagtcaaggtgatcctgcacccagaatttcttagctccacctctcccttgctcccaatggactacgaagaattcgtacggggatgccatttgggggtatttccatcatattacgagccatggggctacactcctgcagagtgcacagtgatggggatcccgtctgtgacgaccaacctgtctggcttcggatgcttcatgcaggagcatgtcgcggatcccaccgcatacggaatttacatcgtggaccgccggtttcgttccccggacgacagttgcaaccagctgaccaagtttctctatggcttttgcaagcagtcccgtcgtcagagaatcatccagcgaaatagaacggagcgcctctctgatctgcttgattggcggtacctcggtcgatactaccagcacgccagacatctcactctgtccagagccttcccagacaaattccacgtggaactgactagcccacctacaaccgaggggttcaaatatccacgtcccagtagtgtccctccatctcctagtggaagccaggcctccagtccacagtcttcagacgtcgaggacgaagttgaagatgagagatacgacgaagaagaggaagctgagcgggatcggcttaacatcaagtcccccttctctctgtcccacgttccacacggaaagaagaaattacacggcgaatacaagaat

SEQ ID NO: 13177 - DNA, 2109 bp, synthetic construct
  misc_feature 1..2109: note = source = /note="Description of Artificial Sequence: Synthetic coding sequence"
  source 1..2109: mol_type = other DNA
atgttgcgtggaagaagtctctcggtgacatctctgggaggcctgccgcaatgggaagtagaggaacttccagttgaggaattgctattattcgaagtcgcttgggaagtcacaaataaagttggaggaatatatacagtaatccagacgaaagcaaagacaaccgcagatgagtggggagagaactatttcttgatcggtccttattttgaacataatatgaaaacgcaagttgagcaatgtgagcccgtcaatgatgctgtgcggcgcgctgtcgatgcaatgaataagcatggatgtcaagttcattttggccgttggctaatcgagggttccccgtatgtcgtcctattcgatattggatactctgcttggaatttggaccgctggaagggagatttgtgggaggcatgttctgttggcatcccatatcatgacagagaggcaaatgatatgctaatcttcggatccttgaccgcgtggtttttaaaggaagtgactgatcatgcagacggaaagtatgtggtcgctcaattccatgaatggcaagcggggatcgggttaatcctgtcgcgagcaaggaagttgccgatcgcaacaatcttcacaacccacgctactttgttgggaagatatctttgcgctgccaacatagatttttataatcacctggataaattcaacattgataaagaagcaggagagcgacagatttatcatcgttattgtatggagagagcttctgttcattgtgcacacgttttcacaaccgtgagcgaaatcaccgcaatagaggctgaacacatgttgaaaagaaaaccagatgtagttacaccgaacggattaaacgtcaagaaattctcggctgttcatgaattccagaatcttcatgccatgtataaggctagaatccaagacttcgttagaggtcatttctatggacatttggatttcgatttggagaaaacactgttcttgtttattgctggtcgatatgaattctcaaacaagggggctgatatttttcttgaatcactatcgagactgaatttcctactgcgaatgcataagagtgacattacggtgatggtgttttttattatgccagcaaaaactaataatttcaatgttgaaacattgaagggccaagcagttcgtaagcaattgtgggacgtcgcgcattcggtgaaggaaaaattcggaaaaaaactttacgatgctcttctccgtggtgaaataccagacctcaatgatattctcgatcgcgatgatctgacgattatgaaacgggcaattttttctacgcaaagacaatcactgccaccggttactacacataatatgattgatgattcaacagacccaatacttagtactatacgacgtattggactctttaataatcggacagatagggtaaaggttattctacaccctgagttcctgtcatcgacatctcctctactgccaatggattacgaagagtttgttagaggttgccatcttggggttttcccttcctattatgagccatggggatatacgccggccgaatgtaccgttatgggtatcccgtcagttaccacaaacctcagtggtttcggatgtttcatgcaagaacacgtggctgaccctacggcatacggtatttacatagtggatcgaaggtttcgatctccagacgattcctgcaatcagttgaccaaatttttgtatggattctgtaaacagtcaagacgccaacggattatccagcggaaccgaaccgaaagactttctgatttgttggattggaggtatctgggaagatactatcaacatgcgcgtcatttaactctttcaagagctttcccagacaaattccatgttgaattaacgtcgccgccaactacagaaggcttcaaatatcctcgcccaagttcagtgccaccatctccgtcaggatcccaagcatcttcaccacaatcttctgatgttgaagatgaggttgaagatgaacgatacgatgaggaagaggaagctgaaagagatcgtctgaatataaaaagccccttctcgctctcacatgttccgcatggaaaaaaaaagctccacggggagtacaaaaac

SEQ ID NO: 13178 - DNA, 2109 bp, synthetic construct
  misc_feature 1..2109: note = source = /note="Description of Artificial Sequence: Synthetic coding sequence"
  source 1..2109: mol_type = other DNA
atgctccgtgggagaagtctgtccgtgacgtcattgggagggctcccccagtgggaagttgaagaactccccgtggaggagcttctgttgtttgaagttgcttgggaggttaccaataaagtgggcggaatctacacggtcatacagacaaaggcgaagacaactgctgatgaatggggagagaattattttctcatcgggccctactttgagcataacatgaaaacccaggtggagcaatgtgagccggttaacgacgccgtaaggcgggctgtggatgcaatgaacaagcacgggtgccaagtgcatttcggccgctggctgatcgaaggctccccctacgttgtgctgttcgacatcgggtactccgcatggaacctggatcgctggaagggcgacttatgggaggcttgctccgtaggcatcccctatcacgaccgcgaggctaatgatatgcttatctttggttctttgaccgcttggtttctcaaagaagtgaccgatcacgccgacgggaagtacgtggtagcccagttccacgaatggcaggctggcataggcctcattctgtctagagcacgaaagttgcctattgccacaatattcacaactcacgccacattactgggacgctacctttgcgctgcaaatattgacttttacaatcacctcgacaagttcaacatcgataaggaagccggagagcggcagatctaccatcgctactgtatggaaagggcctctgtgcattgcgcccacgtctttaccacagtcagtgaaataacagctatcgaagcggaacacatgctaaagcgcaaaccagacgtggttactccaaatggcctcaatgtgaaaaagttcagcgctgtgcatgagtttcaaaacctgcatgccatgtacaaggccagaattcaggactttgtacgaggccacttttacggacatcttgacttcgacctcgagaagaccctgtttctgttcatcgcaggacggtacgagttcagtaataagggggctgatatttttcttgagtcactcagcaggctcaacttcttgttgaggatgcataagagcgacatcacagtcatggtgtttttcattatgcccgctaaaacgaataattttaatgtggagacactgaagggccaggctgtccgtaagcagctgtgggatgttgcccactccgtcaaggaaaaatttggaaagaaactgtatgacgccctgcttcgcggggaaattccggatctgaacgacattcttgaccgagacgatcttacaattatgaaaagggccattttttccacgcagcgccagtcgctgccacctgtgacaacccacaatatgattgatgacagcactgacccgatactatccaccatccgcaggattggccttttcaacaaccgcaccgatcgggtgaaggtgatcctgcatcctgagttcttaagctctacatccccactgctccccatggattatgaagagttcgtacgcggatgtcacctaggtgtatttccaagttactatgaaccatggggatacactccagccgagtgcactgttatgggtattccgtccgtgaccacgaatctctcggggttcggctgtttcatgcaggaacatgttgccgacccaaccgcatatgggatctatatcgtggatcggcgcttcaggtcgcctgacgattcctgtaatcagttaacaaagtttctgtacggattttgtaaacagagtcgacggcagcgtatcattcagagaaaccgcactgagcgtttgtctgaccttttggattggcggtatctgggcagatattatcagcatgctcggcacttgaccctctctcgtgcttttcccgacaagttccatgtcgagctgacatcacctcctactacagaggggttcaagtatccgaggcctagtagcgtgcctccatcccccagtggatcccaggcaagcagtccgcagtcgtccgatgtggaagacgaggtggaggacgaaagatatgatgaggaagaggaggctgaacgtgaccggttgaacataaaatcaccatttagcctgtcacatgtgcctcatggtaagaagaaattacacggagagtataaaaat

SEQ ID NO: 13179 - DNA, 2109 bp, synthetic construct
  misc_feature 1..2109: note = source = /note="Description of Artificial Sequence: Synthetic coding sequence"
  source 1..2109: mol_type = other DNA
atgctccgggggcgctctctttcggtgactagccttggcggactcccacagtgggaagtggaggaacttccagtcgaagaactgctgttgttcgaagtggcttgggaggtgactaacaaggtggggggaatctacactgtgattcagaccaaggcaaagaccaccgcggacgaatggggtgaaaactacttcttgatcggcccatactttgagcataacatgaaaactcaggtggagcagtgcgagccggtgaacgacgcggttagaagagcggtcgacgccatgaataaacatggttgtcaggtccacttcggccggtggctgatcgaaggatctccgtatgtcgtgctgttcgacataggatacagcgcctggaacctcgatcgctggaagggcgatctgtgggaggcctgctcagtgggcatcccctaccatgaccgggaggcaaatgacatgctgatttttggctctctcacggcatggttcctgaaggaggttaccgaccatgccgacggcaaatacgtggtggcacagttccatgaatggcaagcaggcatcggattgattctgagtagagcccgcaaactgccgatcgcgaccattttcaccactcacgcgacccttcttggacggtatctgtgtgctgctaatatcgacttctacaaccatttggataagttcaatattgacaaagaagccggagagcgccagatctaccacagatactgcatggaaagggctagcgtgcattgcgcacacgtgttcactaccgtgtccgaaatcacggccatcgaagctgaacatatgctgaagaggaagcccgatgttgtgactcctaatggcctgaacgttaagaagttttcggcggtgcacgaattccagaacctgcatgcgatgtacaaagccagaatccaggacttcgtgagaggccacttctacgggcatctcgacttcgacctcgaaaagactctttttcttttcatcgctggccgctacgagttctctaacaaaggcgccgatatctttttggaaagtctctcccgcctgaacttcctgctgaggatgcacaagagcgacatcaccgtcatggtgttcttcatcatgccggcaaagaccaacaatttcaatgtcgaaactctgaaaggtcaggcggtgagaaagcagctgtgggatgtggcacactccgtgaaggagaaattcggaaagaagctctacgacgcacttctgcggggggaaataccggatctcaatgatatcctggaccgtgacgatctgaccatcatgaagcgcgcgatcttttcgacccagagacagtcactccccccggttaccacccataacatgattgacgactccactgacccgattctgagcactattagacgcattggcctctttaacaatcgcaccgatcgggtcaaggtgatcctgcaccctgagttcctttcatccaccagcccgttgctgccgatggattacgaagaattcgtcaggggttgccacctgggagtgttcccatcgtactacgagccctggggctacactcctgccgaatgtactgtgatgggcatcccttccgtgaccactaatctgagcggttttggttgcttcatgcaagaacacgtggctgacccaacggcttacggaatctatatcgtggatagacggttccgatcaccggatgacagctgcaaccagctcaccaagtttctgtacgggttttgtaagcaatcgcggcgccaaagaatcatccagcgtaaccggaccgagcggctctccgatctgctggactggcggtacctcggacgctactaccaacatgcccgccacctgacgctcagccgcgccttcccggataagttccacgtggagctgacgtccccgccaaccactgagggtttcaaatacccgaggccttcttcagtgccaccttccccgtcaggatcgcaagctagctcaccccaatcctccgacgtggaagatgaggtggaagatgaacgctatgacgaggaggaagaagctgaaagggatcggttgaacatcaaaagccccttttcactgtcgcacgtcccccacggaaaaaagaagttgcacggagagtacaagaat

SEQ ID NO: 13180 - DNA, 2109 bp, synthetic construct
  misc_feature 1..2109: note = source = /note="Description of Artificial Sequence: Synthetic coding sequence"
  source 1..2109: mol_type = other DNA
atgctccggggacgctccctgagcgtcacctcattgggaggactcccacagtgggaagtcgaagagctgccggtcgaagaactgcttctcttcgaggtggcctgggaagtcaccaataaggtcggaggcatctacacggtgatccaaactaaggccaagaccaccgcagacgagtggggagaaaactacttcctgatcggcccctactttgaacataacatgaaaacccaggtggagcagtgcgaaccggttaacgacgcagtgcgcagagcggtggatgctatgaacaagcatgggtgccaagtgcacttcggccgttggctgatcgaaggctcaccgtatgtggtcctctttgacattggatactccgcgtggaacctggatcggtggaagggagatctctgggaagcgtgctccgtgggaattccgtaccatgatcgggaggccaacgacatgctcatttttggaagcctgaccgcatggttcctcaaagaagtgaccgaccatgccgacggaaaatacgtggtcgctcagtttcacgaatggcaagccggtatcggcctgattttgtcgagggctcggaaattgccgatagcaaccatcttcaccacccacgcgactctgctgggacggtacctgtgcgccgccaacatcgacttctacaaccacctggataagttcaatatcgacaaggaggccggtgaacggcagatctaccaccgctattgcatggaacgcgcatcggtgcactgtgcacatgttttcaccactgtgtcagagatcaccgcgattgaggctgagcacatgctcaagcgcaagccagacgtcgtgactccgaatggactgaacgtgaagaagttcagcgcagtgcacgagttccagaacttgcacgcaatgtataaggcccggatccaagatttcgtgagaggacatttctacggacacttggatttcgacctcgagaaaacgctgttcctgtttatcgcgggccggtacgaattttcgaataaaggggccgatatcttcctcgaatccctgtcccggctgaacttcctccttcggatgcacaagtcagatatcaccgtgatggtgttctttatcatgccggccaagactaacaatttcaacgtcgagactctgaagggacaagcggtgcggaagcagctttgggacgtggcgcactccgtgaaggaaaagttcggaaagaagctgtacgatgctctcctccggggagaaatccccgatctcaacgacatccttgatcgcgacgacctgaccatcatgaagcgcgcgatcttctcgacccagcggcaaagcctcccaccggtgactacccataacatgatcgacgactccaccgacccgatcctgtcaaccatcaggaggatcggcctgttcaacaaccggaccgaccgcgtgaaagtgatcctgcatccggaattcctgagctccacctcgccgcttctgccgatggattacgaggagttcgtcagggggtgccacttgggggtgttcccatcctactacgagccatggggatacaccccggcagagtgcaccgtgatgggcattccgtccgtgactactaacctgtccggattcggctgtttcatgcaggagcacgtggccgaccctaccgcgtacggaatttacatcgtcgaccgccgcttccggagccctgatgactcgtgcaatcagttgactaagttcctgtacggcttctgtaaacaaagccgcaggcagcgcataatccagagaaaccggactgaaagactctcagacctcctggattggcgctacttgggcagatactatcagcacgccagacacttgactctcagtagggccttcccggacaagttccacgtggagttgacgtcgccgcctaccaccgagggtttcaagtacccacgcccaagctcggtccccccaagcccatcgggatcccaagcatcgtccccacagtccagcgatgtggaggacgaggttgaggacgaacgctacgacgaggaggaagaagcggagcgggaccgcctcaacatcaagagccccttttccctttcccacgtgccgcacgggaagaagaagctgcacggagaatacaaaaac

SEQ ID NO: 13181 - DNA, 2109 bp, synthetic construct
  misc_feature 1..2109: note = source = /note="Description of Artificial Sequence: Synthetic coding sequence"
  source 1..2109: mol_type = other DNA
atgctcagggggcgatcgctttcagtgacgtcgcttggaggacttcctcagtgggaggtggaggaactgcctgtcgaggaactgcttctttttgaagtggcatgggaagtgaccaacaaagtgggcggaatctacaccgtcattcagactaaggccaagactaccgcggatgaatggggtgaaaactattttcttataggcccttactttgagcataacatgaaaacccaagtcgaacagtgcgaacctgtgaacgatgcagtgagacgtgccgtggacgcaatgaataaacacgggtgccaggtgcatttcggacgctggctgatcgagggatccccctacgtggtcctcttcgatatcggctattccgcatggaaccttgatagatggaaaggagacttgtgggaagcatgctccgtgggcattccataccatgatcgggaagcaaacgacatgctgatctttgggtccctcacggcgtggttccttaaagaggtgacggaccatgcagacggaaaatacgttgtggcacagtttcatgaatggcaagcgggaattggtcttattctgtcccgcgcaagaaagctgcctattgcgaccatctttactactcatgcaacccttctcggtaggtacctgtgcgcagccaatattgatttctacaatcacctcgataagtttaacatagataaagaagcaggagaacggcagatataccatcgttactgcatggaaagagcaagcgtgcactgtgcacatgtgtttaccactgtgagcgaaattacggcaatcgaagcagaacatatgcttaaaagaaaacctgacgtggtcaccccaaacggcctgaatgtgaagaagttttccgctgtgcatgaatttcagaaccttcatgctatgtacaaggcacggatccaggactttgtgcgcggacatttctacggtcatttggattttgacctggaaaagactcttttcctgtttattgcagggcgatacgaattcagcaataaaggtgcggatatctttttggaatcgctttcacgccttaactttttgctccggatgcacaagagcgatatcactgtcatggtgttcttcataatgcccgcaaagacgaacaactttaacgtggagactctcaagggtcaggcagtgcgcaagcaactgtgggacgtggcccattccgtgaaggagaagtttggaaagaagctgtacgatgctctgctccgcggagagatccctgacctgaacgatattctggatcgggatgatctgaccataatgaagagggcaatattcagcactcaaagacaatcgctgccccccgtcaccactcataacatgatcgatgattccaccgatcccattctgtccaccatcaggagaatcggtctgtttaacaatagaactgacagagttaaggtgatactgcatcctgaatttctttcatcgacgtccccgctgttgccaatggattacgaagaatttgtgaggggctgtcatcttggcgtttttccatcctactacgagccatgggggtacaccccagcagagtgcactgtgatgggaatcccctccgtgaccactaatctctccggttttggctgtttcatgcaggaacatgtggcagaccctaccgcatacgggatctatattgtcgacagacgcttccgcagcccagacgatagctgcaaccaacttactaagtttctgtacggcttctgtaaacaatcgcggaggcaacgaatcatccagagaaacagaaccgaacgattgtcggatcttctcgactggagataccttggaagatactaccaacatgcacggcatctcacgctgtcgcgggccttccctgacaaatttcacgtcgaacttacgtccccacctaccactgaaggttttaagtacccacggccttcctctgtgcccccatctcccagcggctcgcaggcgtcctccccgcaatcctcggatgtggaagatgaagtggaggacgaacgttatgacgaggaggaagaagccgaaagagatagacttaacattaagtcccctttctcactgtcccatgtcccccacggtaagaagaagctccatggagagtacaaaaac

SEQ ID NO: 13182 - DNA, 2109 bp, synthetic construct
  misc_feature 1..2109: note = source = /note="Description of Artificial Sequence: Synthetic coding sequence"
  source 1..2109: mol_type = other DNA
atgttaagaggtaggagcctctctgtgacaagtctggggggccttcctcagtgggaagtggaggaactccctgtggaggagttgctgttgttcgaggttgcatgggaagtgacaaacaaggtgggtggcatatacaccgttattcagacgaaagccaagacaaccgctgatgaatggggggagaattattttctgattggcccttactttgagcacaacatgaaaacccaagtggaacagtgcgaacctgtgaacgacgcagtgcgtcgggcagtcgacgccatgaacaagcacgggtgccaggtccactttggacgctggttgatcgaggggagtccatacgtagtcctcttcgacatcggctactcagcctggaacctcgatcggtggaagggagacttgtgggaagcatgtagcgtcggcatcccgtaccacgatagggaggccaatgatatgctaatctttgggtcgcttactgcatggttcctgaaagaggtaacagatcatgccgatggcaagtacgttgtggctcagtttcatgagtggcaggcaggcatcggactaatcctgagccgcgcccgtaagctacccatcgcaaccatcttcactacccacgccacattgctggggaggtacctctgcgccgcaaatatcgatttttacaatcatctggacaagtttaacatagacaaagaagccggagagcgacagatctaccacaggtattgcatggagagggcatctgtgcattgtgcccatgtgttcacaactgtgtctgaaataaccgctattgaggccgagcacatgctgaagaggaaacctgacgtagtgactccaaacggcctgaacgtgaagaaattcagtgccgtgcacgagtttcagaatctccacgcaatgtacaaggcacgaatccaggactttgttagggggcacttctatgggcacctggattttgacctcgagaagacactgtttctcttcattgctggacggtatgaattttctaacaaaggcgcggatatatttttagaatccctgtcacggcttaactttcttctccggatgcacaaatcggacatcacagtgatggtattttttattatgcccgcgaagaccaataattttaacgtggaaactctgaaaggccaggcggtgagaaagcagctctgggacgtcgcccactccgtcaaggagaaatttggcaaaaagctgtacgatgcgcttcttcgcggggagattcccgatctgaatgatattctagaccgggatgatttgaccattatgaagcgagcaatttttagcacccagcgacagtctctgccccctgtgacaacccacaatatgatcgacgatagtacagaccccatcctctctaccatcaggagaattggactgtttaataaccgaaccgaccgtgtgaaggtgatcctgcatccagaatttttgagttcaacatcgcccctgcttcctatggactatgaggaatttgtgcggggatgccacctgggtgtctttccaagttattacgaaccgtggggatatactcccgctgagtgtactgtgatgggcataccctctgtgacaactaacctttctgggttcggctgcttcatgcaggaacatgtggcggatccaacagcctatggcatatatattgtggacaggcggtttaggagtcccgacgattcctgcaaccaactgaccaagtttctctacgggttttgtaagcagtccaggagacagcgcatcatacagcgaaatcggacagagcgcctgtcagacttgttggactggaggtacctaggacggtattatcagcacgcacggcatctcactctgtcccgagcattcccagacaagttccatgtcgagctcacatctccacccacaactgagggcttcaaatacccgcgtccctccagcgtaccaccatcaccgtctgggtcacaggcctcaagtccacaatccagcgacgtagaagatgaggtggaagacgagagatatgacgaagaggaagaggctgaaagagaccgcctgaatattaaatccccattctctttgtctcacgtgccgcacggtaagaagaagctccacggggaatataagaac

SEQ ID NO: 13183 - DNA, 2109 bp, synthetic construct
  misc_feature 1..2109: note = source = /note="Description of Artificial Sequence: Synthetic coding sequence"
  source 1..2109: mol_type = other DNA
atgctccgagggcggtctctcagtgtgacatccctcggagggctccctcagtgggaagtggaagaactcccagtcgaagaattactgctgttcgaagtagcttgggaagtgacaaataaagttgggggaatttatactgtcattcagacaaaagcaaaaacaacggccgatgaatggggggaaaattacttcctgatcggaccctatttcgaacataatatgaaaactcaggtggaacagtgtgaacccgtgaatgatgctgtcagaagggctgtagatgctatgaacaaacacgggtgtcaggtacattttggaaggtggctaattgaaggatcaccttatgttgtgctgttcgatatcgggtatagtgcatggaaccttgatcggtggaagggagatctctgggaagcttgtagtgtcggaatcccctatcacgatcgggaagctaatgatatgctcattttcggatcccttactgcttggttcttaaaagaagtgactgatcacgcagatgggaagtatgtcgtggcccagttccatgaatggcaggccggaataggacttattcttagtcgggctaggaaacttcccatcgccactatcttcactactcatgccactctcctgggaagatatctgtgtgccgccaacatagacttttataatcacttagacaaatttaatattgacaaagaagctggagagcgccagatatatcaccggtattgtatggaacgggccagtgtgcactgtgctcatgtgttcacaacagtgagtgaaatcacagctattgaagccgaacatatgcttaaaaggaaaccagatgtggtaactcccaatggattgaatgtgaaaaaattctcggctgtgcacgaatttcagaacctccatgcgatgtacaaagcccggattcaggatttcgtgaggggacatttttacggacatctagattttgatctagaaaaaacactgtttctattcatcgctgggagatacgaattttctaacaaaggggcagatatatttctagaatctctcagtaggctaaatttcctcctgcggatgcataagtctgatataacagtcatggttttttttattatgccagccaaaacaaacaactttaacgttgaaacacttaaagggcaggctgttagaaaacagctgtgggatgtggcacactctgttaaagagaagtttgggaaaaaactatatgatgccctccttagaggggagattccagatctcaacgatatattggatagagatgatcttactatcatgaaaagggctatcttctcaactcaaagacagtccctcccacccgttactacacacaatatgatcgatgactctacagatccaatacttagtacaatccgacggatagggctctttaacaaccgcactgacagggtcaaagttatcctgcatcctgaatttctcagttctacttcccctctgttgcctatggattatgaagaatttgtgagggggtgccacctcggggtatttccctcatactatgaaccttgggggtatacacccgccgaatgtactgtcatgggaatcccctccgtcacaactaatctatctgggtttgggtgcttcatgcaggaacatgttgccgatcctacagcttatggaatttatatcgttgataggaggttcagaagtcctgacgattcttgtaatcagctgacaaaatttctctacggattctgcaagcagagtcgcaggcagcggatcatccagagaaatcggactgaacgattgtcggatctcctggattggcgatacctaggaagatattaccagcacgccaggcacctcacactcagtagggccttccccgataaatttcacgttgaactcacttctccccccacaacagaagggttcaagtatcctcggcctagtagtgtgcctcccagtccatctgggtctcaggcatctagtcctcagtcttctgatgttgaagacgaagtggaagatgaacgctatgatgaagaagaagaagctgagagagatcgcctgaatatcaaatctcccttctcgctctcgcatgtaccccacggaaaaaagaaattgcacggggaatataagaat

SEQ ID NO: 13184 - DNA, 2109 bp, synthetic construct
  misc_feature 1..2109: note = source = /note="Description of Artificial Sequence: Synthetic coding sequence"
  source 1..2109: mol_type = other DNA
atgctaaggggccgctccctgagcgtaactagcctcggagggctgccacaatgggaagtggaggagctccctgtggaagaactcctgttatttgaggtagcttgggaagtgacaaataaggtgggcgggatttacacagtgatccaaacaaaagcgaagaccaccgcagatgaatggggggaaaattatttcctcattggcccctactttgaacataatatgaaaacgcaggtggagcagtgtgagcctgtcaatgacgcggtacgtagggcagttgatgcaatgaataagcacgggtgccaggtgcattttgggaggtggctgatagagggcagtccttatgtcgtcttgttcgatatcgggtacagtgcttggaatctcgatcggtggaagggagacctgtgggaagcttgttctgtggggattccatatcatgatcgggaggccaacgacatgctgatctttggctccctcaccgcctggtttttgaaggaagtcaccgaccatgccgatggcaagtatgtcgtggcacagttccatgagtggcaggccggcatcgggctgatattgtcccgggcaagaaaactcccaatcgccaccatcttcaccacccacgctacgctccttgggcggtatctctgcgccgcaaacatcgatttttacaaccatctggataaatttaatatcgataaggaggccggagaaagacagatataccatcgctattgcatggagcgcgcatctgtgcattgtgcacacgtgttcacaacagtaagtgagataacagcgatcgaagctgaacatatgcttaaacgtaagcccgacgtggttacacctaatggcctgaacgtgaaaaagttctccgcggttcatgagttccaaaacctccacgcgatgtacaaagccagaattcaggattttgtaagagggcacttctatgggcacctcgactttgacttggagaaaactctatttctatttattgccgggagatatgagttctcaaataaaggcgcagacatcttccttgagagtctcagccggcttaattttcttctgagaatgcacaagtcagacatcacagtcatggtcttctttattatgcccgccaagaccaacaattttaatgtggagacattgaagggccaggcagtgagaaagcaactttgggacgtggctcacagcgtgaaagagaaattcggaaagaaactgtacgatgcccttctacgcggtgaaatcccggacctgaatgacatactggatagagacgacctaacaatcatgaagcgcgcgattttcagcacccagcgacaatcgctccctccagtgactacccataacatgatcgacgatagcactgaccccatactctccactatacgtagaataggcttgtttaataaccggacagatagggtcaaagtgattctccatcctgagttcctctcttccacttcccctctgctccccatggattatgaagaatttgtgcgcgggtgtcatctcggcgtctttccaagttactatgaaccttgggggtacacgcccgccgaatgtactgtgatgggcatacctagtgtaaccactaatttaagtggctttggatgcttcatgcaagagcacgtagccgatccaaccgcctacggaatttatatagttgaccggaggttccggtctcccgatgactcgtgtaatcagctgactaagtttctttatggattctgcaaacagtcacgaaggcaacgtattattcaacgtaaccgcacagaaagactgtcagacctcttggattggcggtatctcggcaggtattaccagcatgcccgccatcttactttaagtcgagctttcccagacaagttccatgtggagttaacaagccctccgactaccgagggttttaagtatcctcggccatcctcagtgccaccttccccttccgggagtcaggcatctagcccacagtccagcgacgtcgaggatgaagtggaggacgagcgatatgatgaggaagaagaggccgaaagagataggttaaatatcaaaagccccttttcacttagccacgtcccccatggtaagaaaaagctccacggagagtacaagaat

SEQ ID NO: 13185 - DNA, 2109 bp, synthetic construct
  misc_feature 1..2109: note = source = /note="Description of Artificial Sequence: Synthetic coding sequence"
  source 1..2109: mol_type = other DNA
atgctcagaggacggtccctctcggtcaccagtctcggaggtctgccacagtgggaagtcgaagaactgccggttgaggaactgctcctgtttgaagtggcgtgggaagtaactaataaggtgggcggcatctacactgtcatccaaaccaaagctaaaaccactgcggacgaatggggggagaactatttcctgattggaccatacttcgaacacaatatgaaaacccaggtcgagcagtgtgagccggtgaatgatgcagtgaggcgcgccgtcgacgcgatgaataagcacggatgtcaggtccatttcggaagatggttgatcgaaggatcgccatacgtggtgctgtttgatatcgggtacagtgcctggaacctcgaccgctggaagggggatctgtgggaggcttgctccgtgggaatcccttaccacgaccgcgaagcaaacgacatgctgattttcggatcgcttactgcgtggttcctcaaggaagtgaccgatcacgcagacggcaagtacgtcgtagcgcaattccacgaatggcaagctgggattggtctgattctctcccgagcccgtaagctgcctatcgcgactatctttactacgcatgcgaccctcctcgggcggtacctgtgcgccgctaacatcgacttctacaaccacttggacaagttcaatattgacaaagaagctggggagcggcagatctaccaccgctactgcatggagcgcgccagcgtccattgcgcccatgtgttcactaccgtgtccgagatcaccgccatcgaagcagagcatatgttgaagcggaagccggacgtggtgactcccaacggactcaatgtcaagaagttctcggcagtgcacgaatttcagaacctgcacgccatgtataaggctcgtatccaggactttgttcggggccacttttacggacatcttgacttcgacctcgagaaaacccttttcttgttcatcgcaggtcgctatgaattctcaaacaagggagcagacattttcctggaatcactttcccgcctgaacttcctgctccggatgcacaaatcggatatcactgtcatggtgttctttatcatgcctgccaaaactaacaactttaacgtggaaactctgaagggacaggctgtgcggaagcagttgtgggacgtggcccactctgttaaggaaaagttcggaaaaaagctgtacgacgcgctgttgagaggcgagattccagatctgaatgacatcttggaccgggacgatctcaccatcatgaagagagcgatcttctccacccagcggcaatctctcccgccagtcactactcacaacatgatcgacgattcaaccgaccctatcctgtcgactataaggagaattggcctcttcaacaacaggacggatagagttaaagtgatcctccaccccgaatttctgagcagcacctcaccgcttctgcctatggattacgaagaattcgtgcgagggtgtcacctgggagtgttcccatcgtactacgagccgtggggatacacccccgcagaatgcaccgtcatgggaatcccgtcagtgactacgaatctgtccggcttcggatgcttcatgcaggagcatgttgctgatcctaccgcctacggcatctacatcgtcgacagacgctttcgctcaccagacgattcgtgcaatcagctcaccaagtttctctacggtttctgcaaacagtcacggcgccaaagaatcatccaaagaaaccgcactgagcggctgtccgacctcttggactggagatacctgggcagatattaccaacatgcccggcatctgacgctgtcgcgcgccttcccggataagttccatgttgaacttacctcgcccccaaccaccgaaggattcaagtacccgcgccctagttctgtgccgccgtcgccatccggcagtcaagcatcctccccgcagtcgtcggatgtggaggatgaggtggaggatgaacggtacgatgaggaggaggaagcagaacgcgaccgactgaatatcaagtcccccttctcactgtcccacgtgccgcatggaaagaagaagttgcacggagaatacaaaaac

SEQ ID NO: 13186 - DNA, 2109 bp, synthetic construct
  misc_feature 1..2109: note = source = /note="Description of Artificial Sequence: Synthetic coding sequence"
  source 1..2109: mol_type = other DNA
atgctgcggggaagaagtctgagtgtcacctcactgggaggactgcctcagtgggaagtggaggagctgcccgtggaagagctgttgctgttcgaggtcgcctgggaggtcacaaataaagtggggggaatctataccgttattcagaccaaagccaagaccacggcagacgagtggggggagaattatttcctgatcgggccctattttgaacacaacatgaagacccaagtcgagcaatgcgagcctgtgaacgacgccgtgaggcgggccgtggatgccatgaataagcatgggtgtcaggtccactttggaaggtggctcattgagggctccccttacgttgtgctgttcgacattggctattccgcctggaatctggataggtggaagggagatctttgggaggcatgttcagtgggcatcccctatcacgatcgagaagccaacgatatgctgattttcggcagcttgacagcatggttcctcaaggaggtcaccgatcacgctgatggaaagtatgtggtggcacagtttcatgaatggcaggcagggatcggattgattctgtctagagctaggaaattgcccatcgccaccatatttaccacgcatgccacgttgctgggcaggtacctctgtgccgccaacatagatttctataatcaccttgacaaattcaatatcgacaaagaggccggtgagcggcaaatctatcaccggtactgcatggaacgcgccagcgttcactgcgctcacgtttttactactgttagtgagatcaccgctatcgaggccgaacacatgctgaaacgcaaacccgacgtcgtgacaccgaatggactgaacgtaaagaagttttccgctgttcacgaattccagaacctgcacgctatgtataaagctcgcatccaagactttgttcgaggacacttttacggacacttggatttcgacttggagaaaaccctgttcctgttcattgcaggcaggtatgagtttagtaataagggagcagatatttttctggagtccctgagtcgactgaacttccttctgcggatgcacaagtcagatatcaccgtgatggtgttctttatcatgcccgctaagacaaacaattttaatgtggagacgcttaagggacaggccgtgcggaagcagctgtgggatgtggcgcattcagtaaaagagaagttcggaaaaaagctgtacgatgcactcctgcgaggcgagatccccgatctgaatgacattctggacagggacgacctcaccataatgaagcgcgcgatattctcaactcagagacagtctttgccaccggtgacgacccacaacatgatcgacgactctaccgacccaattctgagcaccatccgcagaattggcttgtttaataaccggactgaccgggtaaaagtgatcctgcacccagagttcctctcaagcacctctccactgctgcctatggactacgaggagtttgtgcgggggtgccacctgggagtgtttccttcctactacgagccctggggctacactcctgccgaatgcaccgtcatgggaatcccctcagtcaccactaacctgtctgggttcggctgctttatgcaggaacacgtggcggatcctaccgcatatggaatctacatcgtggacaggcgctttcgcagccccgatgattcctgcaatcagttgacgaagttcttgtacgggttttgcaagcagtccagacggcagcgcatcatccagaggaaccgcacagagcggctgtcagatctgctcgattggcggtacctggggcggtattatcagcacgctcggcacctgacactgtctcgggccttcccagacaagttccatgtggaactgacctctccccccaccaccgagggctttaagtacccacggcccagttcagtgcccccgtcaccaagcggttcacaagccagctccccacagagcagtgatgttgaggacgaggtcgaagacgagaggtacgacgaggaagaagaagctgaacgcgacagactgaacatcaagagtcccttctcattgagtcatgtgcctcacggtaaaaaaaagctgcacggggaatacaaaaat

SEQ ID NO: 13187 - DNA, 2109 bp, synthetic construct
  misc_feature 1..2109: note = source = /note="Description of Artificial Sequence: Synthetic coding sequence"
  source 1..2109: mol_type = other DNA
atgctgaggggacgctcactctccgtgacttcgctgggcggactgcctcaatgggaggtggaagagttgcctgtggaggaactgctgctctttgaagtggcatgggaagtcaccaacaaggtcggaggcatctacaccgttatccagacgaaagctaaaaccactgctgacgagtggggcgagaactacttcctgatcgggccatacttcgaacacaatatgaaaacccaagtcgaacagtgcgagccggtgaacgatgcggtgagaagagccgtggatgctatgaataagcatggctgccaggtgcacttcggaaggtggcttatcgaaggatccccatacgtggtcctgtttgatatcgggtactccgcatggaacctcgaccgctggaagggcgacctgtgggaggcatgctcggtcggcattccatatcacgaccgggaggccaatgatatgcttatctttggctcacttactgcgtggttcctcaaggaagtgaccgatcatgccgacggaaaatacgtcgtggcccagttccacgagtggcaggcgggaatcggactgattctgagcagagcccgcaagttgccgattgctactatcttcactacccacgctacccttctgggtcggtacctctgcgctgcaaatatcgacttttacaaccacctggacaaattcaacatcgacaaagaggctggcgagaggcaaatctaccaccgctactgcatggaacgcgcctcggtccactgcgcccacgtgttcaccaccgtgtccgaaatcacggcaattgaggcagagcacatgctgaaacggaaaccggacgtggtgaccccaaacggactcaatgtcaaaaagttcagcgcggtccacgaatttcagaacctgcatgccatgtacaaggcccgcattcaagacttcgtgcgcggccacttctacggccacctggatttcgatctcgaaaagaccctgttcctgttcatcgccggacgctacgagttctcgaacaaaggagcggatatcttcctggagagccttagccggctcaattttctgcttcgcatgcataagtcagacatcaccgtcatggtctttttcatcatgccggccaagaccaataacttcaatgtggaaaccctgaaggggcaagcagtccggaagcagctgtgggatgtggcccactcagtgaaggagaagttcggcaagaagctgtacgatgcactgctgcggggcgaaatccctgacctcaacgacatcctggaccgcgatgatctcaccatcatgaaacgggcgatcttctcaacccagcggcagtcactgccgccggtgaccacccataacatgatcgatgattcaactgacccaatcctgtcgactatccgccgcatcggactgttcaacaatcgcaccgacagggttaaggtgatcctgcacccggaatttctctcatcgacctcgccgcttctgcccatggactatgaggagtttgtcagaggatgtcatctgggggtctttccatcatactacgagccatggggatacacccctgccgagtgtaccgtaatggggatcccgtcagtgaccactaacctgtcggggttcggatgcttcatgcaggaacacgtggccgatccgactgcgtacgggatctacattgtggaccggagatttaggtcccctgatgattcgtgcaatcagctgactaagttcctttacggattttgcaaacagagcaggaggcaacggattatccaacgaaaccgcaccgaacgcctctctgatctgctggattggcgctacttgggacggtactaccagcatgctagacatctgactttgagcagagcgttcccagataagttccatgtcgaactgacgtccccgcctacgaccgaaggattcaaatacccgcgcccgagctccgtgccacctagcccgtcgggatcgcaagcgtcgtcaccacaatcctccgatgtggaagatgaggtggaggacgagcgctacgacgaagaggaagaggccgaacgtgaccgcctgaatatcaagtcacctttcagcctgagccacgtgccgcacgggaagaagaagctccacggcgaatacaagaat

SEQ ID NO: 13188 - DNA, 2109 bp, synthetic construct
  misc_feature 1..2109: note = source = /note="Description of Artificial Sequence: Synthetic coding sequence"
  source 1..2109: mol_type = other DNA
atgctgaggggcaggtccctcagcgtcacctccctcggaggacttcctcaatgggaagtggaggaacttcctgtggaggagttgctgctgtttgaggtcgcctgggaggtcactaataaggtgggtggaatctacaccgtcatacaaaccaaggcaaagactaccgcagatgaatggggtgagaattactttctgataggaccttactttgaacataacatgaaaactcaagtggaacagtgcgagccagtgaacgatgcagtgagacgcgccgtggatgctatgaataaacacgggtgtcaggtccacttcggaaggtggctgatcgaaggatcaccatacgtcgtgctcttcgacatcgggtactcagcatggaatctggataggtggaagggggatctgtgggaggcctgttccgtgggaatcccataccatgacagagaggcaaacgatatgctgatttttggatcgcttactgcttggtttttgaaggaagtaactgatcacgcagatggtaagtacgtggttgcacagttccatgaatggcaggcaggtatcggactcatcctctcccgagcgagaaagctcccgattgcaactatctttaccacccatgctactctccttgggcgttacctgtgtgcagcaaacattgacttttacaaccatttggataagttcaacatagataaggaagcgggtgaaagacagatctaccatagatattgcatggaacgagcatcggtgcactgtgcccatgtttttaccaccgtgtcggaaattaccgccattgaagcagaacatatgctgaaacgcaaacctgatgtggtcacccctaacggacttaacgtcaaaaagttctccgccgtgcacgagttccagaacctgcacgcaatgtacaaggcacggatccaggactttgtgagaggacacttttacggccacctggacttcgatctcgaaaagaccctgtttcttttcatagccggaaggtatgaattttccaacaagggcgcagatatctttttggaaagcctttcgcgtctgaattttctcctcagaatgcataaaagcgatataaccgtgatggttttcttcataatgcctgcaaaaaccaacaacttcaacgtggaaacgctcaagggacaggcagtgaggaagcaactctgggacgtcgcacacagcgtgaaggaaaagtttgggaagaagctgtacgacgccctccttagaggggagattcccgatctcaacgacattctggaccgggacgatcttactattatgaaacgcgcaatctttagcactcagcgtcaatcgctgcccccggtcactacccacaacatgattgacgactcaaccgatccaattcttagcacgatccgacgcattggtcttttcaacaacagaactgatagagtgaaggtcattctccatcccgagtttttgtcctctaccagcccgctcctgccaatggattacgaggaatttgtccggggatgtcatctgggagtctttccttcgtactacgaaccttggggatacaccccagccgaatgcactgtgatggggataccgagcgtgacgactaatctgagtggttttgggtgttttatgcaggagcatgtggcagatccgaccgcatacggcatttacattgtggaccggagattcagatcacctgacgattcatgcaatcaacttacgaaatttctgtacggtttctgtaagcaaagccgccgccaacgcattattcaaagaaatagaactgaacggctgtctgacctcctggactggcggtacctgggaagatactaccaacacgccagacatctcactcttagccgggcatttcctgataagttccacgtggagcttacttcgccacccaccaccgaggggttcaagtacccgcggccaagctcagtccccccatcaccatccggttcgcaagccagctcaccccaatcgagcgacgtggaggatgaagtggaggacgaacgatacgacgaagaggaagaagcggaacgggaccggctcaatatcaagagccccttctcccttagccacgtgccccatggtaagaaaaagctgcacggagaatacaagaac

SEQ ID NO: 13189 - DNA, 2109 bp, synthetic construct
  misc_feature 1..2109: note = source = /note="Description of Artificial Sequence: Synthetic coding sequence"
  source 1..2109: mol_type = other DNA
atgctccggggccgttccctttccgtgacctcacttggtggcctgcctcagtgggaggtagaagaactcccggtcgaagaactgcttctgtttgaagtcgcatgggaagtcaccaacaaagtgggtggtatttacactgtgattcagaccaaggctaaaactaccgccgacgaatggggagagaattacttcctgattggaccttactttgaacacaatatgaaaacccaggtcgagcaatgtgaacctgtgaatgatgcagtgcggcgggccgtggatgcaatgaacaagcacggatgccaggtgcattttggaaggtggctcatagaaggttccccctacgtggtccttttcgacattgggtacagcgcctggaacctcgatcggtggaagggagatttgtgggaggcatgcagcgtggggattccctaccacgatagagaggctaatgatatgcttatcttcgggtccctgactgcatggttccttaaagaagtgaccgaccatgcagatggtaagtacgttgtggctcagtttcatgaatggcaagcaggaattggacttattctcagccgcgcacggaagctccccattgcaactatctttaccacccacgcgacccttcttggacgatacctgtgcgcagcgaatattgacttctataatcatcttgataagttcaatatcgataaggaagcgggagaaagacagatttatcatagatactgcatggaacgcgcctcagtgcattgtgcgcatgtctttactaccgtgtcagaaataaccgccatcgaagccgaacatatgctcaagcgcaagccagacgtggtcactcccaacggactcaacgtgaaaaagttttcggccgtgcatgaatttcaaaatctgcatgcaatgtacaaggcacgaatacaagactttgtcaggggacatttctacggacatcttgattttgatctggaaaagactctgtttctcttcatcgcaggtcgttacgaatttagcaacaagggagccgacatttttcttgaatcccttagcagacttaacttcctgctccgcatgcataagagtgacataactgtgatggtctttttcataatgccagccaaaaccaataacttcaatgtggaaacccttaaaggacaagcagtgaggaaacaactttgggacgtggcgcactcggtaaaggaaaagttcggcaaaaaactttacgacgcacttcttcgcggtgagattcctgaccttaacgacattctggatagagatgatcttaccattatgaagcgcgcaatcttttcgactcaaagacaatcgctgccccctgtcaccactcataacatgattgatgattcaaccgatccaattctgagcaccatacggagaatcggattgtttaacaatcgtactgaccgcgtgaaggtcatccttcatcccgaatttctttcatctacctcccctctgttgcctatggactatgaagagttcgtccgcggttgtcacctgggagtctttccatcatactacgaaccatggggttacactcccgccgaatgcactgtgatgggaataccctcggtgacgacgaacctctcagggtttggatgcttcatgcaagagcatgtggcggaccccactgcgtacggtatctacatagtggacaggaggttccgatccccagacgactcctgtaaccagctgactaaattcctgtacggcttttgtaagcaatcgcgacggcaaaggattattcagcgtaatagaaccgaacggctcagcgacctgcttgactggcggtacctggggagatactaccaacatgctcgacatctcactctcagtagagcatttcctgacaagttccatgtggagcttacttcgccccccaccaccgagggcttcaagtaccctcgcccgtcctcagtgccaccctccccatcggggtcacaagcatcctcgcctcagagctccgatgtcgaagatgaagtggaagatgagcgctacgatgaagaggaggaggcggaaagagataggttgaatatcaagtcgcctttttccctgagccatgtgccacacggaaagaaaaagctgcatggagaatacaagaac

SEQ ID NO: 13190 - DNA, 2109 bp, synthetic construct
  misc_feature 1..2109: note = source = /note="Description of Artificial Sequence: Synthetic coding sequence"
  source 1..2109: mol_type = other DNA
atgctgcgggggcgaagcttaagcgtgacctctttgggcggtctgccacagtgggaggttgaagagctgcccgtggaggaactgttgttatttgaagtcgcttgggaagtgaccaataaggtgggcggcatctacacagtgattcaaaccaaggctaagacgacagcggacgagtggggggagaattatttcttgattggtccctactttgagcataacatgaaaactcaagtggagcagtgtgagccagttaacgacgcagtccggcgcgctgtagatgcgatgaataagcacggatgccaggtgcacttcggacgatggctgatcgagggtagtccttatgtagttctgttcgatatcggctacagcgcctggaacctagaccgctggaagggggacctgtgggaggcctgtagtgtgggaatcccttatcacgaccgcgaagctaacgatatgctgatctttggctctctcaccgcctggtttctgaaagaagtcacggaccacgctgacggaaagtatgtggtggcacagtttcacgagtggcaggcaggcatcggtctgatcttgagcagggcaagaaaattgcctattgctacaatcttcaccacccatgccacattactcggtaggtacctgtgcgcggcgaacattgacttttataaccatctcgacaagtttaatatcgacaaggaagctggtgaacgccaaatctatcataggtactgtatggagcgagcatccgttcattgtgcccacgtattcacaactgtgagcgagattacagccatcgaagcggagcacatgttgaaacggaaaccggatgttgtcactcctaacggcctgaacgtgaaaaaattcagtgccgtccacgagtttcagaacttgcacgctatgtacaaggcaaggattcaagactttgtccgcggccacttctacgggcacttggattttgaccttgagaaaacgctgttccttttcatagctggacggtatgaattctccaacaagggggcggatatctttctggagtccctatcgcgcctcaactttcttcttcggatgcataagagcgatatcaccgttatggtcttctttatcatgcctgcgaagacaaacaattttaacgtggaaactctgaaaggccaggcggttcggaagcagctgtgggatgtcgcccactctgtcaaggagaaattcggaaagaagttgtatgatgcactgctccgcggcgaaatcccggatctcaacgatattctggacagagacgacctcacaatcatgaaacgtgccatattttctacccagagacagtcgcttcccccggtgacaacccataatatgatcgacgactctactgatcctattctatcaacgattcgcagaatcggtctgtttaacaaccgcaccgaccgcgtgaaggttatccttcatccagagttcctgagcagcaccagcccattactgcccatggactacgaggagtttgtccgagggtgtcacctgggggttttcccatcatattacgagccatggggatatactcccgcagaatgcaccgtgatgggaattcctagtgtgaccactaatctgtccggctttgggtgtttcatgcaggagcacgtggctgatcctaccgcgtacgggatatatatcgtggatagacgatttcgctcacccgatgatagctgcaaccagctgaccaagttcctttatggattttgtaagcagtcacgccggcagcgcattatccagcggaacagaaccgaacggctgtcagatctgcttgattggcgttacctggggcgctactaccagcatgcccgccacctaacgctgtcccgagccttccccgacaagttccacgtggaactgactagtccccctaccaccgaaggctttaagtacccacggccatcctctgtgcctccaagtcccagcggctcccaagcttcctcacctcagagcagtgatgtcgaggacgaggtggaggatgagcggtatgacgaggaagaggaagccgagcgcgaccgacttaatatcaaatccccattttctttgtcccatgtacctcacgggaagaaaaagttgcacggggagtataagaat

SEQ ID NO: 13191 - DNA, 2109 bp, synthetic construct
  misc_feature 1..2109: note = source = /note="Description of Artificial Sequence: Synthetic coding sequence"
  source 1..2109: mol_type = other DNA
atgcttcgcggaaggtccttgtccgtcacctctctcggaggactgccccagtgggaggtcgaggagctcccagtggaggaactccttctgttcgaagtcgcctgggaggtgacgaacaaagtaggcggcatctacaccgtgattcaaaccaaagccaagaccaccgctgacgagtggggagaaaactatttcctgattggtccgtacttcgagcacaacatgaagacacaagtggaacagtgtgaacctgtgaacgatgccgtgcgccgggctgtggatgccatgaataaacatgggtgtcaggtgcacttcggtcgctggctaattgaggggtcaccctatgtggtgctcttcgatattggttactccgcatggaacctcgaccggtggaaaggagatttgtgggaagcctgttcagtggggattccttatcacgatagagaagccaacgatatgctgatatttggctccctgacagcatggtttcttaaggaggtcactgaccacgcggacggcaagtacgtggtggctcagttccatgaatggcaagccgggataggcctgattctgtccagagctcgaaaactgccaatcgctaccatctttaccacccatgcaacactgctgggacggtatctgtgtgcagccaatattgatttctataaccacctcgataagttcaatatagataaggaggcgggcgagcgacagatatatcatagatattgtatggaaagggcttctgtgcactgtgcacatgtatttacgacggtttccgagataaccgctatcgaggccgagcacatgttaaagcgaaagccagacgtggttaccccaaatggtctaaacgtgaagaaattttctgctgtccacgagtttcagaatttgcacgcgatgtacaaagctaggattcaggatttcgttagagggcacttctatgggcacctagattttgacctcgagaagaccttgttccttttcatcgccggaaggtatgagttctctaataaaggggctgatatcttcttggaaagcctctctagactgaatttcctgctccgcatgcacaagtccgatattacagtgatggtatttttcatcatgccagcaaagactaacaatttcaatgtggagactttaaagggacaggctgtgcgcaagcaactatgggatgtcgcacactccgtcaaggagaaatttggtaagaagctttatgatgcacttttgcggggagagatcccagacctcaatgacatcctggaccgggatgacctgacaattatgaagagagccatatttagcactcaacgacagagccttccgccagtgacaacacacaacatgatcgacgacagcaccgaccccatcctaagcaccatccggagaattgggctctttaataaccggacagacagggttaaggttatactgcacccggagtttttgagcagtacaagtccgctgttacccatggattatgaagaattcgttagggggtgccacctgggcgtattcccgtcgtattacgagccgtgggggtacacacccgccgagtgtaccgtgatgggcatacctagcgtgaccacaaacctgagcgggtttggatgcttcatgcaagagcatgtcgctgatcctacagcatacggcatttatatcgtggatagaaggttccgctctccagacgattcatgtaatcagttgacaaagtttttgtatggattttgcaaacagtccagaagacagcgcattatacagcgcaaccggactgagaggttgtccgatctgttagactggcggtatcttggtcgatattaccagcacgcccggcacctgactctttccagggcctttccagacaaattccacgttgagctgaccagcccgcccactactgagggctttaaatacccacggccctcttctgtacctccatcgccttcaggatcacaggcttcctcgcctcaaagtagcgatgttgaagatgaggtggaagatgaacggtatgacgaagaagaggaggctgaacgggacagattgaacattaagtcccccttttccctgtcgcatgtgccacacgggaaaaagaagctgcatggtgagtacaagaat

SEQ ID NO: 13192 - DNA, 2109 bp, synthetic construct
  misc_feature 1..2109: note = source = /note="Description of Artificial Sequence: Synthetic coding sequence"
  source 1..2109: mol_type = other DNA
atgctgcggggacgctcgttgtcggtgactagcctcggcgggttgccccagtgggaggtcgaggaactgccagtggaggaattgctgctgttcgaggtggcttgggaggttaccaacaaggtgggaggtatctacactgttatacaaacgaaggctaagaccaccgccgatgaatggggcgagaactactttctgatcggcccgtatttcgagcataacatgaaaacccaagttgaacagtgcgagccggtcaatgatgccgtgcgccgcgcggtcgacgccatgaacaaacacggttgccaagtgcatttcggcagatggctgattgaagggtccccgtacgtcgtgctttttgatattggatactccgcatggaatctggaccgctggaaaggagatctctgggaagcatgttcggtgggtatcccctaccatgacagagaggcgaacgatatgcttatcttcgggtcccttaccgcttggttcctgaaagaagtcactgatcacgccgatggaaagtacgtggtcgcccaattccacgaatggcaggcgggaatcggtctgattttgtcccgggctcgcaagctccctatcgcgactatcttcactactcacgccaccctcctgggacgctacctctgcgccgctaatatcgacttctacaatcacctggataagtttaacatcgataaggaagccggcgagcggcaaatctaccatcggtactgcatggaacgcgcttcggtccattgcgcccatgtgttcaccactgttagcgaaattaccgcgattgaagcggaacacatgcttaagcgcaagccagatgtggtgactccgaatgggctgaacgtgaagaagttttcggccgtgcacgagttccagaacctgcatgccatgtacaaggcccgcatccaggatttcgtgcgggggcatttctacggacacttggatttcgacctggaaaagacgctgttcctcttcatcgcgggccgctacgagttttccaataagggcgccgacatctttttggagtcgctctctcggctcaactttctgctgagaatgcacaagtcagacattaccgtgatggtgtttttcatcatgccagcgaaaactaacaatttcaacgtggaaaccctgaaagggcaggcggtacggaagcaactgtgggatgtggcgcattcggtcaaggaaaagttcggaaagaaactttacgacgcgttgctccgcggagaaatccctgacctgaacgatattctcgaccgcgatgatctcactatcatgaaacgtgcaattttctccacccagcgccagtcactgccaccggtgacgacccacaatatgatagacgactccactgacccgatcctgtcgactatcaggagaattggcctgttcaataacaggacggatcgcgtgaaagtcatcctgcatccagaatttctgtcatcaacctccccacttctgccgatggactacgaggagttcgtgcgcggctgccatctgggtgtctttccgagctactacgaaccatggggatacaccccggccgaatgtacggttatgggcatcccgtcagtgactactaacctcagcgggttcggttgtttcatgcaggaacatgtcgctgaccctactgcctatggcatctatatcgtggaccggcggtttagatccccggatgattcgtgcaatcaactcactaagttcctttacggcttttgtaagcaatccagacgccagagaatcatccagcgcaacagaaccgaacgcctgtccgacctcctggactggagatacctgggtcggtactaccagcatgcccggcatctgacgctttcgcgcgccttcccggataagttccacgtggagcttacttcgcccccgaccacggaaggatttaagtatcctagaccgtcctcggtgccgccgagcccgtccggaagccaggcctcgtccccgcagtcatccgacgtggaggacgaagtggaggacgagcggtacgacgaggaagaagaggccgaacgcgatcggttgaacatcaagtcgccattctcgctctcgcacgtgcctcatgggaagaagaaacttcacggagaatacaagaac

SEQ ID NO: 13193 - DNA, 2109 bp, synthetic construct
  misc_feature 1..2109: note = source = /note="Description of Artificial Sequence: Synthetic coding sequence"
  source 1..2109: mol_type = other DNA
atgctacggggaagaagcctttcggtgactagcttgggcgggctcccccagtgggaagtcgaagaactgccagttgaagaactgcttcttttcgaggtagcgtgggaagtgacaaataaggtaggcgggatttacaccgtaattcagacaaaagcgaagactactgccgacgagtggggtgaaaactactttctaatcggcccctactttgaacacaacatgaagacacaagtggaacaatgtgagccagtcaatgacgcagtgcggcgggcagtggacgcaatgaacaagcatggctgccaggtgcacttcggacggtggttaatagagggcagtccttacgtcgtgctgtttgatatcggttacagcgcgtggaacttggacagatggaaaggcgatctgtgggaggcctgtagcgtaggtatcccgtaccacgatagggaagctaacgatatgctcatatttggcagcctaactgcatggttcctgaaagaggtcactgatcatgctgatggaaagtatgtcgtagcccagtttcatgaatggcaagctgggatcggattaatcctctcgagggctcgcaagttacccattgcgaccattttcacaactcatgccacactgctgggacgatatctgtgcgccgccaacatagatttctacaaccacctcgacaagttcaacatagacaaggaagcgggggaacggcagatctaccacaggtattgcatggagcgcgcgtctgtccactgtgcccacgtgttcactaccgtgtctgagataactgctatagaggctgagcatatgctgaagcgaaagccagatgtggttacaccaaatggcttgaacgtaaaaaagttttccgccgtccatgaatttcagaacctgcatgctatgtataaggcaaggatccaggactttgtgcgggggcatttttacggccacttggattttgatttggagaaaactttatttctctttattgccgggcggtatgagttctcaaataagggggctgatatctttctcgaaagcctgagtcggctcaacttcctcctgagaatgcacaagtctgatattactgtgatggtgttcttcataatgccagctaaaaccaataacttcaacgtggagacacttaaggggcaggcggttcggaaacagttgtgggatgtggctcattctgtcaaggaaaagtttggtaagaagttgtatgacgctctcctccgcggcgagattcccgacctgaacgacatccttgatagggacgacctgacaatcatgaagcgggccatttttagtacccagagacagtccctcccaccggttaccacccataacatgattgatgactccacggaccctatcttgtcaaccattaggcggattggcctgttcaacaaccggaccgatagagtgaaagtcatcctccaccccgaattcctttcttcgaccagcccactcttgcctatggattacgaggaattcgttagagggtgccatcttggtgtgtttccgagttattatgaaccctggggctacactccagcagagtgcaccgtgatggggataccgtctgttaccacaaacttgagcggcttcggttgcttcatgcaggaacacgttgctgatcccaccgcatatggtatttatatcgtcgatagacgctttaggagcccagacgattcatgtaatcagctgaccaagttcctgtacggattttgtaaacagagtaggaggcaacgcatcatccagcgtaaccggaccgagcgtttgagtgatctactcgactggcggtaccttggccgatattaccaacatgcccgacatctaacactgtcgcgagctttccccgataaattccatgtggaactgacgagccctccaacaacagagggtttcaagtaccctagaccgtctagcgtgccaccttccccgtctggctcccaagcttcttccccccagagcagcgatgttgaggatgaggttgaagatgagcgctatgacgaagaggaggaagcagaacgagataggttgaatattaaatcaccattttccttatctcatgtgccacatggtaagaaaaagctccacggggagtacaagaac

SEQ ID NO: 13194 - DNA, 2109 bp, synthetic construct
  misc_feature 1..2109: note = source = /note="Description of Artificial Sequence: Synthetic coding sequence"
  source 1..2109: mol_type = other DNA
atgctgcggggcagatccctttccgtcacttcactgggtggactcccccaatgggaggtggaagaactgcctgtcgaagagctgctcctgtttgaagtcgcctgggaagttaccaataaagtcggcggcatatacaccgtgatccaaacgaaagccaagactacggcggacgagtggggggaaaactacttccttattggaccttactttgaacacaatatgaaaacccaggtggaacagtgcgagccagtgaatgatgcagtgcgtcgcgcggtggatgcaatgaataaacacgggtgtcaggtgcacttcggtaggtggctgatcgagggatcaccctacgtcgtgcttttcgacattggatactcggcttggaaccttgatcggtggaagggcgatctttgggaggcatgctcggtgggaataccctatcatgaccgggaagcgaacgatatgttgatattcggcagccttaccgcatggtttctcaaggaagtcaccgatcatgccgacggcaagtacgtggtcgcacagtttcatgaatggcaggcaggaataggtcttattctctcccgcgcaaggaaactgcccatcgctaccattttcaccacccatgcaaccctgcttgggcgctacttgtgcgcagcgaatatcgacttttacaaccatctggataagttcaacattgacaaggaagctggagaaaggcagatataccatcgatactgtatggaacgagcatccgtccattgcgcacacgtttttaccacggttagcgagattacggccatcgaagccgaacacatgctgaagaggaagcccgacgtggtcacccccaatgggcttaacgtgaaaaagttttccgccgtgcatgaatttcaaaatctccatgcgatgtacaaggcaagaatacaagatttcgtgagaggccatttctacggtcacctggatttcgaccttgaaaagaccctctttttgtttatagccggtagatacgagttttccaacaaaggggcagacatttttcttgaatcactttcccgtctgaattttcttctgcgtatgcataaaagcgacatcacggtcatggtgtttttcatcatgccagccaagacgaataactttaacgtggagactctgaagggccaggcggtgagaaagcagctttgggatgttgcgcacagcgtaaaggaaaagttcgggaagaagttgtatgacgcactcctcaggggagagatcccagatcttaacgatatcctggatcgggatgatttgactattatgaagagagcaattttctcgacccaaaggcaatcactgccgcctgtgaccacccataacatgattgacgactccactgatcctattcttagcaccattcgaaggattgggctgtttaacaatcgcaccgacagggttaaggtgattcttcaccctgaatttctgagctccacttccccactgctgcctatggattatgaagaatttgtccgcggatgtcacctcggagtgttcccgtcatactacgaaccgtggggatacactccagccgagtgcacggtgatggggattccgtcggtcaccactaacctgtcgggatttggatgtttcatgcaggagcacgtggcagaccctaccgcttacgggatctacatcgtcgatcgtagatttagatcacctgatgattcatgtaatcagctgacgaagtttctctacggtttctgtaaacaatcccgcagacagcgcatcattcagcgaaaccggactgaaaggctttccgatctgctggactggcgctaccttggacgatactaccaacatgccagacaccttaccctctccagggctttccctgacaaatttcatgtcgaactcacctcaccaccaaccactgagggattcaagtacccaagaccaagttcagtaccaccgtcgccatcgggcagccaggcgagttcaccccaatcctctgacgtcgaagatgaggtggaggacgaacggtacgatgaagaagaagaagcagagcgcgaccgtcttaacataaagagccctttctcgctgagccacgtcccgcatggcaaaaagaagctccatggagaatacaagaac

SEQ ID NO: 13195 - DNA, 2109 bp, synthetic construct
  misc_feature 1..2109: note = source = /note="Description of Artificial Sequence: Synthetic coding sequence"
  source 1..2109: mol_type = other DNA
atgctgagaggtcggtcgctgtccgtgacttcgctcggtggtttgccacagtgggaagtcgaagagttgcctgttgaggaacttcttctgttcgaagtggcgtgggaagtcaccaacaaggtcggtggtatatacactgttattcagaccaaggcaaaaaccactgcagatgaatggggggagaattactttcttatcgggccttactttgagcataacatgaaaacccaggtggaacagtgtgaaccagtcaatgatgcggtgaggcgcgcagtcgatgccatgaataagcatgggtgccaagtgcatttcgggagatggctgattgagggaagcccttacgtggtcctgtttgacattggatactcggcatggaacctcgacagatggaaaggagatctgtgggaagcatgctcggtgggaatcccataccatgaccgcgaagcgaacgatatgttgattttcggctcgcttactgcatggttcctcaaggaagtgacggaccacgcagatggaaagtacgtggttgctcaatttcatgaatggcaagccggaatcggacttattctctcacgcgcgcgaaaactgccaatcgcaactatctttaccacccatgcaacgctcctgggtcgctacctttgcgcagctaacatagatttctacaatcacctggataagtttaacatcgataaggaggcaggtgagagacaaatctatcacagatattgtatggaacgcgcgtccgtgcactgtgcacacgtgtttaccactgtgtcagagatcaccgcaattgaagctgagcacatgcttaagagaaagccggatgtggtcaccccaaatggcttgaacgttaagaaattctccgccgtgcatgaatttcaaaacttgcatgcaatgtacaaagcaagaatacaagacttcgtccgaggccacttttatggacacctggactttgatctggagaaaactctttttctgttcatcgcgggaagatacgaattctcgaacaaaggcgcggatatctttctggagtcattgtcacgactgaactttcttcttcgtatgcataaatccgatattaccgtgatggtgttctttatcatgccggcaaagaccaacaactttaacgtggaaactctcaagggacaagcggtccggaagcagctgtgggatgtcgcccattccgtgaaggagaaattcgggaagaagctgtatgacgctctgcttcgtggcgagattcccgacctcaacgacatactggatagagatgaccttacgattatgaagcgcgctatcttctccactcagagacagtcgcttccccctgtgaccactcataacatgatcgacgattcaactgaccctattctgtcaactattcgccgcataggactctttaacaatcggactgaccgagttaaggtgatacttcacccagagtttcttagctcaacgtccccactgctgccaatggattacgaagagtttgtgagaggttgccatctgggtgtgtttccaagctactacgaaccgtggggttacacccctgccgaatgtacggtcatggggatcccgagcgtgaccactaaccttagcggctttggatgtttcatgcaagaacatgtcgcggatcctactgcctacggcatttacatagtcgatcgtaggttcagatcccccgatgactcctgtaatcagctgacgaagtttctgtacggattttgtaagcagagcaggcgccaacgaatcattcagcgaaataggactgaacggctttcggatttgttggattggcgatacctgggacgctactaccaacacgcgcgacacctcacgctctccagagcatttcctgataagtttcacgtggaactgaccagccctccaaccaccgagggattcaagtacccccgtccttcgtcggtgcctccttcgccatctggatctcaagcatccagcccacaatcgtcggatgtcgaagatgaagttgaggacgaacggtacgacgaggaagaagaagcagaacgcgaccgtctgaacatcaaaagccctttctccctgagccatgtgccccacggtaagaaaaaacttcacggagaatacaagaat

SEQ ID NO: 13196 - DNA, 2109 bp, synthetic construct
  misc_feature 1..2109: note = source = /note="Description of Artificial Sequence: Synthetic coding sequence"
  source 1..2109: mol_type = other DNA
atgttgcgaggccgaagtctgagcgtgacgtccctgggcggacttccacagtgggaggtggaagaactgcccgtggaagagctgctcctcttcgaggtggcatgggaggtaacaaataaagtaggcggcatctacacagtcattcaaaccaaagctaagaccacagcggacgaatggggggaaaattacttcctaatcgggccttatttcgagcacaatatgaaaacccaggttgaacaatgcgaacccgtcaatgacgccgtgcgcagagcagtggatgctatgaacaaacatggctgtcaggtacactttggacggtggctgattgaggggtcaccatacgtggtcctgttcgacataggatattcagcttggaatttggaccgatggaagggcgacctgtgggaagcctgttctgtgggcattccttaccacgacagggaggccaacgacatgctgatcttcgggtccctcactgcatggtttcttaaggaagtgaccgatcatgctgacggtaaatacgtcgttgcacagttccatgagtggcaggcaggtataggcttgatcctcagtcgagctaggaagctcccaattgccactatattcactactcacgcgacgctgctgggacgatacctgtgcgccgccaatatagatttttacaatcacctcgacaaatttaacatcgacaaagaagcaggcgaacggcagatttatcataggtactgtatggaaagagccagcgtccattgtgctcatgtgttcacaactgtcagtgagatcacagcaattgaggctgagcacatgttgaagcgcaagcctgacgttgtcacaccaaacgggctgaacgtgaaaaaattcagtgccgtacacgaattccagaacttgcacgccatgtacaaggcaagaatccaggactttgtgcgaggtcacttctacggtcatctggatttcgatttagagaagacgctgtttctgttcatcgcaggtcggtatgagttcagcaacaagggcgctgacatctttttggaatccctaagcagactcaactttttgctccgcatgcacaagtcagatattaccgtgatggtcttctttattatgcctgcaaagacgaataacttcaacgtggaaaccctgaagggtcaggcagtgcgaaagcagctgtgggacgtagcccactctgtaaaagagaagtttgggaagaaattatatgacgccttgttgagaggagaaatcccggacctaaacgatattctggatcgggacgatctgacaatcatgaaacgggctattttttccacacaaaggcagtcattgccaccggttaccacacataatatgatcgacgactccacggaccccatactgagtacaataaggcgcataggactgtttaacaatagaacagatcgcgtgaaggtaattttgcaccctgagttcctgtcgtccacaagcccccttctccccatggactatgaagaattcgtacgcggatgccaccttggtgtttttccctcttactatgaaccctggggctacactcccgcagagtgtacagtcatgggaatcccctcagtgaccacaaatctctcaggcttcggatgctttatgcaagagcatgttgctgatcccaccgcttatggtatctacatcgttgaccggcgcttccggagtcctgatgattcttgcaaccaactgacgaagttcttatatggtttttgtaaacagtctaggcggcagcgaatcatacaacgcaatcggacggaacggctttccgacctattggattggcgatacctcggccggtattaccaacacgctaggcacctcacattgagccgggccttccccgacaagtttcatgtggaactgacctctcctcccactaccgaggggttcaagtacccgcgcccatccagcgtcccaccttcacctagcggatcgcaagcgtcttcaccacagtcgtcagacgtggaagacgaagttgaagacgaacggtacgatgaggaggaagaagcagaaagggaccgcctgaacattaagtccccattttctctatcccacgtgcctcacggtaaaaaaaagcttcacggggagtacaagaac

SEQ ID NO: 13197 - DNA, 2109 bp, synthetic construct
  misc_feature 1..2109: note = source = /note="Description of Artificial Sequence: Synthetic coding sequence"
  source 1..2109: mol_type = other DNA
atgctgcggggtcgcagtctgtccgtaactagccttggcggcctcccacagtgggaggttgaggagctgcccgtcgaagagttgcttctgtttgaagtcgcttgggaagtcacgaataaggtcggcggtatatataccgtgattcaaacaaaggcgaagaccacagccgatgagtggggcgagaattacttccttatcggcccctatttcgagcataacatgaagactcaagttgaacaatgcgaaccggtgaacgacgctgtgagaagggcggtggacgctatgaataagcacggctgccaagtgcatttcggcaggtggttgatcgagggaagtccatacgtagtgctgtttgacatcgggtacagcgcctggaatttagatcggtggaagggagacctttgggaggcttgcagcgtgggtataccatatcatgaccgggaggccaatgatatgttaattttcgggagcttaacagcctggtttctgaaagaagtcaccgaccatgcagatggaaaatacgtggtggctcagttccacgagtggcaggcgggtatcggcctcatcctgtcccgcgcccgtaaactcccaatagctaccatcttcactactcacgccacccttctgggtagatatctttgtgccgctaacatcgacttctacaaccatttggataagttcaatattgacaaggaggcaggtgaaagacagatataccaccgctattgcatggagagggcttccgtgcactgcgctcatgtattcaccaccgttagtgagatcacggctattgaagcggagcatatgctgaaacgaaaaccggacgttgtgactccaaacggtctgaacgtcaaaaagttcagcgccgtgcatgaattccagaacctgcatgccatgtacaaagcgcgcatccaggactttgtccgcggccatttctacgggcatctcgactttgacctagagaagactctgttcctattcatcgccggccgatatgagtttagcaacaaaggcgcagatatcttcctcgagagtctgagccggcttaacttcttgctcagaatgcataagtccgacattaccgtcatggtctttttcattatgccagcaaagacaaacaatttcaatgtcgagacccttaaggggcaggctgtgcgtaaacagctgtgggacgtggcccatagcgtcaaagagaaatttgggaagaaactgtacgacgctctcttgaggggggagattcccgatctgaatgacatcctagacagggacgatctgaccataatgaaacgggcgatcttctccacccaacggcagtccttgccccccgtgacgacccacaatatgattgacgattctaccgatcccattctgagcactatccggcgaatcggactttttaacaacaggacggatagagtgaaggttattctccatcccgaattcctcagttcaacatccccactcttgcctatggattacgaagaattcgtgcggggatgtcatctgggggtcttccctagttactacgagccatggggctacacacctgccgagtgcaccgtgatgggaatcccctccgtcaccaccaacctctcgggattcggatgcttcatgcaggagcacgtggctgatcccacagcctacggaatttacattgtggatcggagattccgctcacctgacgactcttgtaaccagctgacgaaattcctctacggtttctgcaaacaatcccgccggcaaagaatcatacaacggaaccgcaccgaaaggctgagcgatctgcttgactggcggtacttgggcaggtattaccagcatgctaggcaccttaccctgtcccgcgcctttcctgacaagtttcacgttgaactgaccagccctcccactacagaggggttcaagtacccaagacctagctcggtgccaccgtcgccctcaggctcccaggcttcctccccccagtcatcggatgtcgaggatgaggtggaggatgaaagatacgacgaggaggaggaggcggaaagagaccgcctgaacattaagtcccccttctccctgagtcacgtcccacacggtaaaaagaagctgcacggggagtataagaac

SEQ ID NO: 13198 - DNA, 2109 bp, synthetic construct
  misc_feature 1..2109: note = source = /note="Description of Artificial Sequence: Synthetic coding sequence"
  source 1..2109: mol_type = other DNA
atgctgagagggcggtcactgagcgtgacctccctcggcggtttgcctcagtgggaggtcgaggaactgccagtggaagaactccttctcttcgaagtcgcgtgggaggtgaccaacaaggtcggcggaatctacaccgtgatccagactaaagccaagaccaccgcagacgaatggggggaaaactactttctcattggaccatactttgaacacaatatgaaaactcaggtcgagcagtgcgaaccggtgaacgatgctgtgcgccgggcggtggatgcgatgaacaagcatggatgccaggtgcatttcggaagatggctgattgagggatcgccgtatgtcgtgctgtttgacatcggatactccgcgtggaaccttgatcgctggaagggagatctctgggaggcgtgctcggtgggaatcccatatcacgaccgcgaagcgaatgacatgctgatattcgggagccttaccgcatggtttctgaaggaggtgactgaccatgccgacggcaaatacgtcgtcgcgcaattccacgagtggcaagcgggaattggccttatcctgtcaagagccaggaagctgcctatcgccactatctttactacccacgctactcttctgggacggtacctgtgtgccgcgaacatcgacttttacaaccacttggacaagttcaacatcgacaaggaggccggcgaacgccagatctaccatcgctactgcatggagcgggccagcgtgcactgtgctcatgtgttcactaccgtctccgagatcactgcgatcgaagccgaacatatgctgaagcgcaagcctgacgtcgtgaccccaaatggcctcaacgtgaaaaagttctcggcggtgcacgagtttcaaaacctgcacgccatgtacaaggcccggatccaagatttcgtgagggggcatttctacggacatctggactttgacctcgaaaagaccctgttcctgttcatcgcaggacgctacgaattcagcaataagggagcggacatcttcctggagtcgctgtcaagactcaactttctgctcagaatgcacaagtccgatattaccgtgatggtgttctttatcatgccggcaaagaccaacaacttcaatgtggaaaccctcaaaggacaggccgtgaggaagcaactgtgggacgtggcccatagcgttaaggaaaagtttggtaagaagctgtacgatgccctgctccgcggcgagatcccagatctgaacgacatcctggacagagacgacctcacgatcatgaagcgcgcgatcttctccacccagaggcagtcgctccccccggtgacgacgcacaatatgatcgacgattcgactgatccaatcctcagcactatccgacgcatcggattgttcaacaaccggaccgatcgagtgaaggtcatcctgcacccggagttcttgagctcaacctcgccgttgctcccgatggattacgaagagttcgtgaggggatgccatctcggagtgttcccgtcatactacgagccgtggggatacaccccggcggaatgcacggtgatgggaattcctagcgtgactactaatttgtcgggattcggttgcttcatgcaggagcatgtggcagacccgactgcatatggtatttacatcgtggacagacggttcagaagcccggacgattcttgcaatcaattgaccaaatttctgtacgggttctgtaagcagtccaggcgccagaggatcatccaaagaaatcggaccgagcgactgtccgatctcctggattggcgatacctcggacgctactaccagcatgctcgccatctgactctgagcagagcatttcccgataagttccacgtcgaattgaccagccccccgactaccgagggattcaagtacccgcgcccttcctcggtgccgccttcgccatcgggatcgcaagcaagctcgccccaaagctcagatgtggaggacgaagtggaagatgaaagatacgatgaggaagaagaagccgagagggaccgcttgaacattaagtccccgttctcgctgtcacatgtgccacacggtaagaaaaagctccacggcgaatacaaaaat

SEQ ID NO: 13199 - DNA, 2109 bp, synthetic construct
  misc_feature 1..2109: note = source = /note="Description of Artificial Sequence: Synthetic coding sequence"
  source 1..2109: mol_type = other DNA
atgcttaggggtagaagcctctctgtcacgagcctggggggactgccacaatgggaagtagaggaactgccagtggaggagcttctgctgtttgaggtcgcgtgggaggtcacgaataaggtgggaggaatttacaccgtgatccagacgaaggctaagacaactgcagacgaatggggagaaaactactttctaatcggaccatatttcgagcacaatatgaagacgcaggtagagcagtgtgaacccgttaacgatgccgttagaagggccgtcgatgccatgaacaaacacggctgccaggtgcatttcggaaggtggttaattgagggctctccctatgttgtgctattcgacattggttattcagcgtggaatttagacagatggaagggggacctctgggaagcttgctctgtgggtatcccttatcacgatcgcgaggccaacgacatgctgatttttgggagtcttacagcgtggtttctaaaagaagtgaccgatcacgcagacggaaaatacgtggtcgcccagtttcacgagtggcaggccggcatcgggttgatcctttctagggccaggaagctccccattgccacaatctttacgacccatgccactctgctgggcaggtatctgtgcgcagctaacattgacttttataaccacttagataaattcaatattgacaaagaggctggcgagagacagatttatcacaggtattgtatggagagggcaagcgttcactgtgctcatgttttcacaaccgttagcgagattacagctatagaagctgaacacatgcttaagagaaaacccgatgttgtcacaccgaatgggcttaacgtgaaaaaattcagtgccgtgcatgaattccagaacctgcacgctatgtacaaggcaaggatccaggacttcgtgagagggcatttttatgggcacttagattttgacctcgaaaaaactttattcctgtttatcgccggacggtatgaattctccaacaagggcgcggacatctttctcgaatctctctcccggctcaattttctcttgcgaatgcacaagtccgatatcaccgtgatggtattcttcatcatgcctgccaagaccaacaactttaatgtggagaccctcaaagggcaagccgtgcggaagcagctgtgggatgtcgcccacagcgtcaaggaaaaattcgggaagaagttatatgatgcgctacttaggggcgagataccagacctgaacgatatacttgatagggacgacctgacaatcatgaagcgggccatttttagtactcagagacagtcattacctcccgtgaccacccataatatgatcgatgattccaccgaccccatcctgtcgacgatccggaggatcggtctgtttaacaaccgcactgacagggttaaggtcattctgcatccagaattcttatccagcacgagtcccttgctgcccatggattatgaggagtttgttcggggctgccatctgggggtgttcccttcctattacgaaccttggggatatactcccgccgagtgtacggtgatgggcataccttccgttaccacaaatttatcgggctttggctgctttatgcaggagcacgttgccgatccaaccgcctacgggatttacatcgtggacaggagattcaggtcaccagacgatagttgtaatcaattaactaaatttctttatgggttctgcaagcagagcaggaggcagcggatcatacaacggaacaggacagagcgcctgtcagacctgttggactggaggtatctcggtagatactatcagcatgctagacacctgaccctgagtcgtgctttccccgacaaattccatgtggagctcacaagtccacctaccaccgagggttttaaatatcctaggccctcttctgttcctccgtcccccagcggttcacaggcatccagtcctcagagctcagatgtagaggacgaggttgaggacgaacgctatgatgaagaagaggaggcagaacgggataggctaaatattaagtctccattcagcctaagccatgtgccccacgggaaaaaaaagctgcacggggaatataagaat

SEQ ID NO: 13200 - DNA, 2109 bp, synthetic construct
  misc_feature 1..2109: note = source = /note="Description of Artificial Sequence: Synthetic coding sequence"
  source 1..2109: mol_type = other DNA
atgttgagaggacgctccctttcggttacttcactcgggggtctgccccaatgggaagtggaggaactccccgtggaagaactccttttgttcgaagttgcttgggaagttaccaacaaagtgggaggtatctacacggtgattcaaactaaggccaagactaccgcagacgaatggggagaaaactattttctgattggaccctacttcgaacacaacatgaaaacccaggtggagcagtgcgaaccggtcaacgatgctgtgcggcgggccgtcgatgctatgaataagcatggctgtcaggtgcactttggccgctggcttattgaaggttcgccttacgtcgtcctgtttgacatcggctactcggcgtggaacctcgacaggtggaaaggtgacttgtgggaagcatgttccgtgggaattccttaccacgaccgagaagccaacgatatgttgatttttgggagccttactgcatggtttctgaaggaggtgacggatcatgctgatggtaaatacgtggtcgcacaattccacgagtggcaagcaggtataggacttatactgtcgagagcgcgcaagctgccaattgccaccatctttaccacccatgcaacgcttcttggaagatatctgtgtgcagctaacatcgacttctacaaccacctggacaagtttaacattgataaagaagccggagagagacaaatctaccatagatactgcatggaacgagcatccgttcactgtgcgcacgtctttaccaccgtctccgagatcactgcgattgaagcggaacacatgcttaagcggaagccagatgtggtgactcccaatggattgaacgtgaagaaattcagcgcagtgcatgagttccaaaatctgcatgcaatgtacaaggcccggatccaagattttgtgcgcgggcacttttacggtcatcttgacttcgaccttgaaaaaaccctgttccttttcatcgcaggacgctacgaattctcgaacaagggagcagatatctttctggagagcctgtcaaggctgaactttctgctgcgcatgcacaagtcggacattaccgtgatggtgtttttcattatgccagcaaagaccaataacttcaatgtcgaaaccctgaagggccaagcagttcggaaacagctttgggacgtggcgcattctgtcaaggaaaagtttggtaaaaagttgtacgatgcacttcttagaggcgaaattccagatctgaatgatatccttgaccgcgacgacctcactatcatgaaacgcgcgatcttttcgacccaacgacaatcgctgccgcctgttactacccataacatgatcgacgactccactgacccaattctttcgacgatacgaaggattggacttttcaataacagaacggatagggtcaaagtgattttgcatccggaatttctttcgtcgaccagccctctcctgccaatggattacgaggagtttgtccgcggatgtcatctcggcgtctttccctcgtactatgagccgtgggggtacacccctgcagaatgcaccgtcatgggaataccaagtgtgaccacgaacctgagcggatttggttgttttatgcaggaacatgtggccgatcccaccgcatacggcatatacattgtggacagacgctttagaagccccgacgattcctgcaaccaacttaccaaattcttgtacggattttgtaaacagtccagacgtcaacggatcattcaacggaacagaaccgaaagactgagtgacctcctcgattggcgctacctcggaagatactaccagcatgcccggcacctgactctcagccgagcatttcctgataagtttcatgttgaactcacctcacctccaaccaccgaggggttcaaataccctcgcccatcgtcggtgcctccttcgccctccggcagccaagcaagctcccctcagtcctcggatgtcgaggatgaagtcgaagatgagcgttacgacgaagaagaagaagcagaaagagacaggctcaatatcaaaagcccattctcgctgtcccacgtgcctcatggcaaaaagaagctgcacggtgaatacaagaac

SEQ ID NO: 13201 - DNA, 2109 bp, synthetic construct
  misc_feature 1..2109: note = source = /note="Description of Artificial Sequence: Synthetic coding sequence"
  source 1..2109: mol_type = other DNA
atgcttcgcgggcggagcctctccgtgacttcgctgggaggactgccacaatgggaggtggaggagctgccggtcgaggaactcctgctttttgaagttgcatgggaagtgaccaataaggtgggagggatatacaccgtcattcagactaaagctaaaaccacggcggacgaatggggagagaactacttccttatcggaccctactttgagcataacatgaaaacgcaggtggaacaatgtgagccggttaatgacgctgtccgccgtgccgtggatgctatgaacaagcacggctgccaagtgcatttcggacggtggctgatcgaaggatccccatatgtggtgttgttcgatatcggatactcagcctggaacctcgacagatggaagggcgacttgtgggaagcgtgttcagtcgggatcccgtaccatgaccgcgaggccaatgacatgctgatcttcgggtcgttgactgcctggtttctcaaggaagtgactgatcacgcagacggaaagtacgtggtggcacagttccacgaatggcaggcaggaattggcctgatcctctcgcgcgcccggaaactgccgatcgccactatcttcacgactcatgccaccctgttgggaagatacctgtgcgcggcgaatattgatttctacaaccacctggataagtttaacattgataaggaggctggtgagcgtcaaatctatcatagatactgcatggagagagcgtcggtgcactgcgcgcacgtgttcacgactgtgtcggaaatcaccgctatcgaagccgaacatatgctgaagaggaaaccagacgtggtcactcctaatgggctgaacgtcaagaagttttcagcagtgcacgagttccaaaatctccacgccatgtataaggcgcggatccaagattttgtccggggacatttctacggacacctggacttcgacctcgagaaaacgttgttccttttcatcgccgggcgctacgaattcagcaacaagggagcggatatcttcctggagtccctctccagattgaattttctccttcggatgcataagagcgatataaccgtgatggtctttttcatcatgccggctaagaccaacaatttcaacgtggaaaccttgaagggccaagccgtgagaaagcagctctgggacgtggcacactccgtgaaggagaagttcggtaagaagttgtatgacgcgctgttgcggggagaaatccctgacttgaatgacattctggatcgcgatgaccttaccattatgaaacgcgccatcttctccactcagaggcagtcgctccctccggtgactactcacaacatgatcgacgacagcaccgaccctatcctgtcgaccatcagacggatcgggttgttcaacaaccgcactgacagggtcaaggtcatcctgcatccggaatttctctcgtcgaccagcccgctgcttccgatggattacgaagaatttgtgcggggctgccacctcggagttttcccctcatactacgaaccctggggttacacgccggctgaatgtactgttatgggtatcccgagcgtgacgaccaacctgtccggcttcggttgctttatgcaggagcacgtggccgacccaaccgcatacggaatctacatcgtggatcgcagatttcgttcccccgacgattcctgcaaccagctgactaaattcctgtacggattctgcaagcaatctcgtcgccagaggatcatccagaggaatcgcaccgagcggctgtcggacctccttgattggcggtacctcggccgctattaccaacacgcgcgacacctgaccctctcacgagccttcccggacaagttccacgtggagctcactagcccgccaactactgaaggattcaagtacccacggccatcctccgtccctccgtcgccgtcgggatcacaggcctccagcccgcagtcgtccgacgtggaagatgaagtggaggatgaaagatacgatgaagaagaggaggcggagcgagatcgcctgaacatcaaatctccgttctcgctctcgcacgtccctcatgggaaaaagaagctccacggagaatacaaaaat

SEQ ID NO: 13202 - DNA, 2109 bp, synthetic construct
  misc_feature 1..2109: note = source = /note="Description of Artificial Sequence: Synthetic coding sequence"
  source 1..2109: mol_type = other DNA
atgttgaggggccgctctctcagcgtaacttcactgggaggccttccacaatgggaggtggaggagcttccagtcgaagaactgctattgttcgaggtagcatgggaagttaccaataaagtcggcggaatttatactgttatccaaacaaaggcaaaaaccaccgccgatgagtggggtgaaaactattttctgatcggcccttattttgaacataacatgaagacccaagtcgagcagtgtgaacctgtgaacgacgcagtgaggcgagcagtcgacgcaatgaacaagcacggttgccaggtgcattttgggaggtggttgatcgagggatccccatatgtcgtccttttcgatattggctactccgcatggaaccttgaccgttggaagggagatctgtgggaagcatgtagcgtaggaatcccttaccatgatagagaggctaacgatatgcttatctttggcagtttgactgcttggtttctcaaagaggtgaccgatcacgctgacggtaaatacgtggtagcgcagtttcacgagtggcaggcaggaatcggattgatcctgagccgcgcacgtaaactgccaatcgcaacgatcttcaccactcatgctactctgttgggtcgctacttatgtgctgccaatattgacttctacaaccatctggataagttcaatatcgacaaagaggccggagagcgccagatttaccacagatactgcatggaacgcgctagcgttcattgtgctcatgtgttcaccaccgtgagcgagatcactgccatcgaggccgaacatatgttgaaacgcaaacctgatgttgtcaccccaaacgggctgaacgtgaaaaagttcagcgcagtgcacgaattccaaaacctgcatgccatgtataaagccagaatccaggatttcgttaggggccatttctacggccacctggactttgacctcgagaagacgctgttcctgttcattgccggacgatacgaattctccaacaaaggcgcggatatcttcttggaatctctgtctaggttgaatttccttcttcgcatgcacaaaagtgatattaccgtcatggtgttcttcatcatgcccgctaagacgaacaattttaatgtcgaaacccttaaaggccaggccgtgcggaaacaactttgggatgtggctcattcagttaaggaaaaatttgggaagaagttgtatgacgcactccttcggggtgaaattcccgacctcaacgatatactggacagagacgatctgactatcatgaaaagggctatcttcagcacccagaggcagagcctgccacccgtgacaacacacaacatgatcgacgacagtaccgatcctatcttgtctacaatccgcagaatcggacttttcaacaatagaaccgaccgcgtcaaagtgatcttgcatccagagttcctgagctccacaagcccactgcttccaatggactacgaagagttcgttagaggatgccacttaggggtgttccctagctactatgagccttggggatatacaccagccgaatgtacggtaatgggcatcccaagcgtgaccaccaacctttccggcttcggatgctttatgcaggagcacgtggccgaccctactgcttacggtatttatatagtggataggagattcaggtctccagacgattcttgtaaccagctcactaagtttctttacggattttgcaaacagagtagaaggcagaggatcattcagaggaacaggacagaacggctcagtgacctgctggattggaggtatctggggaggtattaccagcacgccagacatctgacactcagtcgggccttcccggacaagtttcatgtcgaactgacatccccacccactacagagggttttaaatacccccgcccaagctccgtccctcctagcccctctggcagccaagccagctctccacaaagctctgacgtggaggatgaagtagaagatgaacggtatgatgaagaggaagaggcagagagggatcgattgaacataaagagcccatttagcctgagccatgtcccccatgggaagaagaaactgcatggcgagtataaaaac

SEQ ID NO: 13203 - DNA, 2109 bp, synthetic construct
  misc_feature 1..2109: note = source = /note="Description of Artificial Sequence: Synthetic coding sequence"
  source 1..2109: mol_type = other DNA
atgctgcgtggtcgatctctatcggttacttcactgggtggcctcccccagtgggaggtcgaggaactgcccgtcgaagagctgctgctctttgaagtagcatgggaagttaccaacaaggtgggtggtatttatacagtgattcagactaaggctaaaacaaccgcagacgaatggggcgagaattatttcctaattgggccatactttgaacacaatatgaaaacacaggtagaacagtgcgaacctgttaacgatgccgtgcggcgggccgttgatgccatgaataagcacggttgtcaagttcattttggccgctggttaattgagggatcaccttacgtcgtactgtttgatattggctacagcgcctggaatttggatcgctggaaaggcgacttgtgggaggcttgctctgtcggaatcccataccacgacagagaggctaacgatatgctgatcttcggctcacttaccgcatggtttttaaaagaggtcaccgatcacgccgacgggaaatacgtcgtagcccagttccacgagtggcaagccgggattggtctgatcttaagtcgggctcggaagttgcccatcgcaacaatttttacaacccatgcaacgttactaggacgatatctctgcgccgctaatatcgatttttacaaccacttggataagttcaacatcgacaaagaagccggcgaaaggcagatctaccaccgttattgtatggagcgggcttccgtccactgtgctcacgtttttaccactgtgtcagaaattaccgccatagaagccgaacacatgcttaaacgaaaacctgacgtcgtgactcctaatggcctaaacgtaaaaaaattctctgccgtgcatgagtttcagaatctgcacgctatgtataaggcccgaattcaggattttgtacggggccacttttacggccatctcgatttcgacctcgagaagacactattcctgttcatcgccgggagatatgagtttagcaataaaggcgcagatatcttcctcgagtccctctcgcgtctcaacttccttctccggatgcataagtccgatataaccgtgatggttttttttataatgccagccaaaactaataacttcaacgtcgagactttaaaaggccaggctgtacggaagcagctttgggacgttgctcacagcgtcaaggagaagttcggcaagaagctatacgatgctctgctgaggggagaaattcctgacctaaacgacattctggacagggatgaccttactatcatgaagcgggctatttttagcacacagaggcagtcgcttcctcccgtgactacacacaatatgatagatgactctaccgatcccattctttcaactatccgcaggattggcctgttcaacaatcgtactgaccgggttaaagtgattctgcaccccgaattcctctcctcgacttctcctcttttacccatggactatgaggagttcgtacgcggctgtcatctcggagtgtttcccagttactatgagccctgggggtatacccccgccgagtgtacagtgatggggatcccaagcgtgaccaccaatttgtccgggttcgggtgtttcatgcaggagcacgttgctgaccccacagcctatggaatctatatcgtcgatcggcgtttcagatctcccgatgacagttgcaatcagctgacgaagtttctctacgggttttgtaaacagtcaaggaggcaacgcatcatccagcgaaatcgcacagagcgactaagcgacctccttgattggcgatacctgggcaggtattaccagcatgctaggcatctaacgctgagcagggcctttcctgacaaatttcatgtggagctgactagcccgccgaccaccgaagggttcaagtacccccgccccagctccgtgccccccagccccagcggatcccaggctagcagcccccagtcctctgacgtggaagatgaggtggaggacgagagatatgatgaggaagaagaagccgagcgagacagactgaacatcaaatctcccttcagcttgagtcatgtgcctcatggcaaaaagaaactccatggagagtacaaaaac

SEQ ID NO: 13204 - DNA, 2109 bp, synthetic construct
  misc_feature 1..2109: note = source = /note="Description of Artificial Sequence: Synthetic coding sequence"
  source 1..2109: mol_type = other DNA
atgctacggggcagatccctgtctgtaactagcctgggcggtttgccgcagtgggaggtggaggaactacctgtggaagaacttctgctgttcgaagtggcttgggaggtaacaaataaagtgggtggtatatataccgttatacaaaccaaggcgaaaactaccgcggatgagtggggcgagaactactttttgatcggcccgtacttcgagcacaatatgaagacccaggtcgagcagtgcgaaccagtcaacgacgccgtacgcagagccgttgacgccatgaataaacacggctgtcaggtccattttgggagatggctgattgagggaagtccatacgtggtcctctttgatattggatatagcgcctggaacctggataggtggaagggcgacttgtgggaagcctgcagcgtaggcataccgtaccatgatagggaggctaacgatatgctgatattcggatcactgactgcatggtttcttaaggaggtaaccgatcacgccgacggcaaatatgtggtggcacagtttcacgagtggcaagcagggataggcctgatactctctagagcaaggaagctccctatcgcaactatcttcaccacccatgccacgctgctggggaggtatctgtgtgctgccaacattgatttctacaatcacctcgacaaatttaacatagacaaagaagcaggagaacgacagatctatcatcgctattgtatggagagagcctcagttcattgtgcccacgtctttactaccgttagcgaaatcaccgctatcgaagcggagcacatgctaaagcgcaaacccgacgtggtgacgccaaatgggctgaacgtgaaaaagttttctgccgtgcatgaattccagaacttgcacgctatgtataaagcccgcattcaagatttcgtgcggggccacttttacggccacctggattttgacttggagaagactttgtttttattcattgcaggccgctatgagttcagtaacaagggcgcggatatctttctggaatcgctgagcaggctgaattttctgcttaggatgcataaatctgacatcaccgtgatggtctttttcatcatgccagcaaagacgaacaacttcaatgtcgagaccctcaaaggtcaggcagtcaggaagcagctttgggatgtcgctcacagcgttaaagagaaatttggcaagaaactctacgatgccctgctgcggggcgaaattcccgacttgaatgacatactggatcgggatgatttgacaatcatgaagcgtgctatcttctctacacagcgccagtcattgccccctgttaccactcataatatgatcgacgatagcacagatcctatcctgagcacaattaggcggatcggcttgtttaacaataggactgaccgcgtcaaggtcatactgcaccctgagtttctctctagcacgtcgccgctgttgccaatggattacgaagagttcgttaggggatgtcacctcggcgtgttcccttcatactacgaaccttggggatacacccctgccgaatgtaccgttatgggcattccgtccgtcactacaaatctttccgggttcgggtgcttcatgcaggagcacgtagctgacccaactgcatacggaatctacatcgtggacaggagattccgatcccctgatgactcgtgcaatcagctgactaaatttctgtatggattctgcaaacagtcaagaaggcagcgtattatacagcgcaaccggacagagcgcttgagtgacctcctggattggcgttacctgggccggtactaccaacacgctcggcacttaaccctttccagggcgtttcccgataagttccatgtggagttgacaagcccacccacgaccgaagggtttaaatatccaaggccgagcagcgtccctcctagtccatccggatcccaggccagctcgcctcaatcatcagatgtggaagacgaggttgaggatgagcgctacgacgaggaggaagaagcagagcgggacaggctcaacataaaaagcccattcagcctttctcacgtcccgcacggcaagaagaagctccatggggagtataaaaac

SEQ ID NO: 13205 - DNA, 2109 bp, synthetic construct
  misc_feature 1..2109: note = source = /note="Description of Artificial Sequence: Synthetic coding sequence"
  source 1..2109: mol_type = other DNA
atgctcagggggaggtctcttagcgtgacctccctaggcggattgccccagtgggaggtggaggagctgcctgtagaagaactattgctgttcgaagtcgcttgggaggtcaccaataaggtcggggggatatatactgttattcaaaccaaggcaaaaacaacagccgacgaatggggcgagaactatttcttgatagggccatacttcgagcataatatgaagacgcaagtggagcagtgcgagcccgtgaacgacgcagtgcgtcgagctgtggacgccatgaataaacacggctgccaagtgcacttcgggcgttggctcattgaagggtctccttatgtagtactcttcgatataggctattctgcatggaacctggatcggtggaagggagatctgtgggaggcctgctcagtaggcatcccatatcacgacagggaggctaatgacatgctgatatttggttctctgaccgcttggtttctcaaagaggtcacagaccatgcagacggcaaatatgtggtggctcaatttcacgaatggcaggccggaataggcttgattctttcaagagcccggaaattgccgatcgcaacgatctttaccacccatgcaacactgcttggacggtatctgtgcgctgcgaacatcgatttctataaccacttggacaaattcaatatagataaagaagccggtgagcgccagatttatcacaggtactgtatggaaagggccagcgttcactgtgcgcatgtctttactaccgtctccgaaattacagccatagaagccgaacacatgttgaaacgcaagcccgatgtcgtgacccctaatggactgaacgtgaaaaaattttctgcagttcacgaatttcaaaacttacatgccatgtacaaagcacgcatccaggactttgtcaggggacatttttacgggcatctggacttcgatttggagaagacactctttttatttattgcagggaggtatgaattctccaacaaaggagctgatattttcctggaaagcctgtccaggcttaactttcttctccggatgcataaatccgatatcacagttatggtctttttcattatgcccgcgaaaactaacaactttaacgtagagacgctgaaaggccaggccgtgaggaagcagttatgggatgtggcacactctgttaaagagaagttcggcaagaaactgtacgacgcactgctgcggggtgaaatccctgaccttaacgatatcctggaccgggatgacctgaccataatgaaacgggcgatcttttctacacagaggcaaagcctgccaccggtgacaacccataacatgattgatgactcaaccgatcctattcttagcaccattcgccggatcggcctgttcaataaccgtactgatcgtgtcaaagttatcctgcacccggagttcctgtcatctacctcccctctgctgcccatggactacgaagagtttgtgcgaggttgccatttaggagttttcccatcctattacgagccatgggggtacacgcccgctgagtgcactgtgatgggaattccttcagtcaccaccaatctctccggcttcggctgctttatgcaggagcatgtggctgaccctactgcctatggcatctatatagtggatcggcgctttcggtctcccgacgattcatgtaaccaattgaccaagttcctgtatggcttttgtaaacagtcccggaggcagaggatcattcaacgcaaccgcacagagagactttccgatcttctagactggagatacctgggacgatactaccagcatgcgcgccacttaacacttagcagggcctttcctgataagttccacgttgaactgaccagtcctcctacgactgaggggttcaaatatcctagaccctcatccgtcccgccgagtccctccgggagtcaggccagttctccacagtccagcgatgtagaagatgaagtggaagatgagcgctacgacgaggaagaggaagccgaacgcgatcgtttaaatataaaaagccctttcagccttagccacgtgccacatggcaagaaaaagctccacggtgagtacaagaat

SEQ ID NO: 13206 - DNA, 2109 bp, synthetic construct
  misc_feature 1..2109: note = source = /note="Description of Artificial Sequence: Synthetic coding sequence"
  source 1..2109: mol_type = other DNA
atgctcagaggcagatccctgtccgtgacctcactcggaggtctgccgcagtgggaagtcgaagaactcccagtggaggagctcctgcttttcgaagtggcatgggaggtgactaacaaggtcggcggaatctacactgtgatccagaccaaggctaagactaccgcggacgagtggggcgagaactactttctgatcggaccgtacttcgaacacaacatgaaaactcaggtggaacagtgcgaaccagtgaatgatgcagtcagacgtgctgtcgacgcaatgaacaagcacgggtgccaggtccatttcggacgctggctgatcgagggatcaccgtacgtcgtcctgttcgacatcggatactcagcctggaacctggatcgctggaagggtgacctgtgggaagcgtgcagcgtggggatcccgtatcacgaccgcgaagccaatgacatgctgattttcggctcgctgactgcttggttcttgaaagaagtgactgaccatgctgatggcaagtacgtggttgcgcaatttcatgaatggcaagccggaatcggattgatcctgtcccgcgcccgcaagctgcctatcgcaactattttcactactcatgcgaccctcctgggacgctacctgtgtgccgccaatatcgacttttacaatcacctggataagtttaacatcgacaaagaggctggggagcggcagatctaccaccgctactgtatggagcgcgcctccgtgcactgcgcccacgtgtttaccactgtctcagaaatcaccgcgattgaggctgaacatatgctgaaacgcaagcccgacgtggtgaccccgaatggacttaatgtgaagaagttctcggcggtgcacgagtttcaaaacttgcatgctatgtacaaagcaagaatccaggatttcgtcagggggcacttctacggccatctggacttcgacctcgaaaagaccctgttcctgttcatcgcgggacggtatgagttctcgaataaaggagctgatatctttctggaatcgctgtcccggctgaacttcctgcttagaatgcataagtcggatatcactgttatggtgttctttatcatgccggcgaaaactaacaactttaacgtggagacgctcaagggacaagccgtccggaagcaactgtgggatgtggctcactcagtcaaagaaaagttcggaaagaagctgtacgacgcgctgttgagaggagagatcccggacctcaacgacatcctggatcgggatgacctcaccatcatgaagcgggccatattctctacccaaaggcaatcactgccacctgtgactacccacaatatgatcgatgattccactgatccgattctgtcgactattaggcggatcggattgttcaacaaccgcaccgaccgcgtgaaagtgatcctccatccggaattcctttcgtcgacctccccgctgctgccaatggattacgaagagttcgtgcggggctgccatctgggcgtctttccgtcgtactacgagccttggggttatacgccagcggaatgcaccgtgatgggcatcccttctgtgaccactaacctgtctggattcgggtgcttcatgcaggaacatgtggccgatccgactgcctacggaatttacatcgtggaccgccgcttcagatcgcctgacgactcatgtaatcagctcacgaagttcctctacggattctgcaagcagtcacgacggcaacggatcatccagcggaaccgcactgaacggctctccgacctgctggactggcgatacctgggcaggtattatcagcacgcgcggcatctcactctgtcgagggcctttcctgataagtttcatgtggaactgacctccccgcctaccactgaaggatttaagtacccccggccgtcgagcgtccccccgagcccctcgggatcgcaggccagctcgcctcagtcctcggatgtcgaagatgaagtggaggacgaacggtacgatgaagaagaggaggcagagagagacagactgaacatcaaaagcccgttctcgttgtcacacgtgccacatggaaagaagaaactccacggcgaatacaagaac

SEQ ID NO: 13207 - DNA, 2109 bp, synthetic construct
  misc_feature 1..2109: note = source = /note="Description of Artificial Sequence: Synthetic coding sequence"
  source 1..2109: mol_type = other DNA
atgctgcgaggacgctcgttgagcgtgacttcccttggagggcttccacaatgggaagtggaagaacttccggtcgaagagctgctgcttttcgaggtcgcgtgggaggtcaccaataaggtgggaggtatctacaccgtgattcagaccaaagccaagactaccgcagatgaatggggggagaactactttctgattggaccatacttcgaacacaatatgaaaacccaggtcgaacagtgcgaacctgtgaatgatgcagtgagacgcgccgtggatgcaatgaataagcatgggtgtcaagtgcatttcggcagatggctgattgaaggcagcccctacgtggtgctctttgatatcggctacagcgcgtggaatttggatcgttggaagggtgatctgtgggaggcatgtagcgtcggcatcccctaccacgatagagaggcaaacgacatgctgatatttggttcacttactgcatggtttctgaaggaagtgactgatcacgcggacggcaagtacgtggtcgcccaattccacgaatggcaggcaggaatagggctgattctctcgagagcccgaaaactgcctattgcaaccatctttaccacccacgcgactcttctgggaagatacctctgcgccgctaatatcgacttctataatcacctggacaagttcaatattgataaggaagccggtgagagacagatataccacaggtactgtatggaaagagcatcggtgcactgtgcacacgtctttaccactgtgtcagagattactgcaatcgaagcagagcatatgctgaaacggaagcctgatgtggtgactcctaacggcctgaacgtgaagaagtttagcgccgtgcatgaattccaaaacctgcatgctatgtacaaggcaaggattcaagattttgtaaggggtcatttctacggacatctggactttgatcttgaaaaaactctttttctctttattgcagggcgttacgaattttctaacaagggggcagacatatttcttgaatccctgtcccgcctgaacttcctgcttcggatgcacaaatcggatatcaccgtcatggtgtttttcattatgcccgcaaaaaccaacaactttaatgtggaaactttgaagggacaagcagtgcgtaaacagctttgggatgtcgcacattcggtcaaggaaaagtttgggaagaaactttacgacgcgctgcttagaggagagataccagaccttaacgatattctcgatcgtgatgatttgactattatgaaaagggcgattttcagtactcagcgtcagtcgctccctcctgtgaccacccacaacatgattgatgattccaccgaccccatcctctcgacgattcgccgaattggactgttcaacaaccggactgatcgggtcaaagtgattctccatccggaatttctgagctccactagccctcttctgcctatggattacgaggaatttgtcagaggatgccaccttggtgtctttccttcgtactatgaaccttggggatacaccccagctgaatgtactgtgatgggaattccgtcagtcaccactaatctcagcggattcgggtgtttcatgcaggaacatgtggcagatcctacggcatacggtatctacatagtggataggagatttcgttcccccgacgatagctgcaaccagctgactaagtttctttatggattttgcaagcaaagcaggcgccaaaggattattcagcgcaatcgcaccgaacggcttagcgatcttctggattggagatacctcggacgctactaccaacacgcacgccacctcacgctgtcgcgagcatttcctgacaagttccacgtggagctcacttcgccccccactaccgaggggtttaagtacccgcgtcctagctcggtgcctccttcgccctccggaagccaagcaagcagcccacaatccagcgatgttgaggacgaagtggaagatgaaaggtacgatgaagaggaagaagcagagcgcgaccgcctcaacattaagtcgcctttcagcctgtcgcatgtgcctcatggtaagaagaaacttcatggcgagtacaagaac

SEQ ID NO: 13208 - DNA, 2109 bp, synthetic construct
  misc_feature 1..2109: note = source = /note="Description of Artificial Sequence: Synthetic coding sequence"
  source 1..2109: mol_type = other DNA
atgctgcgtggcagaagtctcagcgtcacttctctgggcggacttccccagtgggaggtggaagagttgcctgtcgaggagctgctcctgttcgaggttgcttgggaggtcactaacaaggtaggtggcatatacacagttatacagaccaaggctaagacaactgcagatgaatggggtgaaaactacttcctcatcggcccttatttcgagcataatatgaagactcaggtcgagcagtgcgagcctgtaaacgacgccgtcagaagggcagtggatgctatgaataagcacggctgtcaagtccatttcggtaggtggcttatcgagggcagcccctacgtggtgctgttcgatatcggttactctgcctggaatctcgacagatggaagggtgatctgtgggaagcctgttccgtgggtatcccataccacgaccgtgaggccaatgatatgctgattttcggaagcctgacagcatggttcctcaaagaggtcactgatcatgccgacggaaaatacgttgttgcccagttccatgagtggcaggctggcattggtctcatcctgtctcgcgcaaggaaactgcctatagccactatctttaccactcacgccactctcttgggtcgttatctctgtgcagcaaatattgacttttataaccacttggataagttcaatattgacaaggaggctggagagagacagatttaccaccgctactgcatggaaagagcttcagtacactgcgctcatgtttttaccacagtcagtgagattacagctatcgaggctgagcacatgctgaagcgtaaacccgacgtggtgactcccaacggcctgaatgtgaagaagtttagcgccgtgcacgagttccagaacttgcacgcaatgtataaagcaaggatccaagacttcgtccgtggacacttttacggacatctggacttcgacttggagaagaccctgttcttgttcatcgccggccgctacgagttcagcaacaaaggtgccgatatatttttggagtctttgagccgtctgaacttcctcctgaggatgcacaagtccgatatcaccgtaatggtcttctttatcatgcctgccaagacaaataactttaacgtagagactctgaagggccaggcagtgagaaagcagttgtgggatgtcgcccacagcgtcaaggaaaagttcggcaaaaagttgtacgacgctttgctgaggggtgaaatcccagatttgaacgacattctggaccgtgatgatttgactattatgaagcgtgctatcttctcaactcagcgtcaatctctgccccctgtgactacccacaacatgatagatgattccacagaccccatccttagcactatcagacgcattggtttgttcaataatagaacagatcgcgtcaaagtgatccttcacccagaatttctgagttccaccagtccattgttgccaatggattatgaggagtttgtccgtggctgtcaccttggtgtgtttcctagttattatgaaccatggggttacacccctgccgagtgcacagtgatgggcattccatctgtcactaccaacctgtccggcttcggctgttttatgcaagagcatgtggcagatccaaccgcctacggcatctacatcgtagataggcgttttaggagccccgacgacagctgtaatcagctcaccaaattcctttacggattctgcaaacagtcaaggcgccaaaggataattcagagaaatcgtaccgagagattgagtgatctcctggattggaggtacctgggccgctactaccagcacgctagacacttgactctgagtcgtgcttttcctgataagtttcacgtggagcttacatccccaccaactactgaaggcttcaagtacccaaggcccagcagcgtgcctccaagcccatctggtagccaggcatcctccccacagagttcagatgtggaagacgaggtagaggatgagaggtacgatgaggaggaagaagccgagcgcgacaggctcaacatcaagagccctttttctctgtcccatgtcccacatggaaaaaagaagttgcatggtgagtataagaat

SEQ ID NO: 13209 - DNA, 2109 bp, synthetic construct
  misc_feature 1..2109: note = source = /note="Description of Artificial Sequence: Synthetic coding sequence"
  source 1..2109: mol_type = other DNA
atgttgcggggtagaagcctcagcgtcacctcgctgggaggactgccgcagtgggaggtcgaggaactgccggtggaggaactgctgctctttgaggtggcatgggaagtgactaacaaggtcgggggcatctacaccgtgatccaaacgaaagcaaagaccactgcggacgagtggggagagaactacttcctgatcggaccgtacttcgaacataacatgaaaactcaggtggagcagtgcgagccggtcaacgacgccgttcgccgggcagtcgatgccatgaacaagcacggctgccaagtgcactttggccggtggctcatcgaaggaagcccgtacgtggtgcttttcgacattggatattccgcttggaacctcgacagatggaagggtgacctctgggaagcatgctccgtaggcatcccttatcacgatcgggaggcgaatgatatgctcatcttcggctccctgactgcctggttcctgaaggaagttaccgaccacgccgacggaaagtacgtggtcgcccaatttcacgagtggcaagcgggcatcggactcatccttagccgagcccggaagctgcccatcgcgaccatcttcaccactcatgcgacgctgctgggccgctacctgtgcgccgccaacatcgacttctacaatcacctggataagttcaatatcgacaaggaagcgggagaacggcaaatctaccaccgctactgtatggaacgggcgagcgtgcactgtgcccacgtgtttactaccgtctcggaaatcactgccatcgaagctgaacatatgcttaaacggaagccagacgtcgtcactccaaacggactgaatgtgaagaagttcagtgcagttcatgaattccaaaacctgcatgctatgtacaaggccagaatacaggactttgtgaggggacatttctacgggcatcttgacttcgacctggaaaagactctgtttcttttcatcgcggggagatacgaattctccaataagggcgcagacatttttctggaaagtctttcaagactgaacttcctgctgcgcatgcacaagtccgatatcactgtgatggtgttcttcatcatgccggcaaagaccaacaatttcaatgtggaaactctgaagggtcaggccgtgaggaagcaactgtgggacgtcgcacactcggtgaaagagaagttcggcaagaaactgtacgacgcactgctccgcggtgagattccggacctgaacgatatcctggaccgagatgacctgactataatgaaaagagcaatcttttcaactcaaagacagtcactgcccccagtgacgactcacaatatgatcgacgacagtaccgacccaatcctttcaaccattcggcgcatcggactgttcaacaacagaaccgacagggtgaaggtcatcctgcatccggagtttctgtccagcacttcaccgctgctccctatggactacgaggaattcgtccgcggatgccatctgggggtgttcccgtcttactacgagccatggggctacaccccagccgaatgcaccgtgatgggtatcccgtccgtgaccaccaacttgtcgggattcggttgctttatgcaggaacacgtagccgatcccaccgcttatggaatctacatcgtggaccgccggttccgctcgccagacgattcctgcaatcagctgaccaagttcctttacggattctgcaagcagtcacgccggcagcggattatccagagaaaccgtaccgagagactctcggacctgctcgactggcggtacctcggaaggtactaccagcatgcacggcatctgactctctcccgggcgttccctgacaagttccatgtggagctcacttccccgcccaccactgaagggttcaagtacccgcggccttcgtccgtcccgccaagcccaagcggctcgcaggcctcctcgccgcagagctcggatgtggaggacgaagtcgaggacgagagatacgatgaagaagaggaggcggaaagagatcgcctgaacatcaaatcgccgtttagcctgtcgcatgtgccacacggcaagaagaaactgcacggagagtacaagaat

SEQ ID NO: 13210 - DNA, 2109 bp, synthetic construct
  misc_feature 1..2109: note = source = /note="Description of Artificial Sequence: Synthetic coding sequence"
  source 1..2109: mol_type = other DNA
atgcttcgtgggcggtcacttagcgtgactagcctcggaggcctcccacagtgggaagtcgaagagctgccggtcgaagaacttctgctttttgaggtggcctgggaagtgactaacaaggtcggtggaatatacactgtcattcaaactaaggcgaaaaccaccgcagacgaatggggcgagaactactttctcattggcccatacttcgaacacaatatgaaaactcaagtggaacaatgcgaaccagtgaacgatgctgtccgaagagcagtggatgcaatgaacaagcatggatgtcaggtgcattttggccgatggcttatagagggttcgccgtatgtagtgctgtttgacattggctactccgcatggaatctggacaggtggaaaggcgacctgtgggaagcatgctctgtggggatcccttaccacgatagagaggcaaacgatatgctgatatttggatcacttactgcatggttcctgaaggaagtcactgatcacgccgatggtaagtacgtggtcgcacaatttcatgaatggcaggcgggaatcggtcttattctgtccagagctaggaaattgccaatagcaactatctttaccacccacgcaaccctgctgggacggtacctttgcgctgcaaacattgatttctacaaccacctggacaagttcaatatagataaggaggctggtgaaaggcaaatctaccacagatactgtatggaaagagcatcagtgcattgtgctcatgtgtttaccactgtgtccgaaatcaccgcaattgaagcagaacatatgctgaagagaaagcctgatgtggtgactcctaatggactcaacgtcaagaagttttcggcagtgcacgagttccagaaccttcatgccatgtacaaggcgagaatccaagactttgtgcgtggacacttttacggacatctggactttgatcttgaaaagaccttgttcttgttcatagccggaaggtacgaattctcaaataagggggcagacattttcctggaatcgctgtcccgtctgaattttctgcttaggatgcataagtccgatattaccgtgatggtgttcttcatcatgccggccaagaccaataactttaatgtggaaaccttgaaaggtcaagcggtgaggaagcaactctgggatgtggcacacagcgtcaaagagaaattcggtaagaaactttatgatgcattgctgagaggagagattccagatctgaacgacattctggaccgcgacgatttgaccattatgaaacgcgcgatcttttccactcaacgccagtcccttcctccggtcactacgcataacatgattgacgattcgaccgaccctatcctcagcaccatccggcgcattggactctttaacaacaggactgatcgggtcaaggtgattcttcatccggagtttttgagctctacttctccactgctccctatggactacgaagaatttgtgagaggttgtcatcttggtgtctttccatcatactacgagccatggggctacaccccagcagagtgcaccgtgatgggaatcccatcggttaccacgaacctgtctggatttgggtgttttatgcaagagcatgtggcagacccaaccgcgtacggcatttacattgtcgataggagatttcgatcccctgacgattcctgtaatcaactgacgaaatttctctacggtttctgtaagcagagccgcagacaacgcatcatccaacgaaatcgtacggaacggctttccgatctgcttgattggagataccttggacggtactaccagcatgccagacacctgaccctgtcaagggcatttccagataagtttcacgtggagcttacttctcccccaactacggaaggatttaagtaccctcgcccttcatccgtccccccatcaccttccggaagccaggcctcctcccctcagtcctcagatgtagaggatgaagttgaggatgaacgctacgatgaggaagaagaagcagaaagggataggctcaacatcaagtcgcctttctctctctcgcatgtcccgcatggaaagaaaaagctccatggagaatacaaaaat

SEQ ID NO: 13211 - DNA, 2109 bp, synthetic construct
  misc_feature 1..2109: note = source = /note="Description of Artificial Sequence: Synthetic coding sequence"
  source 1..2109: mol_type = other DNA
atgttgcggggacgcagcctcagcgtgacttcgctgggaggactcccgcagtgggaggtcgaggagctgcccgtcgaagaactgctgctcttcgaggtggcatgggaagtcactaacaaagtgggaggaatctacacggtgatccagactaaagcgaaaaccacggcagacgaatggggagagaactactttctgatcggaccttactttgaacataacatgaaaactcaagtggaacagtgcgaaccggtcaacgacgctgtgcgccgggcggtcgacgcgatgaataaacacggatgtcaggtgcatttcgggcgctggctgatcgaagggtcgccttacgtggtcctgtttgacatcggctactccgcttggaacctcgacagatggaagggcgacctgtgggaggcttgttccgtgggaatcccataccacgatagagaagccaacgacatgctgatcttcgggtcactcaccgcctggttcctgaaggaggtcactgaccacgccgatggaaagtatgtggtcgcacagttccatgagtggcaggccgggatcggactgatcctttcgcgggccaggaagttgccgatcgcaactatcttcactacccacgccaccctcctgggccggtacctgtgcgcagctaacatcgacttctacaaccacctggacaaattcaacatcgacaaggaggctggagaacgccaaatctaccatcgctactgcatggagagggcatcagtgcactgtgcgcacgtgttcacgacggtcagcgagatcactgccatcgaagcggaacacatgctgaaacggaaacccgacgtggtcactccgaacggcctcaatgtgaagaaattctcggctgtccacgaattccagaatcttcacgctatgtacaaggcccggatccaggacttcgtgagaggacacttctacggacaccttgatttcgacctggaaaagactctgttcctgttcattgctggcaggtacgagttttccaacaagggcgccgacatcttccttgagtccctgtcgagactgaatttcctgctccgcatgcataagtctgacattaccgtcatggtgttcttcatcatgcctgccaagactaataactttaacgtggaaaccctgaaggggcaggcagttcggaagcagctgtgggacgtcgcccactccgtcaaagaaaagttcggaaaaaagctctacgatgccctcctgcggggtgaaatacccgacctcaacgatattctggatcgggatgatctgactatcatgaagagagccattttctccacccagcggcagtcactgcctcctgtcactacccataacatgatcgacgactccaccgatcctatcttgtcaaccatcagacgcatcgggctcttcaataaccgaaccgatagagtcaaggtgatccttcaccctgaattcttgtcatccacttcgccgctgctgcctatggactacgaggaattcgtccgcggatgtcatcttggcgtgttcccgagctattacgaaccctggggctacacccctgccgagtgcacggtgatgggaatcccttcagtgactactaacctgtcaggctttggatgtttcatgcaagagcatgtggcagacccaacggcctacggcatttacattgtggaccggcggttccgctcgccggacgattcgtgcaaccaactgactaagttcctttacggattctgtaaacaatcgcgccggcagcggatcatccagcgcaacaggactgaaagactctcggacctgttggattggagatacctgggacggtactaccagcacgcccgccatctgacgctgagccgcgccttcccggataagtttcatgtggagcttaccagcccaccgactactgaggggttcaaatacccgcgtccgtcatcggtgccgccctccccaagcggaagccaagcctcatccccgcagtcgtcagacgtggaggacgaagtggaagatgagagatacgatgaggaagaagaagcggaaagagacagactgaacatcaagagcccgttttcgctcagccatgtgccccatggcaagaagaaactccacggagaatacaagaac

SEQ ID NO: 13212 - DNA, 2109 bp, synthetic construct
  misc_feature 1..2109: note = source = /note="Description of Artificial Sequence: Synthetic coding sequence"
  source 1..2109: mol_type = other DNA
atgcttaggggcaggtcgcttagcgtgacctccttggggggcctgcctcagtgggaagtggaagaacttccagtggaagagcttcttctttttgaggtggcatgggaagtcactaacaaggtcggtggcatctacactgttatacaaactaaagcaaaaactaccgccgatgagtggggtgagaactactttctcataggtccttactttgaacataacatgaaaacccaagtggaacagtgtgagccggtcaacgacgcggtgcgcagggctgtcgacgcaatgaacaaacatggatgtcaagtgcactttggccgatggcttatagagggatcgccttacgtggtcctttttgatatcggttactccgcatggaatctggatagatggaagggagatctgtgggaggcatgctcggtgggaatcccataccacgatcgagaagcaaacgatatgctgatttttggatccctgaccgcctggtttctgaaggaagttaccgatcatgcagacggtaagtacgtcgtggcccaatttcatgagtggcaagcaggtatagggcttattctgtcgagggcgcgaaaactgcctatcgcgaccattttcaccactcatgcaactcttttgggacggtacctttgtgcggcgaacatcgatttctacaatcatctggataagtttaacatcgataaggaggcaggagaaagacagatttaccacaggtactgcatggaacgcgctagcgtgcactgcgcccatgtgttcaccactgtgtcagagatcaccgccattgaagcagaacatatgttgaagagaaagcctgatgtggtgaccccgaatggtctgaacgttaagaaattctccgcagtgcatgagtttcaaaatctccatgccatgtacaaggcacggattcaagatttcgttcgaggccatttctacggacatctggattttgatctggaaaaaactctttttctctttatcgcagggaggtacgagttttcgaacaaaggagccgacatattcctggaatccctttcccggctcaatttcttgcttcgtatgcataagtcagatattaccgtgatggtgttcttcattatgcccgcgaaaaccaacaatttcaacgtggaaaccctgaaagggcaagccgtgagaaagcaactgtgggatgtggctcattcagtgaaggagaaatttggtaaaaagctgtacgatgcgttgcttagaggtgagattcccgacctgaatgatatacttgatcgcgatgatttgaccattatgaagagagcaattttctcgactcaaagacagtcacttccacctgtgactacccataacatgattgatgattcaaccgatcctatcctttcaaccattaggagaattggactgttcaataacagaaccgatagagtcaaggtgattcttcacccagaattcctttcgtcaacgtccccccttttgcctatggactacgaggaattcgtccgcggatgccatctcggtgtctttccgtcttactacgaaccctgggggtacactcccgcagaatgtactgtgatggggataccttccgtcaccacgaacctgagcggatttggctgtttcatgcaagaacatgtggcggatccaactgcatacggaatttacattgtggaccgtagatttcggtccccagacgattcctgtaaccagcttaccaagtttttgtacggtttttgtaagcaaagcagacgccaaagaattatccaacgcaatcgaaccgagcggctctcagatctgttggattggcggtatctgggtcggtattaccaacatgcccgccatttgacccttagcagagcttttcccgataagtttcacgtggaactcacctcccctcctaccactgagggatttaagtacccgcgtccctcgtcagtgccgccttcaccttcaggatcacaggcatcgagtccacaatcctcggacgtagaagatgaggtcgaagatgagcggtacgatgaagaggaggaagcggaacgggatcgcctgaacattaagagccctttctccctctcacacgtgccacacgggaagaaaaagctgcatggtgaatacaagaat

SEQ ID NO: 13213 - DNA, 2109 bp, synthetic construct
  misc_feature 1..2109: note = source = /note="Description of Artificial Sequence: Synthetic coding sequence"
  source 1..2109: mol_type = other DNA
atgttgcggggacgcagtctgtcagtgacttctctcggagggcttccccagtgggaggtggaagaactccctgtagaagaacttcttcttttcgaagttgcctgggaagtgacaaataaagtggggggaatctatactgtgattcagacaaaggccaagacaactgcagacgagtggggggaaaattatttcctcatcggaccttactttgaacataatatgaaaacacaggtggagcagtgtgaacctgtgaatgatgctgtgcggcgagcagttgatgctatgaacaagcacggatgtcaggtgcactttggaagatggcttattgaaggatctccttatgtagtgctgttcgacatcgggtattctgcttggaatcttgatcgctggaaaggagacctgtgggaagcttgttccgtcgggataccatatcatgatagggaagctaatgatatgttaatcttcgggtctcttacagcctggtttttgaaagaagtaacagatcacgctgatggaaaatacgtggtggcacagtttcatgaatggcaggccgggataggacttattctgtcacgggccaggaaattgcctattgcaacaatttttactacacacgccactcttcttggaagatatctgtgtgccgctaacatagatttttacaatcacctagataaattcaacatcgacaaagaagccggggaaagacagatctatcatcggtattgtatggaaagggcatctgtgcactgtgcacatgtgttcactactgtctctgaaatcacagctatagaggctgaacatatgttgaaacgcaaacccgatgttgtgacaccaaacggactcaatgtgaaaaaattctcagccgtgcatgaattccagaaccttcacgctatgtacaaagcgagaatccaggattttgtgagagggcatttttatggacacctcgacttcgatttggaaaaaacattatttctgtttatagctgggaggtacgaattctccaataaaggggcagacatatttctggaatctctctcaagattgaacttcctccttcgaatgcacaaaagtgacatcacagtgatggtattctttatcatgcccgctaaaacaaacaacttcaacgtggaaacactcaaaggacaggcagtgagaaaacagctatgggatgtggcccatagtgtgaaggaaaaattcgggaaaaaactatacgatgccctcctcagaggggaaatcccagatctcaacgacatactcgatcgggacgatctgacaatcatgaaaagagccatatttagtacgcaaaggcagtcactaccccccgtgacaacacacaacatgatcgatgatagtacagatcctatcctttctacaattaggaggatcggattgtttaataacaggactgatcgagtgaaggtgattctgcatcccgaatttctgtcatctacatcacccctgttgcctatggattatgaagagtttgtacgcgggtgtcacctaggggtgttcccttcttactatgaaccatggggatacactccagcagaatgtactgtgatgggaatcccaagtgttacaacaaacctttccggattcggatgcttcatgcaggaacacgtggccgatcccactgcatatggaatctatatcgtagatcgccgattccggtcccctgatgatagttgtaatcagctcactaaattcctctatgggttttgtaaacagtcccgacggcagcgcataatccagagaaaccggacagaaaggctctctgatctactcgattggagatacctggggcggtattatcagcacgcaaggcacctaacactctccagagcattccccgataagtttcacgtagaactcacatcaccacccacaactgaaggatttaaatatccaaggcccagttccgtgccaccttccccatcagggtctcaggcatcttctcctcagagttccgacgtcgaggatgaggtggaagatgaaagatacgatgaagaagaagaagcagaacgggatcgactcaatataaagtctccctttagtctgagtcacgtacctcatggaaaaaaaaagctgcatggagaatataaaaac

SEQ ID NO: 13214 - DNA, 2109 bp, synthetic construct
  misc_feature 1..2109: note = source = /note="Description of Artificial Sequence: Synthetic coding sequence"
  source 1..2109: mol_type = other DNA
atgctccgaggccgtagcctgagtgttacttctctaggagggctaccccagtgggaggtggaagaactccctgttgaagaattgctgctgttcgaggtcgcgtgggaagtcactaacaaagtcggtggaatatatacagtgatccagaccaaggccaaaactacagccgatgaatggggcgagaattacttcctcatcggaccatacttcgaacacaatatgaaaacgcaggttgaacagtgtgagcctgtgaacgatgcggtgcgtcgggccgtggatgcgatgaacaagcacggctgtcaggtccatttcggccggtggttgatagaaggatccccatacgtagtgttattcgacattggttatagcgcttggaatctggaccggtggaaaggcgacttgtgggaagcttgttcagtgggaataccctatcatgatcgggaagcaaacgacatgctaatattcggctcccttaccgcctggttcctaaaagaggtcactgaccacgccgacgggaaatacgtggtggcccagtttcacgaatggcaggcgggcattggattgatcctgagtcgagctcggaagctgcccattgctactatttttactacgcacgcaaccttgttgggcaggtacctgtgcgcagccaacatagacttctacaaccatctggacaaattcaacatcgacaaagaggcaggggaaagacagatttatcaccgctattgtatggagcgtgcctcagttcattgcgcccacgtctttacaaccgtgtcagaaatcactgccatcgaggcagagcacatgttgaaacggaaaccagacgtggtcactccaaacggtctgaacgtcaaaaaattctctgccgtccatgaatttcagaatctgcacgcgatgtataaggcgcgaatccaggactttgtgcgtggccatttctatggccatttggacttcgacctggagaagacattatttctgtttatcgcaggccgatatgagtttagtaacaaaggagctgatatcttcctagaatcattatctcgattgaactttcttcttcgtatgcacaagtcggatatcaccgtgatggtattcttcataatgcccgcgaagacaaataatttcaatgttgagaccctgaagggtcaagctgtaaggaagcagctgtgggacgtcgcccactccgtaaaggagaagttcggaaaaaagctgtacgacgcccttttgcgcggagaaataccagatctgaatgatatattagatcgcgatgatcttaccatcatgaagcgggcgattttctcgacgcagcggcagagcctgcctcctgtcactacacataatatgattgacgacagcaccgaccctattctttctaccattcggaggattggccttttcaacaatcggacagacagagtgaaggtcattctccatccagaattcctttcaagtacatctccgctcttgccaatggactacgaggagttcgtaaggggatgtcatttaggcgtgtttccatcctactacgagccatgggggtacactccggcagaatgtaccgtaatggggataccatccgtcaccaccaatctatccgggttcggttgcttcatgcaagagcacgtcgcagatccaaccgcatacggcatctacattgtcgatagacgtttcagaagccccgatgactcatgtaaccagctgaccaaattcttgtacggattttgtaaacaatcccgtcgccaacgtatcatacaaagaaatcgtactgaacgcctgagcgatcttctggattggagatatctggggaggtattatcagcacgcgcggcatctgactttgagcagggcttttccagacaaattccatgtcgagctgacgagtccccccaccacagagggattcaagtacccccggcctagctctgtgcccccctcaccaagcggttcacaggcttcatccccacagagctccgacgtagaggacgaggtagaagatgagcgctatgacgaggaggaggaggctgagcgagataggcttaatatcaagtcccccttcagccttagtcacgtgcctcacggtaaaaaaaagctgcatggtgagtataaaaat

SEQ ID NO: 13215 - DNA, 2109 bp, synthetic construct
  misc_feature 1..2109: note = source = /note="Description of Artificial Sequence: Synthetic coding sequence"
  source 1..2109: mol_type = other DNA
atgctgcgtggtcgttctctgtccgttacctctctgggtggtctgccccaatgggaggttgaggagttgcctgtggaggaactgctgctgttcgaagttgcatgggaagtcaccaataaagtgggtgggatttacacggttatccaaaccaaggcgaagacgacggcagacgagtggggcgagaactactttctgattggtccctattttgagcacaatatgaagactcaagtcgaacagtgtgagccggttaatgatgcagtgcgacgggccgtggatgctatgaacaaacatggttgccaggttcatttcggacgctggctgattgaaggcagcccgtacgtggttctgtttgacattggctactcggcgtggaacctggatagatggaagggcgacctgtgggaagcttgctctgtgggtattccgtaccacgatcgtgaggctaacgatatgttgattttcggtagcttgacggcttggtttctcaaagaggtcaccgatcacgcggacggtaagtatgttgtcgcgcagttccatgagtggcaggcggggattggtctgatcctgtcccgcgcgcggaaattgccgatcgcgactatcttcacaacgcatgccactctgcttggacgttacctgtgtgcagcgaatattgacttctacaatcatctggacaagtttaacattgacaaggaagcgggtgagcgtcagatctaccaccgctactgtatggagcgcgcgagcgtacactgcgcgcatgtcttcaccacggtgtccgagatcaccgctattgaggccgagcacatgctgaagcgtaaacctgacgttgtgacccctaacggacttaacgtgaagaagttctccgctgtgcacgagttccagaatctccacgcgatgtacaaggcacgcattcaggactttgtgagagggcacttttatgggcacctggatttcgatttagaaaaaacactctttctgttcatagcgggccggtacgagttcagcaataagggcgccgacatctttcttgagtctctgagcagactcaacttcctgcttcgcatgcacaaaagtgatattaccgtgatggtgttttttataatgccagccaagactaataactttaacgtggaaacactgaaaggtcaggccgttaggaagcagctgtgggatgttgcacacagcgttaaggagaagttcggcaagaagttgtacgatgctttgctgcgaggagagatccctgatctgaacgacatactggaccgggacgatctgaccattatgaagcgtgctatttttagcacccagagacagtctctgccaccggtcactactcataacatgatcgatgatagcactgatcctattctctccactattagacgtatcgggcttttcaataatcgaacggatcgagttaaggttattttgcacccggagttcctgagcagcactagcccgctgttgccaatggactacgaggaatttgtgcgcggatgtcatttgggcgtcttcccgtcctactatgagccttggggttatacccccgcagagtgtaccgtcatgggcatcccgagcgttacaacaaacttgagcggtttcgggtgctttatgcaggagcacgttgctgatccaaccgcttatggaatttatatcgtggatcgtcggttccgtagccctgacgacagctgcaaccaactcactaagttcctgtatggtttctgtaagcagtcccgccgtcaacgcataatccaacgtaacagaacagagcgcctgtcagatctgctggattggcgctacctgggcaggtactaccaacatgctagacacctcaccttgagccgcgcgttccctgacaagttccatgtggaattgacttctcctccaaccacggaagggtttaagtatccaaggccaagcagtgttccgcccagtccatctgggtcccaggcaagcagcccacagtctagcgacgtcgaagacgaagtcgaagacgagagatatgatgaagaagaagaggctgagcgcgaccgtctgaacatcaaaagccctttctcgctgtcccacgtcccgcacggcaaaaaaaaactgcacggcgaatacaagaac

SEQ ID NO: 13216 - DNA, 2109 bp, synthetic construct
  misc_feature 1..2109: note = source = /note="Description of Artificial Sequence: Synthetic coding sequence"
  source 1..2109: mol_type = other DNA
atgctgagggggagatcgctatccgtgacctccttgggcggattgccacagtgggaggtggaagaactgcccgttgaggaacttctacttttcgaggtggcttgggaagtgaccaacaaggttggtggcatttacacagtcatccagacgaaagctaaaactacggccgacgagtggggcgaaaattacttcctcattggcccatatttcgagcataatatgaaaacgcaggtagagcagtgcgaaccggtgaatgatgccgtgcgcagggcagtagacgccatgaacaaacacgggtgccaggtccacttcggccgttggctaatcgaggggtcaccctacgttgtcctgttcgatatcggttacagcgcttggaacctggataggtggaaaggcgacctgtgggaggcatgttccgttggcatcccttatcacgatagggaggctaatgacatgctcatcttcggctctctgacagcctggttcttaaaagaagtcactgatcatgcagatggcaagtatgtggtagcacagttccatgaatggcaggcggggatcggcctgatcctgtcacgcgcacgcaagttgcctatagccaccatttttactacgcacgccacactgctgggacgctacttatgcgctgccaacattgacttttataatcacctggataagttcaacatcgataaggaagcaggtgaacggcagatctatcaccgctactgtatggaaagagcaagcgtgcattgcgctcacgtctttaccaccgtcagcgagatcaccgcgatagaagccgagcacatgctgaaacgcaagcccgacgttgtcaccccaaatggactgaatgtgaaaaagttttcagccgtccatgagttccagaacttacatgcgatgtataaagccaggatccaggattttgtgcgcggtcacttttacggacacctggattttgatttagagaagactctgttcttattcatcgccgggaggtacgagttcagtaataagggggcagacattttcctggagtcactctctagactgaattttctactgaggatgcacaagtccgatatcaccgtgatggtcttctttatcatgcccgcgaaaactaataactttaacgtggagacactcaagggacaggccgtcaggaagcagctgtgggatgtcgcccacagtgtcaaagagaagttcggaaaaaagttgtatgacgcactgcttcgtggtgagatccccgacctgaatgacatactagatcgagatgatctgacaattatgaaacgtgctatcttttccacccagcggcagtccctgcctccagtgacgacccataatatgatagatgatagtaccgaccccattttaagtaccatccgacgcataggcttgtttaacaatcgtaccgaccgggtgaaggtcatacttcaccccgaatttctgtcctctacctctcctttgctgccaatggattatgaggagttcgtcaggggttgccatcttggagtgtttccctcgtattatgagccctggggctatactcccgcagagtgcactgtaatgggaatcccgagtgtgacaacaaacctgagtggctttggctgtttcatgcaagaacacgtggccgatcccactgcctacggcatttatatcgttgatcgcagattcagatcacctgacgatagttgcaaccaactgactaaattcctctacggcttttgcaagcaatctaggcgccagcggatcatccagagaaatagaaccgagagactgtcggacctgcttgactggagatatctgggaaggtattaccaacacgcacgacacctcaccttgtccagggcttttcccgataagtttcatgtggaattgacgagccccccgacgacagagggttttaaataccctcgccccagctctgtgccaccttcccccagcggatcacaggcttcctccccacagtcatccgacgtggaagatgaggtggaggacgagagatatgatgaggaagaagaggcggagagagacagactcaacatcaagtcaccgttctccctgtcgcacgtcccccatggaaaaaagaagctccacggggagtacaaaaat

SEQ ID NO: 13217 - DNA, 2109 bp, synthetic construct
  misc_feature 1..2109: note = source = /note="Description of Artificial Sequence: Synthetic coding sequence"
  source 1..2109: mol_type = other DNA
atgctgcgcgggaggtccctgtccgtgacgagcttaggtggtctgccacaatgggaggttgaagagctacctgtggaggaactattgttatttgaggtggcctgggaggtcaccaacaaagttggggggatctacaccgtgattcagacgaaggctaagacaacagcagatgagtggggcgaaaattactttcttatcggcccctactttgaacataatatgaagacccaggttgagcagtgcgaacctgtgaacgacgccgtgcggcgggccgtggacgccatgaacaaacacggttgtcaggttcattttggccgatggctcattgaaggttccccgtacgtggtcctattcgacataggctactctgcctggaatctggacaggtggaagggcgacctctgggaagcctgttctgtcggtatcccctaccatgaccgggaagctaacgacatgcttatatttgggagcctgaccgcatggtttttgaaagaggtcactgatcatgccgacggcaagtatgtggtcgcccagtttcatgagtggcaagctggaattggcttgatcctatctcgggcccgtaaattgcccatcgctacaatcttcactacacatgctacactgctcggcaggtacctgtgtgctgctaatattgacttttataatcacttagataaattcaacatcgataaagaggcaggcgaaagacagatctaccatcgatactgcatggaaagggcctccgtacattgcgcccacgtgtttaccacagtgtcagagattacggcgattgaggccgagcacatgttgaagcgcaaaccagatgtagtaactcccaatggtcttaacgttaagaagtttagtgcggtgcacgagttccagaacttacatgctatgtacaaggcccgaatacaagacttcgtaagaggacacttttacggtcacctggatttcgatctcgagaagactttatttttgtttatagctggccggtatgagttctctaataagggcgcggatattttccttgaaagcctctcccgtttaaacttccttcttaggatgcataaatcagatatcaccgttatggtgttttttatcatgccagcaaagactaataacttcaacgtggagactctgaaagggcaggcagtccgcaaacagctctgggacgtggcccacagcgtgaaggaaaagttcggcaagaaactctatgacgcactgctcagaggcgagattcctgacctcaatgacatcctcgaccgggacgatctcactatcatgaaacgtgcaatctttagcacacaacgacagagcttgccccctgtgaccactcacaatatgatcgatgatagcactgacccaattctatccactatccgcaggataggcctctttaacaaccgaactgacagggtcaaggtcatcctgcaccctgagtttctgtcctctacatccccgctccttcccatggactacgaagagtttgtgcggggctgccacttgggcgtcttcccttcttactatgagccctggggctacacaccagctgaatgcacagtcatggggattccctccgtcaccactaatttgtctggcttcgggtgcttcatgcaagagcacgttgccgaccccacagcctatggaatctacatcgtcgaccgacggtttcgctctccggatgactcgtgcaaccaactcactaagtttctttatggtttctgtaagcagtctaggaggcagagaatcattcaacggaacagaaccgagcgcctctccgatctgcttgattggaggtacctggggcgatactaccaacatgcacgacatttgacactgagcagagcatttccagacaaattccatgtagaattgacaagccctcccaccactgaggggttcaaatatcctagaccctcatctgttcccccaagcccctcgggctctcaggcttccagtccccagtcatccgatgtagaggatgaagtggaggatgagagatacgacgaggaggaggaagccgaacgggataggctgaacattaagtccccattctccctgagccacgttccccatgggaaaaaaaagttacacggagagtataaaaac

SEQ ID NO: 13218 - DNA, 2109 bp, synthetic construct
  misc_feature 1..2109: note = source = /note="Description of Artificial Sequence: Synthetic coding sequence"
  source 1..2109: mol_type = other DNA
atgctccgtggaagatcgctgagtgtgacgtcgctgggtggattaccacagtgggaagtggaggagttgcctgtcgaagagctgctcctgtttgaagtcgcctgggaagtcactaataaagtcggtgggatctacaccgtgatccagactaaggcaaagacaacagctgatgagtggggcgaaaattacttccttatcggcccttatttcgagcacaatatgaaaacccaggtggaacagtgcgagcccgtgaacgatgctgtgcgacgcgctgtcgatgccatgaataagcatggatgccaggtgcactttggacgctggttgatcgaagggtccccatatgtggtgctgttcgatattggctactcagcctggaacctcgaccgctggaagggcgacctatgggaggcttgttctgtggggatcccttaccatgaccgcgaggcgaacgacatgctaatcttcggctcactgactgcctggtttctcaaagaagtgacagaccacgctgatgggaagtacgtcgtggctcagtttcacgagtggcaggccggtatcggtctgattctgagcagggctcggaagctaccaatagctaccatctttacaactcatgctacattgctgggccgctacctgtgcgccgcgaacattgatttttataaccatctggacaagtttaatatagacaaagaagctggggaacgacagatttatcaccgatactgcatggagagggctagcgtccattgcgcgcacgtgtttactaccgtgtccgaaatcacggcgattgaagctgagcacatgctgaagcggaagccagacgttgtcacacccaacgggttgaatgtcaagaagttctccgccgtccacgaattccagaacctccatgccatgtataaagccagaattcaggacttcgtgagggggcacttttatgggcacctcgattttgatctggagaagactctcttcttgttcatcgcgggaaggtatgagttttccaacaaaggtgctgacatttttctggaaagcctttcgagactcaacttcctactgcggatgcacaaatccgatattaccgtgatggtattcttcattatgccggcaaagacgaacaatttcaacgttgagacactgaagggacaagccgttaggaaacagttgtgggacgtcgcccacagcgtgaaggagaagtttgggaaaaagttgtatgatgctttgctcagaggcgagatacctgatcttaacgatatccttgacagggacgatcttaccatcatgaaaagggctatttttagcacccagcggcagagtctgccgccggtgaccacacacaacatgatcgatgatagcaccgatcctatcctgtcaactataagacgcattggcctttttaataaccgaacagatcgcgtgaaagtgatactgcacccggaatttctctcttctaccagccccctgttacctatggactatgaagaattcgtgagagggtgccacctcggcgtcttcccgtcatattatgaaccctggggctacacccctgctgagtgcacagttatgggaatcccctccgtcacaaccaacctgagcggattcggatgctttatgcaggagcacgtcgccgatccgactgcatacggcatctacattgtcgaccgaagattcagatctcctgatgattcttgtaaccagttaactaagttcctgtacggcttttgcaaacagagtcggcgccagcggatcatccagagaaaccggaccgagcgcttatcagatctgctggattggcggtatctgggacgatactatcagcacgcaaggcacttaacattgagcagagcttttcccgacaaattccatgtggaattgaccagtccccccacaaccgaggggttcaagtatccgaggcctagctccgtgcccccctctccctctggatcacaggcaagttcgccacaatcctccgatgttgaggacgaggttgaggatgagcggtacgatgaggaggaggaagcagagagggacagactcaacattaagagtcccttctctctatcccacgtgccccatggtaaaaagaagctccacggcgagtacaagaat

SEQ ID NO: 13219 - DNA, 2109 bp, synthetic construct
  misc_feature 1..2109: note = source = /note="Description of Artificial Sequence: Synthetic coding sequence"
  source 1..2109: mol_type = other DNA
atgctgcggggacgctcgcttagcgtgacgtcattgggtggactgccgcagtgggaagtagaagagctgccagtcgaggagctgctcctcttcgaagtggcctgggaggtcactaataaggtgggtgggatttacaccgtgatccagaccaaggccaagaccactgccgatgaatggggtgagaactactttctgattggcccatacttcgaacacaacatgaaaacccaagtcgaacagtgcgagccggtcaatgacgcagtgcggcgggctgtcgatgcaatgaataagcacggttgccaagtgcatttcggacggtggctgattgagggtagcccgtacgtggtgctgttcgacatcggatactcggcctggaatttggacagatggaagggtgacctgtgggaggcgtgctcagtgggaatcccttaccacgatcgggaggcgaatgatatgctgattttcggatcgctgaccgcctggtttctgaaagaagtcaccgaccacgccgacggcaagtacgtggtcgcccagttccacgaatggcaggccggaatcgggttgatcctctcccgcgcccgcaagctgccaattgccaccatcttcaccactcatgcgacgttgctgggtcggtacctctgcgccgctaacatcgacttttacaatcacctcgacaagttcaacattgataaggaagcgggcgaacgccaaatctaccacagatactgtatggagcgcgctagcgtccattgcgctcacgtgttcacgaccgtgtccgaaatcactgccattgaagccgaacatatgttgaagagaaaaccggacgtggtgaccccgaacggactgaatgtgaagaagttttcagcagtccacgagttccaaaatctccacgccatgtataaggcccgaatccaagacttcgtgagaggacacttttacgggcacctggatttcgacctcgagaaaacgctgttccttttcatcgcaggacgctacgaattctccaataaaggagccgacatcttcctggaatcgctctcccgcctgaacttcctgctcagaatgcataaatcagatatcactgtgatggttttcttcatcatgcctgctaagactaataacttcaatgtggaaactctgaagggccaggctgtgagaaagcagctgtgggacgtcgcccattccgtgaaggaaaagtttggcaaaaaactttacgatgcactgctgcggggcgagatccccgacctcaatgatatccttgaccgcgatgacctgacgattatgaagcgggcgatcttctcgacccaaaggcagtcactcccaccggtgactactcacaacatgattgacgattcgaccgatccaatcctgtcgacgatcagaaggatcggacttttcaataacaggactgatcgggtgaaagtcatcctgcaccccgaatttctttctagcactagcccactgctcccgatggattacgaagaatttgtgcgcggatgccacctcggagtgttcccgtcgtactatgaaccttggggatacactcctgcggaatgcactgtcatgggtatcccttcagtgacgacgaacctgagcggattcgggtgctttatgcaggagcacgtggcagaccccactgcgtacggtatctacatcgtggaccgcagattcagatctccggatgattcgtgtaaccagctcaccaagttcctgtacggattctgcaaacaaagcaggcggcagcggatcatccaacggaacaggactgagcgcctcagcgacctgcttgactggagatacctcggccggtactatcagcatgcgcggcatctcactctgtcgcgggcattcccggacaagtttcacgtcgaactcacctcgccgccgactactgaaggatttaagtacccccggccgtcaagcgtgccgccgtcaccgtcaggatctcaggcctcgtccccacaatcctcggatgtggaagatgaagtggaggacgagcggtacgacgaggaagaggaagccgaacgcgaccggctgaatatcaagtctccgttctcgctgtcgcacgtgccgcacgggaagaaaaagctgcacggagagtataagaat

SEQ ID NO: 13220 - DNA, 2109 bp, synthetic construct
  misc_feature 1..2109: note = source = /note="Description of Artificial Sequence: Synthetic coding sequence"
  source 1..2109: mol_type = other DNA
atgttgcgaggcaggtcgctttcggtcacttcccttggaggtctgccacagtgggaggtcgaagagctgcccgtggaggaactgctcctgtttgaggtggcatgggaagtgaccaacaaggtgggtggtatttacaccgtgattcaaaccaaggcaaagaccactgcagatgagtggggcgagaattacttcctgatcggtccatactttgaacataacatgaaaacccaagttgagcagtgtgagccagtgaatgacgcagtgagaagggcagtggatgccatgaacaagcatgggtgtcaggtccattttggacggtggcttatcgaaggatcaccttacgtcgtgcttttcgatattggatactccgcatggaacctggataggtggaaaggagatctttgggaagcatgttcggtgggtattccttaccacgatcgggaagcaaacgatatgcttatctttggttcactcaccgcatggttcctcaaagaagtgactgatcatgccgacggaaaatacgtcgttgcgcaattccatgagtggcaggcaggaattggccttattctgtcaagagcccggaagctgcctatagcaacgatctttactacccatgcaaccctgctggggcgttacctctgtgcggcaaacatcgacttttacaaccatcttgacaagtttaacatcgacaaggaggccggtgaaagacaaatctaccatcggtactgcatggaacgggccagcgtgcattgtgcccacgtgtttaccactgtctcagagatcaccgcgatcgaggcagaacacatgcttaagcgcaagccagacgtggtgacccccaacggactgaacgtcaagaagttttcggcagtccacgaattccagaacctgcacgcaatgtacaaggcgcggatccaagactttgtgcggggccacttttatgggcatctcgacttcgatcttgaaaaaacccttttccttttcatagccggccggtatgaattttcaaataagggtgctgacattttcctggagtccctttcccgtctgaatttcctgcttagaatgcataagtccgatataactgttatggtctttttcataatgccagcaaagactaacaactttaacgtggaaaccctcaaagggcaggcagtgagaaagcaattgtgggacgtcgctcactcggtcaaggaaaagttcggaaaaaagctctacgatgcacttcttagaggcgaaattccagatctgaacgatatccttgatcgcgatgatctgaccattatgaaacgggcaatctttagcactcagaggcagagccttccccctgtgaccacgcacaatatgattgatgattccacggaccccattttgagcaccattagaaggatcggtctgttcaataaccgcaccgaccgcgtgaaggtgattctccaccccgagtttctttcatccacgtcgccccttcttcctatggattacgaagaattcgtcaggggctgtcatctcggcgtgttcccttcgtactacgagccctggggatacacgcctgcagaatgcaccgtgatgggtatcccttcggtgactaccaacctgtcaggttttggttgtttcatgcaagaacatgtggcagatcctactgcgtacgggatctacattgtggatcgtagatttcggtcgccggatgattcgtgcaaccaacttacgaagtttctttatggattttgtaaacaaagcaggaggcagcgcatcattcaaagaaatagaactgagcgcctctccgacctgcttgattggcgctatctcggcagatactaccagcacgcacgtcacctgactctgagccgagcatttcctgataagttccatgtggaactgacttcgccccccactactgaagggtttaagtaccctcggccaagctccgtcccaccctcaccaagtggatcccaggcatcgtcccctcagtcgtccgatgtggaggacgaagtggaggatgaacgttacgatgaagaagaggaggccgagagagatcgtctgaacattaagtcacccttctcactctcccacgtgcctcacggaaagaagaagctccatggtgagtacaagaac

SEQ ID NO: 13221 - DNA, 2109 bp, synthetic construct
  misc_feature 1..2109: note = source = /note="Description of Artificial Sequence: Synthetic coding sequence"
  source 1..2109: mol_type = other DNA
atgctgcggggtcggtcgcttagcgttacttccctaggcggcttaccccaatgggaagtggaagagcttccggtggaggagcttcttctctttgaggtggcatgggaggtgaccaataaggtggggggaatctatactgttattcagacgaaagcaaagaccactgcagacgagtggggggagaactactttctgattgggccatacttcgagcacaatatgaagacacaggtcgaacagtgcgagcctgttaatgacgcagtccgccgtgccgtagacgccatgaacaagcacggttgtcaagtccacttcgggaggtggctcattgaagggagtccatacgtggttctcttcgatatcggttactctgcgtggaatctggatcgttggaagggggatctctgggaggcgtgctcagtcggcataccatatcatgacagagaagccaacgacatgctcatcttcggtagtctgacagcctggtttttgaaggaagtaaccgaccatgccgacggcaagtacgtggttgcacaatttcatgaatggcaagccggtattgggctcatactaagcagggcgcgaaagttgcccattgctacgatcttcacaacgcacgcgacattgttggggcgctacctgtgtgcagctaatattgatttttacaatcaccttgacaagtttaatatcgacaaggaagctggcgaacgtcagatctaccatagatactgtatggaacgagcctcggtccactgcgcccacgtctttactacagtttccgagatcacggctattgaggcagagcatatgttaaagcgtaagcccgatgtcgtcacgcccaatggtttgaatgtgaagaaattctcggccgtccatgaattccagaatctccacgcaatgtacaaggctaggatccaagactttgtgcgaggtcacttctacggacatcttgacttcgatctagagaagacgctcttcctcttcatcgcaggacggtatgaattctccaataaaggtgccgatatatttttggaaagcttgtcccgcctcaacttcctcctgcgtatgcacaagtccgacatcactgtcatggtgttttttattatgcctgctaagacaaataattttaacgtggagacccttaaaggtcaggcagtccgcaagcaactctgggatgttgctcattctgtcaaagagaagttcgggaaaaagctttacgatgcattgttacgtggggagatccctgacctaaacgatattctagaccgtgatgatctgacgataatgaagcgggcgatattctccacacaacgtcaatcactgccacctgtgactacacacaatatgattgatgactcaacagatcctatcctctccacgattcggaggattggactctttaataaccgaaccgacagggtcaaggtcatccttcaccctgagttcttgtccagtacgtcaccattattgccgatggattacgaagagttcgtacgcggttgccatctaggtgtattcccgtcctactacgagccttggggatatacgccagccgagtgcacggttatgggcatcccatctgtaaccacaaatctctctgggttcgggtgcttcatgcaagaacacgtggcagatcccacggcgtatggtatatatattgtcgatcgtcgttttcgatcacctgatgattcatgcaaccaattgaccaagttcctgtacggattctgcaagcagagccgaaggcaacgcattatccagcggaaccgaacagagcgccttagcgatctgttggattggcgctacttgggccgttactaccagcacgctcgccatctgacactatcacgggcatttccagataaattccatgtcgaactgacatcccctcccaccaccgaggggttcaagtatcctcgtccctcatccgtgccaccgtcaccgagtggctcacaggctagctcacctcaatcatctgacgttgaagatgaggtcgaagacgagaggtatgatgaagaagaggaagcagagcgcgacaggcttaacatcaagtcccctttttctttgagccacgtaccccatggaaagaaaaaattacacggcgagtacaagaat

SEQ ID NO: 13222 - DNA, 2109 bp, synthetic construct
  misc_feature 1..2109: note = source = /note="Description of Artificial Sequence: Synthetic coding sequence"
  source 1..2109: mol_type = other DNA
atgctgcgcggacgcagcctgtccgtgacgtcactgggtggcttgccacaatgggaggtggaagaactgccggtggaggaacttcttctgtttgaggtggcgtgggaagttactaataaggtcggaggaatttacacggtgatccagaccaaggctaagactacggccgatgaatggggcgaaaactatttcctgatcggcccttactttgagcataacatgaaaacgcaggtggaacaatgcgaacctgtcaacgacgctgtgcgtagagccgtggatgccatgaacaaacacggatgtcaggtgcattttgggagatggctcatcgaagggtcgccatacgtcgtcctgttcgatattgggtactcggcatggaacctggatagatggaaaggtgacctttgggaagcctgttccgtgggaatcccctatcacgatcgggaggcaaatgacatgctcatttttggcagccttactgcttggtttctcaaggaagtgacggaccacgcagacggaaagtatgtcgtcgcgcaatttcatgaatggcaagcaggcattggtcttattctttcaagggctcgcaaactgccaatcgccacgatcttcaccactcatgcgaccctgctgggtagatacctgtgtgctgcaaacattgacttttacaatcacctcgataagtttaacatcgacaaggaggcaggagaacggcagatatatcatcggtactgcatggaaagagccagcgtccattgtgcccatgtgttcactaccgtgtcagaaataaccgcaattgaagcagagcacatgctcaagcgtaaacctgatgtggtgacgcctaacgggttgaacgtgaagaagttttcggcagtgcatgaatttcaaaatcttcacgcgatgtacaaggcacgtattcaggactttgtgaggggtcatttctacggtcatcttgatttcgatctggagaaaactctgtttttgtttatcgcaggtcgctatgaattctcgaacaagggagcagacatctttctggaatcgcttagcagactcaacttcctgctgcggatgcataaatccgacattactgtgatggtgtttttcataatgcccgcaaaaactaacaacttcaacgtggaaactctgaaaggtcaagctgtgagaaagcagttgtgggatgtcgcacattccgtgaaagagaagtttggaaaaaagttgtacgatgcgctgctgcgaggcgagattcctgacctgaatgacatcctggatagagatgatctgactatcatgaagagagcaatattctcaactcagcggcaatctttgcctcctgtgaccacccacaatatgattgatgattcaaccgacccaattctttcgactatccgcagaattgggctgttcaataaccgcaccgatcgtgtcaaggtcatacttcatccggagttcctttcatcgacttccccccttcttccaatggactacgaggagttcgtgaggggttgtcacctgggcgtctttccttcgtactacgaaccttggggttacactcctgccgaatgcaccgtgatgggaataccgtccgtcaccactaaccttagcggtttcggatgctttatgcaggagcatgtcgcagatcctaccgcgtacggaatctacattgtcgataggagatttcggtcaccggacgactcgtgtaaccaactgaccaagttcctttacgggttctgtaaacaaagcagaaggcagcgcattattcaacgcaatagaaccgaaaggctttcagacctgctcgattggagataccttgggagatactatcaacatgcacgccacctgaccttgtcacgggcgttcccagataagtttcatgtggagcttacctcgcctccaaccaccgaagggttcaaatacccacggccctcatcggtgcctcctagcccgtccggtagccaagcatcctcccctcaatcgtctgacgtcgaggatgaagtcgaagatgaacgttacgatgaagaggaagaagcagaacgggatcgcctcaacattaagtcccccttttcgttgtcacacgtcccacacggtaagaagaagttgcatggcgagtacaagaat

SEQ ID NO: 13223 - DNA, 2109 bp, synthetic construct
  misc_feature 1..2109: note = source = /note="Description of Artificial Sequence: Synthetic coding sequence"
  source 1..2109: mol_type = other DNA
atgctccgcggacggtcactgtcagtcacctcgctgggtggccttccccaatgggaagtggaggagctgcctgtggaagagttgctcctgttcgaggtggcttgggaagtgactaataaggtgggaggtatctacaccgtcatccagaccaaggcgaaaacgaccgcagacgagtggggagagaattacttcctcatcggtccgtacttcgaacacaacatgaaaacgcaggtggaacagtgtgagcctgtaaacgacgctgtgcgccgggccgtggatgcaatgaacaagcacggctgccaggtccacttcggccgctggctgatcgaaggctccccatacgtcgtcctcttcgacattggatactcagcctggaatctggatcgctggaaaggagatttgtgggaagcctgctccgtgggaatcccgtaccatgatcgcgaggcgaacgatatgctgatctttgggagtctgactgcgtggtttcttaaggaagtgaccgaccacgcagacggcaagtacgtggtggcgcaattccatgaatggcaggccggtattggcctgattctgtcgagggctcggaagctcccgatcgccactatcttcactacccatgcgacccttctcgggagatacctgtgcgccgcaaatatcgacttctacaatcatctcgacaagtttaacatcgacaaggaagctggagagcggcagatctaccaccgctactgtatggagcgggcatcggtccattgcgcccatgtgttcaccaccgtttccgaaattactgcgattgaggccgaacatatgctgaagcggaaacctgatgtggtcacccctaacggcctcaacgtcaagaagtttagcgccgtccacgaatttcaaaacctgcatgccatgtacaaggcgcgcatacaagatttcgtgagaggacatttctatggacacctggactttgatctcgaaaagactctgttcctcttcatcgcgggaaggtacgagttctccaacaagggggctgacatcttccttgaatccctgagcagactcaacttcctgctcaggatgcacaagtcggacattactgtcatggtgttcttcatcatgcctgccaagaccaacaactttaacgtcgagactctcaagggacaggccgtgcgaaagcagctctgggatgtggctcactcagtgaaggagaaattcggaaaaaagctctacgacgctctgttgcggggagaaatcccagacctcaacgatatccttgaccgggatgacctcaccatcatgaagcgggcgatcttcagcactcaacgccaaagtttgccaccggtcaccactcacaacatgattgacgactccaccgacccaatcctgtcgactatcagacgcatcggtttgttcaataaccgcactgaccgcgtcaaagtcatattgcaccccgagtttttgtccagcacgtccccactgttgcctatggattatgaggagtttgtccgcggatgccacttgggagtgttcccatcctactatgagccttggggttacaccccagcggaatgcaccgtaatgggaatcccaagcgtgactaccaatctgagcggctttggatgtttcatgcaggaacatgtcgccgatccgaccgcttacggcatctacatagtggacaggcggtttagatctcctgacgattcctgcaatcaactgactaaattcctgtacggattctgcaaacaatcgagacggcagcgcatcatccagagaaacagaactgagaggctgtcagatctgttggactggcgctacttgggacggtactaccagcacgcccgtcacctgacgctctcgcgcgcgttcccggacaagttccatgtcgaacttacctcgccgcctactaccgaaggattcaaatacccacgcccgtcatcagttcctccaagcccctccggcagccaggcctccagcccgcaaagttccgacgtcgaagatgaggtggaggacgaacggtatgacgaagaggaagaagcggaaagggatagactgaacatcaaatcgcccttctcactgtcccacgtcccgcacggtaagaagaaactccacggggaatacaaaaac

SEQ ID NO: 13224 - DNA, 2109 bp, synthetic construct
  misc_feature 1..2109: note = source = /note="Description of Artificial Sequence: Synthetic coding sequence"
  source 1..2109: mol_type = other DNA
atgctccgcgggcggagcctgtccgtgactagcctgggcggtctgccacagtgggaggtggaagaacttccagtcgaagagcttctcctctttgaagtggcgtgggaagtcaccaataaggtgggtggcatttacactgtgatccagaccaaagcgaaaaccaccgcagatgaatggggtgaaaactactttctcattggtccgtattttgagcataacatgaaaactcaagtggagcagtgtgaacctgtgaatgacgctgtgcgtagggcggtcgatgccatgaacaagcatggctgtcaagtccactttggacgctggctgattgaaggaagcccatatgttgtgctgttcgatattggctacagcgcctggaatcttgatcgctggaagggcgatttgtgggaagcctgctccgtaggaattccataccatgacagggaggcaaacgacatgctcattttcggtagcctgaccgcctggtttctcaaagaagtgaccgatcatgcagacggtaagtacgtggtcgcgcagtttcacgagtggcaggccgggattggacttatcctgagccgcgcgcggaaacttccaatcgcaaccatctttactactcatgcgacccttttgggccggtatttgtgtgcagctaatatcgatttctacaatcacttggacaagtttaacattgataaggaagctggagagcggcagatttatcatcggtactgtatggaaagggcatcagtgcactgtgcacatgtgtttaccaccgtgtcagaaatcaccgccattgaagccgagcatatgttgaaacgaaagccagatgtcgtgaccccaaatggtctgaacgtcaagaaattctccgcagtgcatgaattccagaacttgcatgccatgtacaaggcacggatccaggatttcgtcaggggccatttctacggtcacctggattttgacctggaaaagactctcttccttttcattgccgggagatacgaattttcaaacaaaggagccgatatcttccttgaatcgctttcccgactgaattttctgctcagaatgcataagtcagatattaccgtgatggtctttttcatcatgcccgctaaaaccaacaactttaatgtggaaacgcttaagggacaggcagtccgtaaacagctttgggacgtggcacactccgtcaaggagaaatttggcaagaagctctacgatgctctgttgcgcggagagatccctgaccttaacgatatccttgatcgagatgatctgactataatgaaacgtgccatcttttcgactcaaagacaaagcctgcctccagtgaccacccataacatgatcgacgactccactgatccaatcctgtccaccattaggagaattggattgtttaacaatagaactgaccgagttaaggtgatcctgcatcccgaattcctctcatccacttcgcctctccttcccatggattacgaagagtttgtgagaggctgccatctcggggtgttcccctcctattatgaaccttggggctacactcctgcagaatgcacggtcatggggataccttcggtgacgaccaacctgagcggtttcggatgctttatgcaagagcatgtggctgatccgactgcatacggaatttacatcgtggatcggagattcaggtccccggacgattcgtgcaaccaactgacgaagtttctgtacggcttctgtaaacaatccagacgacaacgaattatccagagaaaccggactgaacgtctttcggatctgctggattggcggtaccttggccggtactaccagcacgcaaggcacctgaccctgagccgggcattcccagataagttccatgtggaacttacctcgccaccgaccaccgaaggtttcaaataccctagaccctcctccgtccccccatcgcccagcggtagtcaggcatcctccccgcaaagctcggatgtggaggatgaagtcgaggacgaaaggtacgatgaagaagaagaagcagagcgagacagactgaacattaagagcccattctcactgagccacgtgccgcatggaaagaagaagctgcatggagaatacaagaac

SEQ ID NO: 13225 - DNA, 2109 bp, synthetic construct
  misc_feature 1..2109: note = source = /note="Description of Artificial Sequence: Synthetic coding sequence"
  source 1..2109: mol_type = other DNA
atgttacgaggccgatccttgtccgtgacttctctgggcggcttgcctcagtgggaagttgaagagctgccggtcgaggagctcctgctgtttgaggtcgcctgggaggtcaccaataaggtaggaggcatatacacagtgatacagaccaaggcaaagacgaccgctgacgagtggggcgaaaactactttttgatcggtccctacttcgaacacaatatgaagacgcaggtggagcagtgcgaaccagttaacgatgccgttcgccgggcggtagatgctatgaataagcatggatgccaagttcactttggtcgatggctcatagagggtagtccctacgtggtgctatttgacatcggctatagcgcgtggaacctggaccgttggaagggtgacctgtgggaggcttgctctgtcggtattccgtaccatgaccgcgaggccaatgacatgctaatttttggttctcttaccgcgtggtttcttaaggaagttaccgaccacgcagacgggaagtacgtggtcgcccagtttcacgagtggcaggcgggtatcgggctgatcctgtcccgagcccggaagctgccgatcgcaactatttttactacccacgccaccctcctcggccggtacctgtgtgctgctaacatcgatttttacaatcatctggacaagtttaacatcgacaaggaagccggggagcgtcagatctatcaccgctactgcatggagagagcctccgtgcattgcgcacacgtgttcaccacggtgtccgagatcacggcgattgaagctgaacacatgttgaaacgtaagcccgatgtcgtgacccccaacggcctgaacgtcaagaaattttctgcggtccatgagttccaaaatctccacgcgatgtataaggcaagaatccaggactttgtacgaggtcatttttatggccacctcgacttcgatttggagaagacgttatttctgttcatagctggcaggtacgagttctcgaacaaaggagccgatatttttttggagtcgttgtcccgtctgaacttcctgttgcgaatgcacaagtcggacattacggtcatggtgtttttcattatgccggcaaagacgaacaattttaacgtggaaacgctgaagggacaggctgtgcgcaaacagctgtgggacgtcgcccattccgtcaaagagaaattcggtaagaaattgtacgacgccctgctgcgcggagagatcccggaccttaacgacatcttggatcgtgacgatctgacaatcatgaaaagagccatattcagtacgcagcggcaaagcctgccacccgtgactactcataatatgatcgatgatagcaccgaccccattctgtcaacaatacgcagaatcggattattcaataaccggacagaccgcgtgaaggtcatcttacatcccgagtttttgtcctcaacaagtcccctgctgccaatggactacgaggagttcgttcgcggttgtcacctgggagtcttcccctcctattacgagccctggggctacactcccgcagagtgcacggttatgggcataccgtctgttacaactaacctctcggggttcggctgctttatgcaagagcacgtcgcagaccccactgcctacggaatctacatagtcgaccgtcgcttccgctctccagatgactcctgcaatcaactgacgaagttcctgtatggcttctgcaagcagtcacgccgacagcgcataatccaacgcaaccgcactgagcgcctgtctgacctactggactggcggtatttgggccgttactatcagcacgctcgccatttgactctgtctcgtgccttcccagacaaattccacgtcgaattgaccagcccgcctaccaccgagggattcaagtatccacgcccgtcgtcagtgccaccgagcccgagtggatcgcaggcctcctctccgcagagcagcgacgtggaagatgaggtcgaagatgagcgttacgacgaggaagaagaggcggagcgcgatagactaaatataaagagtccgttcagccttagtcatgtgccgcatggaaagaaaaagctacacggagaatataagaat

SEQ ID NO: 13226 - DNA, 2109 bp, synthetic construct
  misc_feature 1..2109: note = source = /note="Description of Artificial Sequence: Synthetic coding sequence"
  source 1..2109: mol_type = other DNA
atgctccgcggaaggagcctgtctgttacatctctgggcggtctcccacagtgggaggtggaggagctgcccgtggaggaattgctcctttttgaggtagcctgggaggtgactaacaaggtgggtggaatatatacagtcatccaaaccaaagctaaaactaccgcagacgaatggggtgagaattattttctcattggtccctattttgaacataatatgaagacccaggttgagcaatgcgagccagtcaacgacgccgttcgccgcgctgtggacgctatgaataaacacggatgtcaagtgcactttggcaggtggctgatcgaaggctcaccctacgtagtcctgttcgacataggatactctgcttggaacctggatagatggaagggcgacctgtgggaagcgtgcagcgtgggtatcccctaccacgatagggaagctaacgatatgcttattttcggctccttgaccgcctggttcctcaaggaggttacagaccacgccgatggcaagtacgtcgttgctcagtttcacgagtggcaggccggtatcggtctgatacttagtagggcaaggaagctccctatcgccaccatcttcacaacccatgccacgctgctgggtagatacctttgcgccgccaatattgatttctacaaccacctcgataagtttaacattgataaagaagccggcgagaggcagatttaccacaggtactgtatggagagggccagcgtccactgtgctcacgtgtttacgaccgtgtcagaaatcaccgctatcgaggccgagcatatgcttaaaagaaaacccgacgtcgttacccccaatggactcaacgttaagaaattttctgccgtccatgagtttcagaacctgcacgcgatgtacaaggccagaatccaggactttgtcagaggacatttttacggccacctcgattttgatttggagaagaccctgttcttgttcattgccggcaggtacgagttctcaaataagggcgctgacattttcctggagtccctttctagactgaacttcctcctccgcatgcataagagcgacatcacagtcatggtcttcttcataatgcccgcaaagactaacaactttaatgtcgagactctgaagggtcaggcggtaagaaagcaattgtgggacgtagctcattccgtgaaggaaaaatttggcaagaaattgtacgacgcgctcctcaggggtgagatacccgatttgaatgacatcctggacagggacgaccttacgatcatgaagcgcgccatcttctctacacagcgccagagcctccctccggtgactacacacaacatgattgacgacagtaccgaccccattttgtctaccattcgcaggatcggactgttcaataaccgcaccgatagggtcaaggtgatcctgcaccccgagttcctgtcctctacaagtccgttgctgcccatggactacgaggagtttgtaagaggttgccacctgggagtcttcccctcctactacgagccgtggggatacactcctgctgagtgcaccgtgatgggaatccctagcgtgacaactaacttgagtggatttggatgcttcatgcaagaacatgtggctgaccctactgcctacggcatctacatcgtcgacagaaggttcaggtcacctgatgactcctgtaaccaactcacaaagtttctgtacggtttctgtaaacagtcccgcaggcagaggatcattcaaaggaacaggaccgagagactctccgacctgctcgactggaggtatctcggaaggtattaccagcacgcgcgccatctcactctttcaagggccttccccgataaatttcacgtggaactgacatctccacctacgactgagggattcaagtacccgcgcccttcctccgttccgcccagtccctctggctctcaggctagcagtccccagagctccgatgtcgaagatgaagtcgaagatgagaggtacgacgaggaggaagaagccgaaagggaccgcctcaatattaagtcaccgttttcactgtcccacgtgccccatggaaagaagaaattgcacggagagtacaaaaat

SEQ ID NO: 13227 - DNA, 2109 bp, synthetic construct
  misc_feature 1..2109: note = source = /note="Description of Artificial Sequence: Synthetic coding sequence"
  source 1..2109: mol_type = other DNA
atgcttcgggggagatccctttccgtgacgtccctggggggacttccacagtgggaggttgaggaattgcccgtggaggagctcttactgttcgaggtggcttgggaagtcaccaacaaagtaggcggcatttacaccgtgatacagactaaagccaagaccaccgcagatgaatggggggagaattattttctgataggcccttactttgagcacaatatgaagacccaggttgaacagtgtgagccagttaacgacgcagttagaagggcagtggatgcgatgaacaaacacggctgtcaggtccatttcggtcgctggctaattgagggcagcccttacgtcgttttatttgatattggctactctgcgtggaacctagaccgttggaaaggtgacctctgggaagcttgttcagtaggaatcccctatcatgacagggaagccaatgacatgctaatctttggctcactgacagcttggtttctgaaggaggtcacggatcacgcagatggcaaatatgtggtggctcagttccacgagtggcaagcaggaatcggactcattttgtctcgcgcacgcaaacttcctatcgcaacgatctttacaacacacgctaccttgctcggtcgctacctgtgtgccgctaatattgacttctacaaccatctcgacaaattcaacattgacaaagaagcaggtgagcggcagatctaccaccgatactgtatggagcgcgcatccgtgcactgtgcgcacgtctttacaacagttagcgagattactgccatagaggcggaacatatgctgaagcgcaaacccgatgtcgttacaccaaacgggttgaacgtcaagaaattcagtgccgtacatgagttccagaatctgcatgctatgtacaaagcccgaattcaagacttcgtgagaggtcacttctacgggcatctggacttcgacctcgagaaaactttgttcctgttcatcgcaggaaggtatgagtttagcaataaaggagcggacattttcctggaatccctgagccggctcaattttctgctccgcatgcataagtccgatattactgtgatggtttttttcataatgccagctaagacaaacaatttcaatgtggagactcttaaaggacaggccgtacggaagcagctttgggacgtcgcccacagtgtgaaagagaagttcggtaagaagctttatgatgctctcctgaggggtgagattcctgatttgaacgacatcctagaccgtgatgatctgacaattatgaagcgtgcaatattttccactcaacgccaaagtctgcccccagtgactactcataatatgatcgatgacagtactgaccccatcctgagcaccataagacggattggcctgtttaacaaccggactgaccgcgtgaaagttatactgcatcccgaattcttgtcatcaacaagccccctgttgcctatggactacgaagagtttgtgcgggggtgccatctgggagtgtttccttcctattatgagccgtggggctacacaccagcagagtgcactgtgatgggaattcctagcgtcaccacaaaccttagtggattcgggtgcttcatgcaggagcacgtagccgatccgaccgcatatggtatctatatagtggacaggcggttccgctctccggatgacagttgtaaccagctgacaaagtttctgtatggtttttgcaagcaaagtcgaaggcagcgcatcatccagcgcaatcgcacagagaggttgagcgacttactggattggcgatacttgggtcgttactatcagcacgcaagacatctaactctatccagagcctttcccgacaaattccatgtggaacttacctcccccccaaccactgagggattcaagtacccacgccctagctcagttcccccctcaccatccggctcccaggcatcttcacctcagtcatccgacgtggaagacgaggtagaagacgaaaggtacgacgaagaagaagaggccgaacgggataggttgaatataaagtccccattttcgctgagtcacgtgccccacggcaaaaagaaactccacggagagtataaaaat

SEQ ID NO: 13228 - DNA, 2109 bp, synthetic construct
  misc_feature 1..2109: note = source = /note="Description of Artificial Sequence: Synthetic coding sequence"
  source 1..2109: mol_type = other DNA
atgttacggggacgctcactaagtgtcacctccctgggcggattgccccaatgggaagtggaggaactcccggtggaggagcttctcctgtttgaggtggcatgggaagtgacaaacaaggtaggcggtatatatacagtgatacaaacaaaggctaaaaccaccgcagacgagtggggtgagaattattttctcatcggcccttacttcgaacataatatgaagacacaggtcgagcagtgcgaacctgttaacgatgcagtcaggcgggccgtcgacgccatgaataaacacggttgccaggtgcatttcgggaggtggctgatcgaggggtcaccctacgtcgtcctatttgacatcggttatagcgcatggaacctagaccgctggaagggagacctgtgggaagcctgttccgtcggcatcccctatcacgatcgagaggctaatgacatgctgatttttgggtccctgacagcctggtttcttaaggaggtgacagaccatgccgacggaaagtacgtggtggcacaatttcacgagtggcaggctgggataggactcattctaagccgcgcgagaaagctcccaattgccaccatattcactacccatgccactctgctcggtcgctacctctgcgccgctaacatagacttctataatcaccttgataaattcaacattgataaggaagctggggaacgccagatctaccataggtactgcatggagagagcttccgtgcattgcgcgcacgtcttcactaccgttagcgaaatcacggcaatagaggccgagcacatgctgaagcgaaagcctgacgttgtgacacccaatggactgaacgtgaagaaatttagcgctgttcatgaattccagaacctccacgctatgtataaagcgcgaatccaggacttcgtgcgaggtcatttctacggacacctggatttcgatctggaaaaaacactgtttctgtttatcgcggggaggtacgaattctcgaacaagggcgctgacatcttccttgagagtttgtctaggttgaactttctgcttaggatgcataaatcagacatcaccgtcatggtattcttcattatgcccgccaagacgaacaactttaacgtggagaccctgaagggtcaggctgtgcggaagcagctgtgggatgtagcccactcagtcaaggaaaagtttgggaaaaagctgtacgacgcgctcctacgaggcgaaatccccgacctgaacgacattctggaccgcgacgatctaaccattatgaaacgtgccattttttccactcagagacagtccttgcctccggtcaccactcataacatgattgatgattccacagaccccatcctgagtaccatccggcgcatcggccttttcaacaataggactgaccgggtgaaggttattcttcacccagaattcctgagttccacaagccctctgttgccaatggattacgaagagttcgttcgaggatgccacttgggtgttttccctagttactatgagccttggggctacacacctgccgagtgcacggtgatgggaattccatccgttaccacaaatctcagcggctttgggtgcttcatgcaggaacatgtggcagaccccacagcctacgggatttacattgtcgaccggcgcttccggagccctgatgactcatgcaatcagctgacgaagttcctgtacggattctgcaagcaatcacgaaggcagcggattatccagagaaacaggactgagagacttagtgacctactcgattggcgctatctcgggagatactaccagcacgccaggcaccttacgcttagtcgcgcctttcccgacaagttccacgtcgaactgacctctccccctacaactgagggcttcaagtacccgcgcccatcatccgtgcccccgtctccgtccggcagtcaagcctcgtctccacaatctagtgatgtggaggacgaggtggaggatgaacgctatgatgaggaggaggaagcggagcgggacaggttgaatatcaagagccccttctcgctgtcgcatgttcctcatggaaaaaagaagctgcacggagagtacaagaat

SEQ ID NO: 13229 - DNA, 2109 bp, synthetic construct
  misc_feature 1..2109: note = source = /note="Description of Artificial Sequence: Synthetic coding sequence"
  source 1..2109: mol_type = other DNA
atgttaaggggtagatccctgtctgttactagtttaggagggttgccccagtgggaggtagaggaactacctgtggaagaactgctattatttgaggttgcatgggaggtgacaaacaaggtaggcggcatatacacagttattcagactaaggctaagaccaccgcagatgaatggggagaaaactacttcttgataggcccatatttcgaacacaatatgaaaactcaggtggagcagtgcgagcctgtcaatgatgcagtgagaagggccgtggacgctatgaataagcacgggtgccaggtccactttggcagatggctgattgaaggaagcccttatgtggttctgttcgatatcgggtatagtgcctggaacctggaccgctggaagggggacttgtgggaagcatgctccgtgggaataccctaccatgatcgcgaggctaatgacatgctgatttttgggtcactgacagcctggtttctgaaagaagttaccgatcatgctgacggcaaatatgtggtggcccagttccatgagtggcaggccgggattggattaatcctgagccgggctagaaaattgcccattgcaacaatctttacaacacatgctacactactcgggcgctatctctgtgcagccaacatagatttttacaatcatctggataaatttaacattgacaaagaagccggagaacgtcagatctaccaccggtactgtatggagagagcctctgtccattgcgctcacgtttttaccaccgtcagcgagattactgccatcgaagcagagcatatgctaaaaaggaaaccagacgttgtcacccccaacgggctcaatgttaaaaagttctcagctgtgcacgagttccagaatctgcatgctatgtacaaagctcgcatccaggactttgtcaggggccacttctatgggcacttagacttcgatctggaaaagaccttatttctgttcatcgctggcagatacgaatttagcaacaaaggagccgatatcttcctggagtctctgtcccggctaaatttcctgctacgaatgcataaatcagatatcaccgtaatggtgttcttcatcatgcccgccaagacaaataacttcaatgttgagaccctgaagggccaagctgtcaggaagcagctgtgggacgttgctcatagcgtgaaagaaaagtttggcaagaagctgtatgatgctctgctgcggggcgaaattccagatctgaatgacatcctggacagagacgacctaacaataatgaaaagagctattttctccacccagcgccagtcccttccacccgtcacaacacacaacatgattgatgacagcactgaccccatactttctaccatcagaagaattggcctgtttaacaataggacagacagagtgaaggtcatcctgcatccggaattcctttcctccacctcccccttactgccaatggattatgaggaattcgtgcgaggctgccatttaggggtttttcccagttattatgagccctgggggtacaccccagccgaatgtaccgttatgggcattcctagtgttactaccaacctgtccggctttggctgcttcatgcaagagcacgtggctgatccaacagcctatggcatttacattgtggaccggcgattccggtcacctgatgacagctgtaatcagctgacaaaattcttgtatggattttgtaagcagtcccgcaggcagcgcatcatacagcgcaatcggactgagagactgtccgacctgttagattggcgctatctcggcaggtattaccagcacgctagacacctgacacttagcagagcctttcctgataagtttcatgtggaactgacctcccctcccacaaccgaggggttcaaatatcctagaccatctagcgtgcctccatctccatctgggtctcaggcctcctctccccagagtagtgacgtggaagatgaggttgaagacgaacgctacgatgaggaggaggaggctgagcgggacaggctgaatatcaagtctcccttcagcttgagtcacgtgcctcatggaaaaaaaaagctgcatggcgaatacaaaaat

SEQ ID NO: 13230 - DNA, 2109 bp, synthetic construct
  misc_feature 1..2109: note = source = /note="Description of Artificial Sequence: Synthetic coding sequence"
  source 1..2109: mol_type = other DNA
atgcttagagggcgaagcctgagcgtgacgtcgctcgggggacttccgcagtgggaggtcgaagagcttccagtggaggaactgctccttttcgaggtggcttgggaagtgactaacaaggtgggcggaatttacaccgtcatacaaactaaagcaaaaacgaccgcagatgaatggggagaaaactactttcttattgggccatacttcgaacacaacatgaaaacgcaggtcgaacaatgtgagcccgtgaatgatgcggtgcgaagagcagtggatgcaatgaacaagcatggatgtcaagtgcatttcggtcggtggctgattgaaggctcaccatacgtcgtgctttttgatataggatatagcgcctggaatctcgatagatggaagggagatctttgggaagcatgttcggtgggtatcccttaccatgaccgggaggcaaacgatatgctgatatttggatcccttaccgcgtggttcctgaaggaggtgaccgatcatgcagacggtaaatacgtggtcgcgcagttccatgaatggcaggccggtattgggcttatccttagcagagcacggaaacttcctattgcaactatcttcactacccacgcaaccctgctcggtaggtacctctgcgcagccaacattgatttctataaccatctggacaaattcaacatcgataaagaagctggagaacgccagatttaccatcgctactgcatggagcgggcctccgtgcattgtgcccatgtctttactaccgtttcggaaataaccgcgatagaggcagaacacatgctgaagcggaagcctgacgtcgttacccccaacggtctgaacgtgaagaagttttccgccgttcacgaattccagaacctccacgcaatgtataaggcacgaattcaggatttcgtgcgaggccacttttacggccatcttgactttgaccttgaaaaaaccctttttctgtttatcgccgggcgctacgaattcagcaacaagggagcggacatttttcttgagtcattgagcagactgaacttccttctcagaatgcataagtcggatattacggtgatggtgttctttatcatgccagcaaagactaacaactttaacgtggagactctgaagggccaggcagttaggaagcagctttgggatgtggcacacagcgtgaaggaaaagtttgggaagaagctgtacgatgccctcctgagaggagaaatccccgatctcaatgatatactcgatcgcgatgacctcaccattatgaagagggcaatcttttcgacccaacgtcagagccttccacctgtcaccacccataacatgattgatgattcgaccgatcctattctttcaactattcgcagaattggtcttttcaacaataggaccgatagagtcaaggtgattctgcaccccgaattcctgtcatcgacgagccctctgcttccaatggactacgaagagttcgttcgtggctgccatcttggagtgtttccttcctactacgaaccttggggttatactcccgccgaatgtaccgtcatgggaattccaagcgttaccactaacctctccggttttggatgctttatgcaagaacatgtcgcagatccgactgcatacggaatttacattgtcgatcgcagatttcgctcgcccgatgattcgtgtaaccaacttaccaaattcttgtacgggttttgtaagcagtcacggcggcaacgtatcatccaacgtaatcgaaccgagcggctgagcgatctcctggattggcgttacttgggaagatactaccagcacgcacgacatctcactctgtcccgcgcatttccagacaaatttcacgtcgaactcacttcgcctccaactaccgaagggtttaagtaccctcgcccctcatcggtccctccttctccttccggatcccaggcatcgtcaccacaatcctccgatgtggaggacgaggtcgaggatgagaggtacgacgaagaagaagaagccgagagagatcgtcttaacattaagtcgccattctcgctttcgcacgtgccgcacggaaagaaaaaactccacggcgaatacaaaaat

SEQ ID NO: 13231 - DNA, 2109 bp, synthetic construct
  misc_feature 1..2109: note = source = /note="Description of Artificial Sequence: Synthetic coding sequence"
  source 1..2109: mol_type = other DNA
atgctgagagggcggtcgctgtccgtcacttccctcggcggcctgccgcaatgggaagtagaggagctgcccgtggaagagcttttgctgtttgaagtggcatgggaagtcaccaataaggtgggtggaatctatactgtcatacagactaaggcaaagaccaccgcagatgagtggggcgaaaactatttccttatcggtccctactttgagcacaacatgaaaacgcaagtcgaacagtgtgaaccggtgaatgatgccgttcggagggcagtcgatgccatgaacaagcacggatgccaggtccattttggtaggtggcttatcgagggatcgccttacgtggtgctgtttgatattggctacagcgcctggaatctcgacagatggaagggagatctgtgggaagcgtgctctgtcggcataccataccatgatcgtgaggccaacgacatgctgatcttcgggtccctgactgcatggttcctgaaggaagtcaccgaccatgcagatggaaaatacgtcgtggcccagtttcatgaatggcaagccggaatcggactgattctttcacgcgcgcggaagctccctatcgcaaccatctttaccacgcatgcaactctgttgggtcgctacttgtgcgcagcgaacattgatttctacaatcatctcgacaagtttaacattgacaaagaagcaggcgaacgccaaatctatcataggtattgtatggaacgcgcttcagtgcactgtgcccatgtgttcaccacggtgtcggaaattaccgcaattgaagccgaacatatgctgaaaagaaaaccagatgtcgtgactcctaacggactgaacgtcaaaaagtttagcgcagtgcatgaattccagaatcttcacgcaatgtataaagcacggatccaagacttcgtcaggggacacttttacggacatcttgattttgaccttgaaaagacgctgtttcttttcattgcaggaagatacgagttcagcaataaaggggcggacattttccttgaatccctgagccggctgaattttctgcttagaatgcacaagtccgatatcaccgtgatggtgtttttcataatgcccgcaaagactaataacttcaatgtggaaaccctgaagggtcaggcagttcggaaacagctttgggatgtggctcattccgtgaaggagaagttcggtaaaaagctgtacgatgcactcctgcggggagagattcctgatcttaacgacatccttgatagagacgatttgaccatcatgaaaagagccattttctcgacccaaagacaatccctcccgcctgtgaccactcacaatatgatcgatgattcgactgaccctatcctgtcgacgatccgcaggattggccttttcaataacagaactgatagagtcaaggtcatactgcatccagaatttctctcctcgacctcgcctttgctgccgatggactacgaggaatttgtgcgagggtgccatctcggagtgtttcctagttactacgagccctggggatatacccctgcagaatgtactgttatggggattccatcggtgaccactaatctctcaggatttggatgttttatgcaagagcatgtggccgatcccaccgcatacggcatttacattgtcgatagaaggttcaggtccccggatgattcatgtaaccaactgactaagtttctttatggcttctgtaagcaatcaagaaggcagcgcataattcaacggaatagaaccgaacggctttcggacttgcttgattggagataccttggacggtactaccaacacgcacgccatcttacgctttcccgcgcatttccggacaagtttcatgtggagctgacttcacctccaactaccgagggatttaagtaccctcggccttcatcggtccctccatccccctcgggctcgcaggcctcatccccccagtcctcagacgtggaagatgaagtggaggacgagcgatacgacgaggaagaagaggcagaaagggatagacttaacataaagagccctttctcgctttcgcatgtcccacatggaaaaaagaaactgcatggcgaatacaagaat

SEQ ID NO: 13232 - DNA, 2109 bp, synthetic construct
  misc_feature 1..2109: note = source = /note="Description of Artificial Sequence: Synthetic coding sequence"
  source 1..2109: mol_type = other DNA
atgctccgcggccggagcctttcggtgacttcgttgggtggactgccccagtgggaggtcgaggaactgcctgtggaagaactgttgctgttcgaggtggcttgggaggtgactaacaaggttggaggaatctacactgtgatccagaccaaagcgaagaccaccgcagacgagtggggcgaaaactacttcctgattggcccgtatttcgagcataacatgaaaacccaggtggaacaatgcgaacccgtcaacgatgcggtgagacgcgcagtcgacgcgatgaataagcacggatgtcaagtgcattttggacgctggctgatcgagggatcaccttacgtggtgctcttcgacatcggctactccgcgtggaacctcgaccggtggaagggcgacctgtgggaagcctgctcagtgggcattccttaccatgatagagaggctaacgacatgctgatcttcggctcgcttacggcctggtttcttaaagaagtgaccgatcacgccgatggcaagtacgtcgtcgcccagttccacgaatggcaagccggaatcggacttatcttgtcgcgggctcgcaaactgccaatcgcaacgatatttaccacccatgccactctccttggtcgctacctctgcgcggcgaacatcgatttttacaaccatctcgataaattcaatatcgacaaagaggcgggcgagcggcagatctaccatcgctactgcatggagagagcatcggtccactgcgcccacgtcttcacgactgtgagcgaaattacggctatcgaggcagaacacatgctgaagaggaagcccgacgtggtgacccctaacggactgaatgtgaaaaagttctcggcggtgcacgaatttcagaatctgcatgcaatgtacaaggccagaatccaagatttcgtcagagggcatttttacggacacctcgacttcgacctggagaaaaccctcttcctcttcatcgcaggtcgctatgagttttctaacaagggagcggatatcttccttgaaagcctgagccgattgaacttcctgctgaggatgcataaaagcgatatcactgtgatggtgttcttcatcatgccagctaaaactaataactttaatgtggaaaccctgaaaggacaagccgtgcggaagcagctgtgggatgtggcacactctgttaaagaaaaattcggtaagaaactgtatgacgcactccttcggggagagattccagacctgaacgacatcttggaccgggacgacctgaccatcatgaagcgcgcaattttcagcacccagcggcagtcgctgccgccggtgacgacccacaacatgatagacgactcaaccgatcctatcctgtcgaccattcggaggatcggactgtttaacaatagaactgacagggtgaaggtcatcctccatccagaattcttgagcagcacttcgccgctcctgccaatggactacgaggaatttgtccgcggctgccatctcggggtgttcccgagctactacgaaccgtggggatacaccccggcagagtgcacggtgatggggatcccgtcagtgactactaacctttcaggattcggatgtttcatgcaggaacatgtggcggatcctactgcatatggcatctacatcgtggaccggagattccgctcaccggacgactcgtgcaaccagcttaccaagtttctgtacggtttttgcaagcagtcgcggcggcaacgtattatccagcgcaaccgaaccgaacgcttgtcggacctcctggactggcgctacctgggccgctactaccagcatgcgagacacctgactttgtcaagagcatttcccgacaaattccacgtcgaacttactagcccgcctaccacggagggatttaagtacccgcgcccttcatcggtgccgccgtccccatccgggtcacaagcctcgagcccgcaatccagcgatgtggaagatgaagtcgaagacgagcgctacgacgaagaagaagaggcggaaagagatcgactcaacatcaaatcgccgttctccctttcccacgtgccccatggcaagaagaaactgcatggtgaatacaaaaac

SEQ ID NO: 13233 - DNA, 2109 bp, synthetic construct
  misc_feature 1..2109: note = source = /note="Description of Artificial Sequence: Synthetic coding sequence"
  source 1..2109: mol_type = other DNA
atgttgcggggacgcagcctctccgtcacaagtctgggaggacttccacaatgggaagtggaagaactgcctgtggaggaactccttctgttcgaggttgcgtgggaagtcacgaacaaggtcggcggcatctacacggttattcagaccaaggcgaagactacagcagatgaatggggcgagaattacttcctaattggcccctactttgaacacaacatgaaaacccaagtcgagcagtgtgaacccgtcaacgacgcagttcggcgggcagtggacgcaatgaacaaacatgggtgtcaggttcatttcgggaggtggctgatcgaggggtcaccatatgtggtgctttttgatataggctacagcgcctggaatcttgatcgatggaagggagatttgtgggaagcctgctccgtaggtattccctatcatgatcgcgaagccaacgacatgctcatttttggttctctgaccgcctggttcctcaaggaagtcacagaccacgctgacgggaagtatgtggtcgctcagttccatgagtggcaggccggcatagggctcatactgtcacgcgctagaaaactgcccatcgccacgatatttactactcacgcgactctcctaggacggtacctttgtgctgctaatatcgacttctataatcatctagacaagttcaacatagataaagaagccggagagcgacaaatctatcatcggtactgcatggaacgagccagcgtgcactgtgcgcatgtgttcaccactgtgtcagagattacggccatagaggcagagcatatgctaaagaggaaaccagacgtggtaaccccaaacggactaaatgtcaagaagttctccgctgtacacgaatttcagaatctgcacgctatgtataaggcgaggatccaagactttgtccgggggcacttctacggccacctagatttcgacctcgagaagaccctcttcctgttcatcgctggcaggtacgaattcagcaataagggtgcggatatctttctggagagtcttagtcgcttaaacttcctcctccgcatgcacaagtccgacattacagtgatggtgttctttatcatgcctgccaagactaacaacttcaacgtcgaaaccctgaagggccaggcagtgcgaaaacagctttgggacgtagcgcacagcgtgaaagagaaattcggcaagaagctgtacgacgccctgctgcgaggggaaataccggatttgaacgacatcctggatcgggacgacctgacgattatgaagcgcgcaatcttcagcacgcagcgtcagtcgctaccacccgtcaccacccacaacatgatagacgacagcaccgaccctatcctgagcaccattcggagaattggactatttaacaacagaaccgatcgggttaaagtgatcctgcatcccgagttcctttcctctacgagcccactgttacccatggactacgaagaatttgtgcgggggtgccacttaggcgtgttcccgtcctattacgagccttgggggtatacgcccgccgaatgcaccgtgatggggataccttcggtgaccaccaacctttcgggttttgggtgcttcatgcaggagcatgttgctgatcctactgcctacggaatatatatcgtggaccggaggttccgctcaccagacgatagttgcaatcagctcaccaaatttttatacggattttgtaagcagtcccgaaggcagagaatcatacagcgtaaccgaaccgaacgcctatctgacctcctggattggcggtacctggggagatactatcagcacgctagacatcttactctttctagggccttcccagacaaattccacgtcgaattaaccagtcccccaactaccgagggcttcaagtatcctaggccgagctctgtgcccccaagcccttctggctcccaggcctccagtcctcagtcttctgacgtcgaagatgaggtggaggatgagaggtatgatgaggaagaagaggccgagagagatcgcctgaatattaagagccctttctccctcagccatgtgccccatggtaagaagaagctccacggtgaatacaagaat

SEQ ID NO: 13234 - DNA, 2109 bp, synthetic construct
  misc_feature 1..2109: note = source = /note="Description of Artificial Sequence: Synthetic coding sequence"
  source 1..2109: mol_type = other DNA
atgttacgtggtcgttcgctatcggtaacgtcgttaggtggtttaccgcaatgggaagtagaagaactaccggttgaagaattattattatttgaagtagcgtgggaagtaacgaataaagttggtggtatatatacggttatacaaacgaaagcgaaaacgacggcggatgaatggggtgaaaattattttctaataggtccgtattttgaacataatatgaaaacgcaagttgaacaatgtgaaccggtaaatgatgcggtacgtcgagcggtagatgcgatgaataaacatggttgtcaagttcattttggtcgttggttaatagaaggttcgccgtatgttgtattatttgatataggttattcggcgtggaatctagatcgttggaaaggtgatttatgggaagcgtgttcggtaggtataccgtatcatgatcgtgaagcgaatgatatgttaatatttggttcgctaacggcgtggtttttaaaagaagtaacggatcatgcggatggtaaatatgtagttgcgcaatttcatgaatggcaagcgggtataggtctaatactatcgcgagcgcgaaaactaccgatagcgacgatatttacgacgcatgcgacgctactaggtcgatatttatgtgcggcgaatatagatttttataatcatttagataaatttaatatagataaagaagcgggtgaacgtcaaatatatcatcgttattgtatggaacgtgcgtcggtacattgtgcgcatgtttttacgacggtttcggaaataacggcgatagaagcggaacatatgctaaaacgtaaaccggatgttgtaacgccgaatggtctaaatgtaaaaaaattttcggcggtacatgaatttcaaaatttacatgcgatgtataaagcgcgaatacaagattttgtacgtggtcatttttatggtcatttagattttgatttagaaaaaacgctatttctatttatagcgggtcgttatgaattttcgaataaaggtgcggatatatttttagaatcgttatcgcgtttaaattttctattacgtatgcataaatcggatataacggtaatggttttttttataatgccggcgaaaacgaataattttaatgttgaaacgctaaaaggtcaagcggtacgtaaacaactatgggatgttgcgcattcggttaaagaaaaatttggtaaaaaattatatgatgcgctactacgtggtgaaataccggatctaaatgatatactagatcgtgatgatttaacgataatgaaacgtgcgatattttcgacgcaacgtcaatcgttaccgccggttacgacgcataatatgatagatgattcgacggatccgatactatcgacgatacgacgaataggtctatttaataatcgtacggatcgagttaaagtaatactacatccggaatttctatcgtcgacgtcgccgttattaccgatggattatgaagaatttgtacgaggttgtcatctaggtgtttttccgtcgtattatgaaccgtggggttatacgccggcggaatgtacggttatgggtataccgtcggtaacgacgaatttatcgggttttggttgttttatgcaagaacatgtagcggatccgacggcgtatggtatatatatagtagatcgtcgttttcgttcgccggatgattcgtgtaatcaactaacgaaatttttatatggtttttgtaaacaatcgcgacgacaacgtataatacaacgtaatcgaacggaacgtttatcggatctattagattggcgttatttaggtcgttattatcaacatgcgcgacatctaacgttatcgcgagcgtttccggataaatttcatgtagaattaacgtcgccgccgacgacggaaggttttaaatatccgcgtccgtcgtcggtaccgccgtcgccgtcgggttcgcaagcgtcgtcgccgcaatcgtcggatgttgaagatgaagtagaagatgaacgttatgatgaagaagaagaagcggaacgtgatcgtttaaatataaaatcgccgttttcgctatcgcatgtaccgcatggtaaaaaaaaactacatggtgaatataaaaat

SEQ ID NO: 13235 - DNA, 2109 bp, synthetic construct
  misc_feature 1..2109: note = source = /note="Description of Artificial Sequence: Synthetic coding sequence"
  source 1..2109: mol_type = other DNA
atgctgagaggacgctccctctcagttactagcctggggggactgccacaatgggaggtggaagaactcccagtggaggagctgctgctgttcgaagtggcctgggaggtgacgaacaaagttggagggatttacaccgtgatccagactaaggccaagaccaccgccgacgagtggggcgaaaactacttccttatcggaccatactttgagcataacatgaaaacccaggtcgagcaatgcgaaccggtgaacgatgcggtgagacgcgctgtggacgccatgaacaagcacggatgccaagtgcatttcggccgttggctgatcgaaggatcgccgtacgtggtgctctttgatatcggatactctgcctggaacctggaccgctggaaaggggatctgtgggaggcttgctcggtggggatcccataccacgacagagaggccaatgatatgctgattttcggctcgcttactgcctggttcctgaaagaagtgactgaccacgcagacggcaagtacgtggtggcccaattccatgaatggcaggcgggtatcggcctcatcttgagccgcgcccgcaagctcccgatcgctaccatctttaccactcacgcgaccctgctgggaagatacctctgcgcggcgaatattgacttctacaatcatctggacaagttcaatattgacaaggaagccggagagagacagatctaccaccggtactgtatggagagagcgtccgtccactgcgcacacgtgttcactactgtgtcagaaataaccgctatcgaagccgagcacatgctgaagagaaagcctgacgtggtgactccgaacggacttaatgtgaagaagttttccgccgtgcacgaattccagaatctgcacgccatgtataaagcacgaatccaagacttcgtgcggggacatttctacggccacctggattttgaccttgagaaaactctcttcctgtttatcgccggacgctacgagttctccaacaagggggcggacattttcctggagtccctgtcgcgcctgaattttctgttgcggatgcacaaaagcgacataaccgtcatggtgttctttatcatgccggctaagactaacaatttcaacgtggaaaccctgaagggacaagcagtgcggaagcagctgtgggacgtggcccatagcgtcaaggagaagttcggaaagaaactttacgacgcactgctgcgcggagaaatcccggacctgaatgatatccttgaccgggatgacctgaccatcatgaagagggccatcttctcaactcagcggcagtcgctcccgccggtgactacgcacaatatgatcgacgactcaacggatccaattctttctaccatcagaaggatcggcctgtttaacaatcggaccgacagagttaaagtcatcctgcacccggagttcctgtcgtcgacttccccacttctgccaatggactacgaagagttcgtccgcggatgccaccttggggtttttcccagctactacgaaccgtggggttacacccctgccgagtgcacggtgatgggaatcccctctgtgactactaacctgtcgggattcggatgttttatgcaagagcacgtggccgatccgactgcgtacggcatctacattgtcgatcgcagattccgctctccggacgacagctgtaaccagctcaccaaattcttgtacggtttttgcaaacaatcgagacgccagaggatcattcagaggaaccggaccgaaaggttgtccgatttgctggactggcgctacctgggcagatactaccagcacgcgcgccacctgactttgtctcgcgcattccccgacaagttccatgtcgagctcactagcccgcctaccaccgagggcttcaagtacccacgcccgtcaagcgtgccgccttcgccatcaggttcccaggcctcgtcacctcaatcctccgacgtggaggacgaagtggaagatgaaaggtatgatgaggaagaggaagcggagcgcgatcggttgaacatcaaatcgccgtttagcctgtcccatgtgccgcacggcaagaagaagctgcacggagaatacaagaac

SEQ ID NO: 13236 - DNA, 2109 bp, synthetic construct
  misc_feature 1..2109: note = source = /note="Description of Artificial Sequence: Synthetic coding sequence"
  source 1..2109: mol_type = other DNA
atgttgagaggtcggtctctgtcggtgacttctcttggagggttgccgcagtgggaagtggaggagctgccagtcgaagaactgctgctgtttgaagtggcctgggaggtcactaataaggttggtggcatttacacagtcatccagacgaaagccaagaccacagccgacgagtggggggagaattactttctgattgggccatactttgagcacaatatgaaaacccaggtcgaacagtgcgagccggttaacgacgcggtccgcagggcggtggacgccatgaacaagcacgggtgtcaagtgcacttcggacggtggctgatcgagggctccccctacgtggttctgtttgacattggctacagcgcctggaatctcgacagatggaagggggacctgtgggaagcctgctccgttggtatcccataccatgaccgcgaagctaatgacatgctcatctttggcagcctcacagcctggtttctgaaggaagttactgatcacgctgacggcaagtatgtggttgcacaatttcacgagtggcaggccggaattggcttgatcttgtcccgggcccgtaaacttcccatcgctacgatctttacaacccatgctactctgctcggacgctatctgtgcgctgctaatattgatttctataaccatctcgacaagtttaacatagacaaggaggccggagagagacagatctaccatcgatactgtatggaacgagcgtctgtacactgtgcacacgtcttcacaaccgtctccgagatcacagcaattgaggctgaacatatgcttaagcgcaagcctgatgttgtcacacctaacggcctcaacgtgaagaaatttagcgccgtgcacgaattccagaacttacacgctatgtacaaagcacgtatacaggatttcgtccgtggtcatttctatggacatcttgactttgacttagagaaaaccttattcctcttcatagcgggccgttatgagttcagtaataagggcgccgatatcttcctggagtctctgagtaggctgaacttcctattgagaatgcacaagagtgacataaccgtcatggtgttcttcataatgccagctaagacaaacaattttaatgtggagactctgaagggccaggctgttcgaaaacagttgtgggacgttgctcactctgtgaaggaaaaatttgggaagaaactctacgacgccctgctccggggggaaataccggatctgaacgatatactagaccgggacgatctgactatcatgaaacgggccattttcagcacgcagcgacaaagccttcctccagtaacaacacacaatatgatcgatgactccacagatcccatcctcagtacgattcggcggataggcttgttcaacaataggaccgatcgtgttaaagttatcctccacccagagtttctatcttcaaccagccccttgctgccgatggactacgaggagttcgtacgcgggtgccatctgggcgtgtttccgtcatactacgagccatgggggtacacccctgctgaatgtaccgtgatgggcatcccaagtgtgactacgaacctgtcgggttttggttgctttatgcaagaacacgttgccgaccctactgcctacggcatctatatcgtggataggagattccgttctcccgatgactcatgcaaccagctgaccaaattcctttacggcttttgcaaacagagccggcggcagcgaataattcagagaaatcgaacagagagattgtctgatctcctggattggagatatctgggcagatattaccagcacgcacgccacctgacactcagccgtgccttcccagataagtttcacgtagagcttacatcgcctcctactactgaggggttcaaatacccgaggccaagcagcgtgcccccatccccctctggaagccaggcctcatccccccagtcctccgacgtagaagatgaggtggaggatgaaagatacgatgaggaggaagaggccgagcgagacaggctgaacatcaagtcacctttctccctaagccacgtaccccatgggaaaaaaaaactgcacggggaatacaaaaat

SEQ ID NO: 13237 - DNA, 2109 bp, synthetic construct; identical to SEQ ID NO: 13175
  misc_feature 1..2109: note = source = /note="Description of Artificial Sequence: Synthetic coding sequence"
  source 1..2109: mol_type = other DNA

SEQ ID NO: 13238 - DNA, 2109 bp, synthetic construct
  misc_feature 1..2109: note = source = /note="Description of Artificial Sequence: Synthetic coding sequence"
  source 1..2109: mol_type = other DNA
atgctccgggggcgtagcctcagcgtcacgtcgctcggaggcctcccacaatgggaagtcgaggaactgccagtggaagaactgctgctcttcgaagtggcgtgggaggtgaccaacaaagtcggagggatttacaccgtgatccaaaccaaggccaaaactacggccgacgagtggggagagaactacttcttgatcggaccgtactttgaacacaatatgaaaacgcaagtcgagcagtgtgaaccggtgaacgatgcagtgcggagagccgtggacgcgatgaataagcatgggtgtcaggttcacttcggcaggtggctgatcgagggatctccgtatgtcgtgctgttcgacatcggttacagcgcgtggaatctcgaccggtggaaaggtgacctctgggaggcgtgctccgtgggaatcccttaccacgaccgcgaggcaaatgatatgctcatcttcggatcccttaccgcctggttcctcaaagaagtgacggaccatgctgacggaaaatacgtcgtggcccaattccatgaatggcaggccgggatcggcctgattctgtcaagagcgcgcaagctgccgatcgcgacgatcttcactactcacgccactttgctcggtcgatacctgtgtgccgctaatatcgatttctacaatcatctcgacaagtttaacatcgataaggaggccggagagcggcagatttaccatcggtactgcatggagcgggcgagcgtgcattgcgcccatgtgttcactaccgtgtccgagatcactgcaatcgaggcggaacacatgctcaagcgcaagccggacgttgtgactccaaacggcctgaatgtgaagaagttctccgcggtgcatgaattccagaacctgcacgcgatgtacaaggcgcggatccaagacttcgtccgcggccacttttacggacacctggacttcgatctggaaaagactctgttcctgttcatcgcgggacgatatgagttctcaaataagggcgctgacatcttcctcgagtctctctccagactgaatttcctgctgcggatgcacaagtccgacattaccgtgatggtctttttcatcatgcctgcgaaaaccaacaacttcaatgtggaaactctgaagggccaggccgtgaggaaacagctttgggacgtcgcgcattcggtaaaggaaaagttcgggaagaaattgtatgatgcgctcctccgcggagagattcccgatctgaacgatatcctcgacagagatgacctcaccatcatgaagcgcgcgatcttctcaactcaaaggcagtcactgccgccagtgactacccacaatatgatcgatgactccaccgaccctatcctgtcgactattagacggattggcctgttcaacaacagaactgaccgcgttaaggtgatcctgcatccagagtttctgtcatcaactagccctctgcttccgatggactacgaggagttcgtccggggctgtcatcttggagtgtttccgtcttactacgagccgtggggatacactccagccgaatgcactgtgatgggaatcccatcggtgactactaacctgtcgggattcggatgcttcatgcaggaacacgtggccgatccgactgcgtacgggatatacatcgtggatcggcggttccgctccccggacgactcctgcaaccagctcacgaaattcctgtacggattctgcaagcagtcgaggcgccaacgcatcatccagcggaatcgaaccgagaggctctccgacctgctggattggcggtacctgggacggtactaccagcacgcccggcacctcactctgtccagagcattcccagacaagttccacgtcgaattgaccagcccgccaactaccgaaggcttcaagtaccctcgcccatccagcgtccctccatccccctccggctcccaagcatcgagtcctcaatcaagcgatgtcgaggatgaagtcgaggatgagcgctacgatgaggaagaagaagccgagagagatcgcctcaacatcaaatcgccgttctcgctgtcccatgtgccgcatggaaagaaaaaactccatggagagtacaagaac

SEQ ID NO: 13239 - DNA, 2109 bp, synthetic construct
  misc_feature 1..2109: note = source = /note="Description of Artificial Sequence: Synthetic coding sequence"
  source 1..2109: mol_type = other DNA
atgcttagaggccgcagcctcagcgtcaccagcctgggaggactgccacaatgggaggtggaggagctccccgtggaagagctgttgctgttcgaagttgcttgggaagtcaccaacaaggttggcggtatttacacagtgattcagaccaaagctaagaccaccgcggatgagtggggtgaaaattattttcttatcggtccctacttcgagcacaacatgaagacccaggttgaacaatgtgaacctgtcaacgatgcagtcaggagggccgtcgatgctatgaacaagcacggatgtcaggtgcattttggaaggtggcttatagaaggctctccttacgtcgttttattcgacatcggatactcagcctggaaccttgacaggtggaagggcgacctctgggaggcttgcagcgtgggcatcccataccacgatcgcgaagctaatgatatgttgattttcgggagccttacagcttggtttttaaaagaggtgacagatcatgccgatgggaaatatgtggttgcacaattccacgaatggcaggccggcatcggactgatcctgagtcgtgcacgcaaactgccgatcgccactatttttactacacatgccacgttgctgggcaggtacctgtgcgcggcaaatatcgacttttacaaccatctggacaaattcaacatagacaaagaggccggcgagagacagatctatcaccggtattgcatggagagggcctcggtgcactgtgcacatgtctttaccaccgtatctgagatcaccgcaatcgaggccgaacacatgcttaagcggaaaccagatgtcgtgacacctaacggcctgaacgtcaagaagttcagcgcggtgcatgagtttcagaacctgcatgcaatgtacaaagcaagaattcaggacttcgttagaggtcatttttatggtcatttggattttgatctggagaaaacccttttcctttttatcgcgggaaggtacgagttctccaacaagggggccgatatctttctagagagtctcagcaggctgaattttttgttgcgtatgcataaaagcgatattacggtgatggtatttttcattatgcccgctaaaaccaacaactttaacgtagaaaccctgaaggggcaagcggtgaggaaacagttgtgggacgtcgcccatagcgttaaagagaaattcgggaagaagctgtacgatgccctcctgcgaggtgagatccccgacctcaacgacatcctggacagggatgacctgacgatcatgaagagagctatcttctctacccaaaggcagagtctcccccctgtgaccactcacaatatgatcgacgatagcacagacccaatactctctaccatcaggaggatcggattgttcaataacaggaccgacagggtcaaagtgatcctccaccctgagttcctcagctcaacctcaccactgctgcctatggactatgaggaattcgtgaggggatgccacctgggggtgtttccttcttactacgagccatggggctacactcctgcagaatgcaccgtgatgggcattccaagcgtgaccacaaacctgagcggttttggttgcttcatgcaggaacacgttgccgaccccacagcttacggaatctacatcgttgataggagattcagatcacccgatgactcctgcaaccaactgaccaaattcctgtacggcttctgcaaacaatctcgccggcaacgcatcattcaaagaaatcgtactgagcgcctctcagacctcctggattggaggtacctgggcagatactaccagcatgctcgtcacctcaccctgagccgtgcatttccggacaagtttcatgttgaacttacttctcctcctaccacagaagggtttaaataccctcggccctccagtgtgcccccgtctccgagcggctcccaagccagttctcctcaaagctctgacgttgaggacgaggtagaagacgagagatatgacgaagaagaagaagcagaaagagatagacttaacatcaagtctcccttctccctgagccacgtgccacatgggaaaaaaaagctgcacggggagtacaagaac

SEQ ID NO: 13240 - DNA, 2109 bp, synthetic construct
  misc_feature 1..2109: note = source = /note="Description of Artificial Sequence: Synthetic coding sequence"
  source 1..2109: mol_type = other DNA
atgttacgcggtcgatcactgtcagtgacttctctcggggggctgccccagtgggaggtggaggaacttccagtggaggagctattgctgttcgaagttgcatgggaggtcacaaataaagtcgggggaatttacaccgttatccagacaaaggctaaaacaactgctgatgaatggggggagaattatttcctaattggcccttacttcgaacacaatatgaaaacccaagttgaacagtgtgagccagtgaatgatgctgtgcgccgggccgtagatgccatgaataaacacgggtgccaagtgcactttgggagatggctgatagagggaagcccttatgtggtactctttgacatagggtattccgcctggaacttggacaggtggaagggggatctgtgggaggcgtgcagcgtggggatcccctatcacgatcgcgaagctaacgacatgctaatatttggcagcctaactgcctggttcttgaaggaggtgaccgatcatgctgatgggaaatatgtggtagcccaattccatgagtggcaggccgggatcgggctcattctgagccgagctagaaaattgccaatcgcgaccatattcaccacccacgctacgctgctcgggagatacctgtgcgcagccaatattgacttttacaaccatcttgacaagttcaacattgacaaagaggccggcgaacgacagatttaccacaggtattgtatggagcgggcatcagtccactgcgcccatgtgttcactacggtgtccgagataacagccattgaggctgaacatatgcttaaaagaaagccagacgtggtgacacctaacggcctgaacgttaaaaaattttccgcagtccacgaatttcaaaatctgcatgctatgtacaaggcccggattcaggattttgttagaggtcacttctacggccatctggactttgaccttgagaagaccctgttcctctttatcgccggtaggtatgaattttctaataaaggcgcggatatcttcctggaaagtttgagccggttaaattttctgctgaggatgcacaagtctgacatcacggtgatggtgttctttatcatgccagccaaaaccaacaactttaacgtcgaaacattaaagggccaggccgttaggaaacagctctgggacgtggcacattctgtcaaggagaaattcggtaaaaaactttatgacgctctgctgcgaggtgagatcccggatctcaacgacattcttgatcgggatgatctcaccatcatgaaaagagccatcttctccactcagcggcaaagtttgccacccgtaaccacacacaatatgatcgatgatagcacagatcctatcctaagcaccatccgccgcattggtctgtttaataatagaactgatagggtgaaagtgatcttgcatccagaatttttgtcgagtactagtcccttgcttcccatggattacgaggagtttgtgcggggatgccacctgggtgtcttcccaagttactacgaaccatggggttatacaccagccgaatgtacagtgatgggtataccctcagtcactaccaatttatctggcttcggatgctttatgcaggagcacgtggcggacccaaccgcctacggaatctatatcgtggatcgccgcttcaggtctccagatgacagctgcaaccagctgaccaagttcctttacgggttctgtaaacaatctcgccgccaaagaataatccaaagaaacaggaccgagagactgtctgacctactcgactggagatacctggggcgctactatcagcacgcccgacatctgactctgtcccgggctttccccgacaaattccacgtcgaactgacttcccccccaaccaccgagggctttaagtatccaaggccctcatctgtgcccccatcacccagtggctctcaggcttcatcgcctcagagtagcgatgtggaggatgaggttgaggacgagagatatgacgaagaagaggaagccgagcgcgatcggcttaatatcaaatctcccttttcccttagccacgtgccacacggcaaaaagaaactgcacggggagtacaagaac

SEQ ID NO: 13241 - DNA, 2109 bp, synthetic construct
  misc_feature 1..2109: note = source = /note="Description of Artificial Sequence: Synthetic coding sequence"
  source 1..2109: mol_type = other DNA
atgttgcgtggaagatcattgtccgttacatcattgggtggactaccacagtgggaggtcgaagaactgccagttgaggagctactgctttttgaggttgcatgggaagtgaccaataaggtcggcggcatttataccgtcatccaaactaaggcaaagactaccgccgacgaatggggcgagaattatttcctgattggaccatacttcgaacacaatatgaaaacacaggtagagcaatgcgaacctgtgaatgatgctgtcagacgagctgtagacgccatgaacaaacatggctgtcaggttcatttcggaagatggctgattgaaggctcaccgtacgtcgtgttatttgatataggatatagcgcttggaacctggaccggtggaaaggggatttatgggaggcttgttcagtcgggatcccgtaccacgaccgggaggcaaacgacatgctgatcttcggatcactaactgcttggttcctgaaggaggttactgatcacgccgacggtaagtacgtggtcgcacagttccacgagtggcaggcaggtattgggctcattttgtctagggctaggaaactgccaatagctaccatttttactacccacgcaactctcctcggccggtatctttgcgctgcgaacatagacttctacaaccacctagataaattcaacatcgacaaggaggcgggcgaacgtcagatctaccatagatattgtatggaaagagcaagtgtgcactgtgcccatgtgtttactacagtctcggaaatcaccgccatcgaagcagaacacatgcttaagcgcaagcctgatgttgtaactcctaatggcttgaacgtaaagaaattctcagccgttcacgagtttcagaacctccacgcaatgtataaggcgaggattcaggattttgtccgagggcacttctacggccacttggactttgacctggagaagactctctttctcttcatcgccggtaggtatgaattcagcaataaaggggctgacatcttcctggagtccctctctagactgaacttcttgttgagaatgcacaagagcgacataacagtcatggtgtttttcatcatgccagccaagactaataacttcaatgttgagacactgaagggacaagccgtgcgtaagcagctctgggacgtggctcattctgtcaaggagaagtttggcaagaagttgtacgacgctctgctccgcggagagattccggatctgaatgatattctcgatcgggacgatctcaccataatgaagcgggctatctttagcacccagcggcagagcctgcctccagtaaccactcataatatgatcgatgactcgaccgatcccattctttcaaccattcgacgtattggactgttcaataatcgcacagacagggtgaaagtcatcctccaccccgagtttctgtcatcgacatctcccctgctgccaatggattacgaggagttcgtgagagggtgccacctgggagtttttccttcgtattacgaaccctggggatatacccccgctgaatgcaccgtaatgggaatcccatccgtcacaaccaacctctcaggatttggatgctttatgcaggagcacgtggctgaccccacggcttacggcatatatatcgtcgaccggcggtttagatcacccgacgactcatgtaaccaactgactaaattcctgtacggcttctgcaagcagagtaggcgtcagcggattattcaaagaaaccggacggagcggctttccgatctgctcgactggcgctacttaggacggtactatcagcatgcgaggcatttgacactgagtagagccttccccgacaaatttcacgtcgaattgacgagtccgccaacaactgagggattcaagtaccctcgccccagcagcgtgcccccctcaccgagcggtagccaggcctccagcccacagtcttcggacgtggaggatgaagtggaagatgaaaggtatgatgaagaggaagaggctgagagagataggttgaacataaagagtcccttcagcctgtcacacgtgccccacgggaagaagaaactccatggtgagtacaagaat

SEQ ID NO: 13242 - DNA, 2109 bp, synthetic construct
  misc_feature 1..2109: note = source = /note="Description of Artificial Sequence: Synthetic coding sequence"
  source 1..2109: mol_type = other DNA
atgcttagaggtcgatcactctcagtcacctcacttggcggactccctcagtgggaagttgaagagctgcccgtcgaagagcttttgctctttgaagtcgcctgggaggtcactaataaggtcggcgggatttacaccgtgattcagaccaaggcgaaaactactgcagacgagtggggagagaattacttcctgattggcccatactttgagcacaacatgaaaacccaggtggaacaatgcgaaccggtcaacgatgcagtccggcgcgctgtggacgcgatgaataagcacgggtgtcaagtgcacttcggaaggtggctgattgagggctcaccttacgtggtgctttttgacattgggtactcggcatggaacctggatagatggaagggagatctttgggaagcctgttccgtgggaattccttatcacgaccgggaagcaaacgacatgctgattttcggatccctcaccgcctggttcctgaaagaggtcacggatcatgccgatggaaagtacgtggtggcccagtttcatgaatggcaggccgggataggacttatcctgtcccgggcaagaaaacttcctattgcgaccattttcaccacccacgcaactctgctcggccggtacctgtgtgcagcaaacattgacttttacaatcacctggataagtttaacatcgacaaggaggcaggtgagcgtcaaatctaccatagatactgcatggaacgcgcatcagtgcattgtgcacacgtgtttacgactgtgtcggaaattaccgcgattgaagccgagcatatgctgaagcgcaagccagatgtcgtgaccccgaatggtcttaatgtgaaaaagttctcggcagtccatgaattccaaaaccttcatgcaatgtacaaggcaagaatccaagactttgtgcgcggacacttttatggacatctggattttgatctcgaaaagaccctgtttctgtttattgccggtagatacgaattttcaaacaaaggtgcggacatttttctggaaagcctgtcacgtctgaactttctgctgagaatgcacaagagcgatattacggtcatggtgttctttatcatgcctgccaagaccaacaactttaatgtggaaaccctgaagggacaagctgtccggaagcaactgtgggatgtggcacattcggtgaaggaaaagtttggtaagaagctgtacgatgcacttctcaggggagaaattcctgatctgaacgacattctcgatagagacgacctcactattatgaaaagagctattttctcaacgcaacggcagtccctgcctcccgtgactactcataacatgattgatgactccaccgatcctattttgtccactattcgtagaatcggccttttcaataaccggaccgacagagtcaaagtgatccttcatccggaattcctgtcctcgacctcgccccttctcccaatggactacgaagagttcgtgaggggttgtcacctgggcgtgttccctagctactacgaaccatggggttacactcctgccgaatgcacggtgatgggcataccttcagtcaccactaatctgtcgggattcggttgttttatgcaggaacacgtcgcagatccaactgcgtacggtatatacatcgtggacagacggtttcgatcccctgatgattcgtgcaatcaactgaccaagttcctttacggattctgcaaacagtcaagacggcagcgcatcatccagagaaaccgtaccgaacgactcagcgacctgctcgactggcggtacctgggaagatactaccagcacgcacggcacctcactctgtcaagggcatttccagataagtttcacgtggaattgacctcgccaccaactaccgaagggtttaagtacccacgtccgagctcagtgcctccttccccctcgggaagccaggcctcgtctccgcaatcctccgacgtcgaagatgaggtggaagatgaaaggtacgatgaagaagaagaagcagaacgtgaccgcttgaacattaagtcgcctttctcgctttcgcatgtcccacacggtaagaagaagttgcatggcgaatacaagaat

SEQ ID NO: 13243 - DNA, 348 bp, synthetic construct
  misc_feature 1..348: note = source = /note="Description of Artificial Sequence: Synthetic coding sequence"
  source 1..348: mol_type = other DNA
atggactactaccggaagtacgcggcaatctttcttgtgactctttcagtctttctccatgtgctccattccgccccagatgtgcaggattgtccagaatgtactcttcaagagaacccattcttttcacagccaggcgcacctattcttcaatgcatgggatgttgtttttcacgtgcctaccccacgcctctgcgcagcaaaaagactatgctggtgcaaaagaacgtcacctcggaatctacttgttgtgttgcgaaatcatacaacagggtgactgtgatgggcggattcaaagtggagaatcacactgcttgccattgttctacctgctactaccacaagtcc

SEQ ID NO: 13244 - DNA, 348 bp, synthetic construct
  misc_feature 1..348: note = source = /note="Description of Artificial Sequence: Synthetic coding sequence"
  source 1..348: mol_type = other DNA
atggattactacagaaagtacgccgccatctttctcgtgacgctgtccgtcttcctacatgtactgcattccgcacccgacgtgcaagattgccctgagtgcacgctgcaggaaaatcccttctttagtcagccgggagcccctatactgcaatgtatgggatgctgtttctctcgcgcctatccgaccccactaaggtctaagaagaccatgctggtgcagaagaacgtcacctcagaaagcacctgctgcgtcgccaaaagctataatcgggttaccgtgatgggtggttttaaggtggagaatcacaccgcctgccactgttccacctgttactaccataagtct

SEQ ID NO: 13245 - DNA, 348 bp, synthetic construct
  misc_feature 1..348: note = source = /note="Description of Artificial Sequence: Synthetic coding sequence"
  source 1..348: mol_type = other DNA
atggactattatcgaaaatatgcggcaatatttctggttaccttatctgttttcctgcacgtactgcatagtgccccggacgtgcaagattgtccagaatgtacactgcaggagaatccatttttttctcaacccggtgctcccatcctccagtgtatggggtgttgcttttctcgtgcttacccgaccccacttagaagtaagaagactatgcttgtgcaaaagaatgtgactagcgagtcaacctgctgcgtggcaaagagctacaatcgagtgacagtgatgggcgggtttaaggtggaaaatcacactgcttgccattgttccacatgttactatcataagtcg

SEQ ID NO: 13246 - DNA, 348 bp, synthetic construct
  misc_feature 1..348: note = source = /note="Description of Artificial Sequence: Synthetic coding sequence"
  source 1..348: mol_type = other DNA
atggattactaccggaagtatgctgcgatcttcctcgtgaccctgagcgtgttcctccacgtgcttcacagcgccccagacgtgcaagactgccctgaatgcaccctccaagaaaacccgttcttctcgcagcctggagcaccaattctgcaatgtatgggatgctgcttctccagagcctaccccaccccactgcggtcaaaaaagacgatgctggtgcagaaaaacgtcacttcggaatcaacttgttgcgttgctaagtcctacaatcgcgttaccgtcatgggaggattcaaagtggagaaccacaccgcgtgccattgctcaacctgctactaccacaagagc

SEQ ID NO: 13247 - DNA, 348 bp, synthetic construct
  misc_feature 1..348: note = source = /note="Description of Artificial Sequence: Synthetic coding sequence"
  source 1..348: mol_type = other DNA
atggactactatcgtaaatacgctgctatattcttggttacccttagcgtttttctccatgtgttacattctgctccagatgttcaagattgcccggagtgtacactacaagagaacccttttttctctcaacctggggccccaattttgcaatgcatgggctgttgtttttcaagagcttacccaacgccattaaggtccaagaaaacaatgcttgtccaaaaaaatgtaacttctgaatctacctgctgcgtcgctaaatcctacaaccgtgttactgttatgggaggttttaaggtagaaaaccacaccgcgtgtcattgttccacgtgctattaccataaatct

SEQ ID NO: 13248 - DNA, 348 bp, synthetic construct
  misc_feature 1..348: note = source = /note="Description of Artificial Sequence: Synthetic coding sequence"
  source 1..348: mol_type = other DNA
atggactactataggaaatacgctgccatattcctggtgacactgtctgtgtttctgcatgtgctccatagtgccccagatgtgcaagattgccccgagtgcactctacaggaaaatccattcttttcccagccaggggcccctatcctccagtgcatggggtgctgcttcagccgggcctacccgacgccactccggtctaagaagaccatgctggtgcagaaaaacgtgacatctgaatcgacatgctgtgtggccaagtcatacaatcgcgtaacagtaatgggagggtttaaagtagagaatcacacggcctgccactgttctacctgttattaccataagagc

SEQ ID NO: 13249 - DNA, 348 bp, synthetic construct
  misc_feature 1..348: note = source = /note="Description of Artificial Sequence: Synthetic coding sequence"
  source 1..348: mol_type = other DNA
atggattactacagaaagtacgcagcgattttcctggtgactctctccgtgttcctgcacgtgctccactcggcgcctgacgtgcaggactgcccagaatgtacgctccaagagaacccgttcttcagccaaccaggcgcgccgatcctccagtgcatgggatgctgcttctcgcgggcatacccaaccccactccggtccaaaaagaccatgctggtgcaaaagaatgtcacgtccgagtcaacctgctgcgtcgccaagtcgtacaacagagtgaccgtcatgggtggatttaaggtggagaaccataccgcctgccactgctcaacctgttattaccataaatct

SEQ ID NO: 13250 - DNA, 348 bp, synthetic construct
  misc_feature 1..348: note = source = /note="Description of Artificial Sequence: Synthetic coding sequence"
  source 1..348: mol_type = other DNA
atggattactaccggaagtacgcagccattttcctcgtgaccctgtccgtgttcctgcacgtgcttcactccgcacccgacgtgcaagattgcccggaatgcaccctgcaggaaaacccattcttttcgcagccgggggcaccgattctgcaatgcatgggttgctgctttagcagggcgtacccaactcctttgcgtagcaagaaaaccatgctcgtccagaagaatgtcacctccgaatctacttgttgcgtggccaaaagctacaaccgggtgaccgtcatgggaggatttaaggtggaaaaccatactgcatgtcattgctcaacgtgttactaccataagagc

SEQ ID NO: 13251 - DNA, 348 bp, synthetic construct
  misc_feature 1..348: note = source = /note="Description of Artificial Sequence: Synthetic coding sequence"
  source 1..348: mol_type = other DNA
atggattactataggaagtacgccgctatatttctggtgacactaagtgtgttcctacacgtcttacacagcgcccccgacgttcaggattgtccagagtgcaccctgcaggaaaacccattctttagtcaaccgggcgcacccatcttgcagtgcatggggtgttgtttctcacgcgcatatcccactccactgaggtccaagaagaccatgctggttcaaaaaaacgtgacttctgagtccacttgctgcgtcgccaagagctataacagggttactgtgatgggcgggtttaaggtggagaatcacactgcttgccactgctctacttgctactaccacaaatcc

SEQ ID NO: 13252 - DNA, 348 bp, synthetic construct
  misc_feature 1..348: note = source = /note="Description of Artificial Sequence: Synthetic coding sequence"
  source 1..348: mol_type = other DNA
atggattattaccgaaaatatgctgccattttcctcgtgacactgagcgtgtttctccacgtgctgcacagcgcccctgatgtccaagactgtccggaatgtacactgcaggagaacccctttttttcccagccgggagctcccatcctgcagtgtatgggctgctgcttttctcgggcgtatccgacaccactgaggtcaaaaaaaaccatgctggtgcagaaaaacgtcacgagtgagtccacatgctgcgttgcaaagtcctacaatcgagtaaccgtcatgggtggatttaaagtcgagaaccatacggcttgccactgttctacttgttattaccacaaaagt

SEQ ID NO: 13253 - DNA, 348 bp, synthetic construct
  misc_feature 1..348: note = source = /note="Description of Artificial Sequence: Synthetic coding sequence"
  source 1..348: mol_type = other DNA
atggattactaccgcaagtacgcagcgattttccttgtcacgttgtctgtgtttctccacgtgctgcatagcgctcctgatgtgcaggactgccccgaatgcactttgcaagaaaatccgtttttcagccagcctggagctcccatcctgcaatgtatgggttgttgctttagtagagcatatcccacccctctgcggtccaaaaagaccatgctcgtgcagaagaacgtgacttcggaaagcacctgctgtgtcgcaaaatcttacaacagggtgacggtgatgggtggatttaaggtcgagaatcatactgcatgtcattgctcaacctgttattaccataaatcc

SEQ ID NO: 13254 - DNA, 348 bp, synthetic construct
  misc_feature 1..348: note = source = /note="Description of Artificial Sequence: Synthetic coding sequence"
  source 1..348: mol_type = other DNA
atggactactatcgcaagtacgcagctatcttcctggtgaccctctcagtgttcctgcacgtcctgcactccgcccctgatgtgcaagactgtccggagtgcaccctccaagaaaatccgttcttcagccagcctggagcaccgatccttcagtgtatgggttgctgcttttcgcgggcataccctacgccgttgcggtcaaaaaagaccatgctggtgcagaagaacgtgacttccgaatcaacctgttgcgtggcgaaatcatataacagagtgactgtgatgggaggtttcaaggtggagaatcacaccgcttgccattgcagcacttgctactaccacaaatca

SEQ ID NO: 13255 - DNA, 348 bp, synthetic construct
  misc_feature 1..348: note = source = /note="Description of Artificial Sequence: Synthetic coding sequence"
  source 1..348: mol_type = other DNA
atggactattacagaaagtacgcagcgatcttcctggtgactctgagcgtgttcttgcacgtgctccactcggccccagatgtccaagactgccctgagtgcactctgcaagagaacccattcttctcccagcccggggcgccgattctgcagtgtatgggatgctgcttctctcgcgcctacccgaccccactccggagcaaaaagaccatgctggtgcaaaagaatgtgactagcgagtccacttgctgcgtggcgaaatcgtacaatcgcgtcaccgtgatgggtggatttaaggtggaaaaccataccgcgtgccactgctcaacctgctactaccataagtcg

SEQ ID NO: 13256 - DNA, 348 bp, synthetic construct
  misc_feature 1..348: note = source = /note="Description of Artificial Sequence: Synthetic coding sequence"
  source 1..348: mol_type = other DNA
atggactactaccgcaagtacgcagcgatctttttggtgaccctttccgtgttcctgcatgtgctgcattcggctccggatgtgcaggattgcccagaatgtacgctgcaagaaaatccgttcttctcgcagccgggagccccaattctgcagtgtatgggctgctgcttctcaagggcctaccctaccccacttagaagcaaaaagaccatgctcgtccagaagaacgtcacttcggagtctacctgctgtgtggccaaatcgtataacagggttaccgtgatggggggattcaaggtcgagaaccacactgcttgccactgtagcacctgttactaccacaagtcc

SEQ ID NO: 13257 - DNA, 348 bp, synthetic construct
  misc_feature 1..348: note = source = /note="Description of Artificial Sequence: Synthetic coding sequence"
  source 1..348: mol_type = other DNA
atggactactaccggaagtacgccgccatctttctggtgaccctgtcagtgttcctgcacgtgctgcactcggccccagacgtgcaagactgtccggagtgtaccctgcaggagaacccgttcttctcccaacctggcgcgcccattctccagtgcatgggctgctgcttcagccgggcctacccgactccattgcggagcaagaaaaccatgctcgtccagaaaaatgtgactagcgaaagcacctgctgcgtggccaagagctacaacagagtgaccgtgatgggcggatttaaggtggaaaaccacactgcgtgccactgctcaacttgttactaccacaagtcc

SEQ ID NO: 13258 - DNA, 348 bp, synthetic construct
  misc_feature 1..348: note = source = /note="Description of Artificial Sequence: Synthetic coding sequence"
  source 1..348: mol_type = other DNA
atggattactataggaagtacgcagccatttttctggtcaccctgtccgtgttccttcacgtactgcacagcgctcctgacgtgcaggattgtcccgaatgcaccctgcaggaaaaccctttttttagtcagccaggagcgcctatattgcagtgcatgggatgctgttttagcagggcatacccaacacccttgcggtctaagaagaccatgctggttcagaagaacgtgacgagtgagtctacctgctgcgtggctaaaagctacaaccgagttaccgtaatgggcggttttaaagttgaaaaccacacggcctgtcactgcagcacatgctattatcataaatct

SEQ ID NO: 13259 - DNA, 348 bp, synthetic construct
  misc_feature 1..348: note = source = /note="Description of Artificial Sequence: Synthetic coding sequence"
  source 1..348: mol_type = other DNA
atggattactatcgcaagtatgcggcaatattcttggtgaccttgtcggtattcctacatgtgctccattccgccccagatgtgcaggactgtccagagtgcaccttgcaggagaacccattcttctcccaaccaggggccccaatactgcagtgcatgggctgctgcttcagccgtgcttatcccacgcctctgagaagcaagaaaactatgttggttcagaagaatgtgacttcggaatctacctgctgcgtggcaaagtcatacaatagggtgacggtcatgggtggttttaaggtcgaaaatcacaccgcttgccattgctcaacatgttactaccataagtcg

SEQ ID NO: 13260 - DNA, 348 bp, synthetic construct
  misc_feature 1..348: note = source = /note="Description of Artificial Sequence: Synthetic coding sequence"
  source 1..348: mol_type = other DNA
atggactactatcgcaaatacgcggccattttccttgtcacgttatcagtctttctgcatgtgctgcacagtgctcccgacgttcaggactgtcctgagtgtacactgcaggagaatcctttcttcagtcaaccaggagcgcctatcttgcagtgtatgggctgctgtttctcccgcgcctaccccacgccactgcgtagcaagaaaactatgctagtccagaaaaacgtgactagcgagtcaacatgttgcgtcgccaaaagctacaatagagtgactgtgatggggggcttcaaggtggagaaccatactgcctgtcattgttctacctgctactaccacaagtcg

SEQ ID NO: 13261 - DNA, 348 bp, synthetic construct
  misc_feature 1..348: note = source = /note="Description of Artificial Sequence: Synthetic coding sequence"
  source 1..348: mol_type = other DNA
atggattattacagaaaatatgctgctatcttcttagtgacactgtcagtatttcttcatgtgctccatagcgctcccgacgttcaagattgccccgagtgtaccctccaagaaaacccattttttagtcagcccggcgctcccatcttgcaatgtatgggatgttgtttctctcgcgcctaccctacgcctctcaggtccaagaagactatgcttgttcagaagaacgtgacatcagagagcacatgctgcgtggccaagagctacaatcgggttacggtgatggggggattcaaggttgagaatcatacagcttgccattgttctacctgttattaccacaaaagt

SEQ ID NO: 13262 - DNA, 348 bp, synthetic construct
  misc_feature 1..348: note = source = /note="Description of Artificial Sequence: Synthetic coding sequence"
  source 1..348: mol_type = other DNA
atggactactaccgaaaatacgccgctatctttctggtgactttgagcgtgttcctgcacgtgcttcactctgcaccggatgtccaagattgcccggagtgtactcttcaggaaaatccttttttcagccagcctggcgcaccgatactccaatgcatgggctgttgtttttccagagcttaccccactccactgagatccaagaaaacgatgctcgtgcaaaagaacgttacttcggaatcgacctgttgcgtggcaaagtcatacaaccgtgtcaccgttatggggggttttaaggtggagaaccataccgcatgtcattgttcaacgtgctattaccacaagtca

SEQ ID NO: 13263 - DNA, 348 bp, synthetic construct
  misc_feature 1..348: note = source = /note="Description of Artificial Sequence: Synthetic coding sequence"
  source 1..348: mol_type = other DNA
atggactactacaggaagtacgctgcaatctttctggtgaccctgtccgtgttcctccacgtgcttcattccgccccggacgtgcaagattgtcctgagtgtacgctccaagagaacccgttcttttcacagccaggagcaccaattctccaatgtatgggatgctgtttttcccgagcataccctacgcctctccggagcaagaaaaccatgctggtccagaagaacgtgacctcagaatcgacttgttgtgtcgcaaagtcttacaacagggtgactgtgatgggaggtttcaaggtggaaaaccatactgcatgtcactgttcgacctgttactaccataagtcg

SEQ ID NO: 13264 - DNA, 348 bp, synthetic construct
  misc_feature 1..348: note = source = /note="Description of Artificial Sequence: Synthetic coding sequence"
  source 1..348: mol_type = other DNA
atggactactaccgcaagtatgcagccatcttcctcgtcactctgtccgtctttctccacgtccttcactcagcacccgatgtgcaggattgtcctgaatgcactctccaagaaaaccccttcttcagccaaccgggtgcgccaatattgcaatgcatgggatgttgcttttcaagagcataccctacgcctctcaggtcaaaaaagactatgctggtgcagaagaatgtgacctccgaatccacttgctgcgttgcgaaatcgtacaaccgggtcaccgtcatgggtggttttaaggtcgaaaaccacaccgcatgtcattgcagcacttgttactaccacaagtca

SEQ ID NO: 13265 - DNA, 348 bp, synthetic construct
  misc_feature 1..348: note = source = /note="Description of Artificial Sequence: Synthetic coding sequence"
  source 1..348: mol_type = other DNA
atggattactatcggaaatacgcagcaatcttcttggtgaccctgtcggtgttcctccacgtgctgcattccgcaccggacgttcaagactgcccggaatgcactctgcaagagaaccctttcttctctcaaccaggggcgcctatcctccagtgtatgggatgctgtttctccagagcctacccgacgccactgcgctcgaaaaagactatgctggtgcagaaaaatgtgacttccgagagcacttgctgcgtggcgaagtcgtacaatcgagtgactgtgatgggaggatttaaggtcgaaaatcataccgcttgccattgcagcacttgctactaccataaaagc

SEQ ID NO: 13266 - DNA, 348 bp, synthetic construct
  misc_feature 1..348: note = source = /note="Description of Artificial Sequence: Synthetic coding sequence"
  source 1..348: mol_type = other DNA
atggactactatcggaaatacgcagccatcttcctggtgacccttagcgtctttcttcatgtgcttcattcggccccagatgtacaggattgtcccgagtgtaccctccaagaaaatccctttttctcgcagccaggggcgccgattctgcaatgcatgggatgctgtttttccagagcctaccctactccgcttagatcaaagaaaaccatgctcgtgcaaaagaacgtaaccagcgaatccacttgctgtgtcgcaaagagttacaatagggtgaccgtcatgggcgggtttaaagtggaaaaccacaccgcatgccattgctcgacttgttactaccacaagtcg

SEQ ID NO: 13267 - DNA, 348 bp, synthetic construct
  misc_feature 1..348: note = source = /note="Description of Artificial Sequence: Synthetic coding sequence"
  source 1..348: mol_type = other DNA
atggactactatcgcaagtacgccgcaatcttcctggtgaccctgagcgtgtttttgcacgtgttgcatagtgcgcctgatgttcaggattgccccgagtgtactcttcaagaaaacccatttttctcgcaacctggtgcccctattcttcagtgtatgggttgctgtttctctcgagcatatccaacccccctgaggtctaagaaaaccatgctcgtccaaaagaacgtgacgtccgaatctacgtgttgcgtggcaaagtcatacaatcgggtaactgtgatgggaggctttaaagtcgaaaaccataccgcatgccattgttcgacttgttactaccacaagtcc

SEQ ID NO: 13268 - DNA, 348 bp, synthetic construct
  misc_feature 1..348: note = source = /note="Description of Artificial Sequence: Synthetic coding sequence"
  source 1..348: mol_type = other DNA
atggattattatcggaaatacgctgctattttcctggtgacactatcggtgtttctccacgttctccacagcgcaccagatgtgcaggactgccctgagtgtacattgcaggaaaacccattcttctcccagccaggcgcccccatactccaatgcatggggtgctgtttctcaagagcctacccaacacctctgcgctccaagaaaaccatgctggtccagaaaaacgtcacctcagagtccacctgttgtgtagctaaatcttataaccgagttacggtcatgggcgggtttaaggttgaaaaccacaccgcttgccactgcagcacctgctattaccataagagc

SEQ ID NO: 13269 - DNA, 348 bp, synthetic construct
  misc_feature 1..348: note = source = /note="Description of Artificial Sequence: Synthetic coding sequence"
  source 1..348: mol_type = other DNA
atggactactacagaaagtacgccgcgatcttcctggtcaccctgtcagtgtttcttcacgttctgcactcagcaccagatgtgcaggattgtcctgaatgcacgctgcaggaaaaccccttcttttcgcagccgggagcacctattctgcagtgtatgggctgttgcttttcgagagcttacccgacgcccttgcgctccaagaaaacgatgcttgtgcaaaagaatgtcacttctgagtccacttgctgtgtcgcaaagagctacaacagagtgaccgtgatggggggctttaaggtggaaaatcatacggcatgccattgttccacctgttactaccacaaatca

SEQ ID NO: 13270 - DNA, 348 bp, synthetic construct
  misc_feature 1..348: note = source = /note="Description of Artificial Sequence: Synthetic coding sequence"
  source 1..348: mol_type = other DNA
atggattattaccgtaagtacgcggcaatctttctggtgactctctccgtattcctccatgttttgcatagcgcaccagacgtgcaggattgtcctgagtgtacacttcaagagaacccgtttttcagccagccgggagccccgatcctgcagtgtatggggtgctgctttagccgcgcctaccctacccccttgcgctcaaaaaagaccatgttagtgcagaaaaacgtgacttcagaatctacgtgctgcgtggcgaaatcctataatcgggtgactgtcatgggggggtttaaagttgaaaatcacaccgcctgtcactgctccacgtgttattatcacaagagt

SEQ ID NO: 13271 - DNA, 348 bp, synthetic construct
  misc_feature 1..348: note = source = /note="Description of Artificial Sequence: Synthetic coding sequence"
  source 1..348: mol_type = other DNA
atggattactaccgaaagtatgccgcgattttcctggtgactctttctgtattcctgcatgtactgcattcagctccagacgtccaggactgccccgaatgtacccttcaggaaaaccctttcttctcccagcccggggcgcccatcctgcagtgtatgggctgctgcttcagtagggcctatcccactcccttgagaagcaagaagactatgctggtgcagaagaatgttacctccgaatctacctgctgcgtggctaaatcttataatagggtgacggtgatgggaggatttaaggtagagaatcataccgcatgccactgttctacgtgctactaccataagagt

SEQ ID NO: 13272 - DNA, 348 bp, synthetic construct
  misc_feature 1..348: note = source = /note="Description of Artificial Sequence: Synthetic coding sequence"
  source 1..348: mol_type = other DNA
atggactactaccggaagtacgccgctatcttcctggtgaccctgtccgtctttctgcatgtgttgcactcggcgccggacgtgcaggactgtccggaatgcaccctgcaggagaaccctttcttttcacagccgggcgcaccgatcctccagtgcatgggttgctgctttagccgggcctaccccactcctcttcggtccaagaaaaccatgctcgtccagaagaatgttacttccgaaagcacttgctgcgtggccaaaagctataacagggtcactgtgatgggaggattcaaggtggaaaaccataccgcctgccattgctcgacttgttactatcataagtcc

SEQ ID NO: 13273 - DNA, 348 bp, synthetic construct
  misc_feature 1..348: note = source = /note="Description of Artificial Sequence: Synthetic coding sequence"
  source 1..348: mol_type = other DNA
atggactactacaggaaatacgctgcaatatttctggtgacgctttcagtgttcctccatgtgcttcatagtgcccctgatgtccaggattgccccgagtgtaccctgcaggagaatcccttcttctcccagccaggggcaccgattcttcagtgtatgggctgttgcttttcaagagcatatcctacaccgcttcgatcaaagaagacaatgttggtgcagaagaatgtaacaagcgaatccacgtgctgtgtggctaagagctacaaccgggtgactgtaatgggcgggtttaaagtggaaaaccacactgcctgccactgtagtacctgctactaccacaagagc

SEQ ID NO: 13274 - DNA, 348 bp, synthetic construct
  misc_feature 1..348: note = source = /note="Description of Artificial Sequence: Synthetic coding sequence"
  source 1..348: mol_type = other DNA
atggactattaccggaaatacgccgctatcttcctcgtcactttgtccgtgtttctgcatgtccttcattcggccccggacgtgcaagattgtcctgagtgcaccctccaggaaaacccattcttcagccagcccggagcgccaatcctgcaatgcatgggatgttgcttctcgcgcgcgtacccgaccccgctgagaagcaaaaagaccatgctggtgcagaagaatgtgacctcagaatcgacgtgctgcgttgccaagtcttacaacagggtgactgtgatggggggctttaaggtcgagaaccacactgcatgccactgttcaacttgctactaccacaagtcc

SEQ ID NO: 13275 - DNA, 348 bp, synthetic construct
  misc_feature 1..348: note = source = /note="Description of Artificial Sequence: Synthetic coding sequence"
  source 1..348: mol_type = other DNA
atggattattacaggaagtacgccgctattttcctggtcaccttgagcgtgtttctgcatgtgctgcactccgctccggacgttcaggactgccccgaatgcacactacaggagaatccattcttctcccagcccggcgcacccatactccagtgtatgggctgttgtttctctcgcgcatacccaactcctctcagatctaaaaagacaatgttggtccaaaaaaacgttacttctgagtccacatgctgcgtagctaagagctataaccgggttacagtgatgggagggttcaaagtggaaaatcacacggcatgtcactgtagtacttgctattaccataagagt

SEQ ID NO: 13276 - DNA, 348 bp, synthetic construct
  misc_feature 1..348: note = source = /note="Description of Artificial Sequence: Synthetic coding sequence"
  source 1..348: mol_type = other DNA
atggactattacagaaagtacgccgcgatctttctcgtgaccctgtcggtgttcttgcatgtgctgcattcagcccccgacgtgcaagattgcccggaatgcacccttcaggaaaatccgttcttctcacagccgggtgccccaatcctgcaatgcatgggctgctgttttagccgcgcctaccctactccactccgcagcaaaaagaccatgctcgtacagaaaaatgtgacctccgagtccacctgttgtgtggcgaagtcctacaaccgcgtcacggtgatgggcgggttcaaagtcgagaaccacactgcgtgccattgctcaacttgttactaccacaagtcc

SEQ ID NO: 13277 - DNA, 348 bp, synthetic construct
  misc_feature 1..348: note = source = /note="Description of Artificial Sequence: Synthetic coding sequence"
  source 1..348: mol_type = other DNA
atggattattaccgcaaatacgcagctatcttcctggtgaccctctctgtgtttctccacgttctccactcagcgcccgatgtgcaagactgtcctgagtgtaccttgcaggagaatccatttttctctcagcccggagctccgattctccagtgtatgggatgttgttttagtagagcatatcccaccccactccggtccaagaagaccatgcttgtgcagaagaacgtcacctccgaatctacctgctgcgttgcaaagtcctataatagggtgaccgtgatgggcggattcaaagtggaaaatcacactgcatgtcactgcagtacgtgttactatcataagagc

SEQ ID NO: 13278 - DNA, 348 bp, synthetic construct
  misc_feature 1..348: note = source = /note="Description of Artificial Sequence: Synthetic coding sequence"
  source 1..348: mol_type = other DNA
atggattactacagaaagtatgctgcaatcttcctcgttactctgtccgtgttcttgcacgtcctgcactcggcaccggacgtccaggattgtccggagtgtaccctccaggaaaaccctttctttagccagcctggggccccgatactgcagtgtatgggttgctgcttctcccgcgcctacccaacccctctccggtcaaaaaagaccatgttggtgcagaaaaatgtcacgtccgagtctacctgctgcgtcgcaaagtcgtacaaccgggtgactgtgatggggggattcaaggtggaaaatcacactgcctgtcattgctctacttgctactaccataagagc

SEQ ID NO: 13279 - DNA, 348 bp, synthetic construct
  misc_feature 1..348: note = source = /note="Description of Artificial Sequence: Synthetic coding sequence"
  source 1..348: mol_type = other DNA
atggactattaccgaaagtacgcggctatcttcctcgtcaccttgtccgtctttctgcacgtactgcactccgcgccggatgtccaagactgtccggagtgtactctgcaagaaaatcccttcttctcccagccgggcgcgccaatcctgcagtgcatgggttgctgcttttcacgcgcctatccgaccccactcagatctaaaaagactatgctcgtacagaaaaacgtcactagcgaatcgacttgctgcgtggccaagtcgtacaacagggtgaccgtgatgggaggattcaaagttgagaatcataccgcctgccactgcagcacttgctactaccataagtcg

SEQ ID NO: 13280 - DNA, 348 bp, synthetic construct
  misc_feature 1..348: note = source = /note="Description of Artificial Sequence: Synthetic coding sequence"
  source 1..348: mol_type = other DNA
atggattattatcgtaaatatgctgcaatttttttagttacattgtctgtatttcttcatgttcttcatagtgctcctgatgtacaagattgtccagaatgtacgcttcaagagaatccattcttttcacaaccaggtgctcctattttacaatgtatgggatgttgtttttcaagggcttatccaacaccattgcgatcaaaaaaaacaatgctcgttcaaaaaaatgttacttcagaatctacatgttgtgtagccaaatcatataatagagtaactgttatgggaggatttaaggtagaaaatcatacagcctgtcattgttctacatgttattatcataagtcc

SEQ ID NO: 13281 - DNA, 348 bp, synthetic construct
  misc_feature 1..348: note = source = /note="Description of Artificial Sequence: Synthetic coding sequence"
  source 1..348: mol_type = other DNA
atggactactaccgcaagtacgcagccattttccttgtgacgttgagcgtgtttctccacgtcttgcattcggccccagatgtgcaggattgccctgaatgcactctgcaagaaaacccgtttttcagccagccgggtgctccgatcctgcagtgtatgggctgttgtttcagccgggcttatccgacgccgctgaggtcgaaaaagactatgctggtgcagaaaaacgtcacctcggagtcgacctgttgcgtggcaaagagctacaaccgcgtgactgtgatgggcggattcaaggtggaaaatcacaccgcgtgccactgttcgacttgttactaccataagtca

SEQ ID NO: 13282 - DNA, 348 bp, synthetic construct
  misc_feature 1..348: note = source = /note="Description of Artificial Sequence: Synthetic coding sequence"
  source 1..348: mol_type = other DNA
atggattactaccgtaaatacgcagcaatcttcctggtgaccctttctgtgtttctccacgttctgcactccgcacctgacgtgcaggattgcccagagtgtaccctgcaagagaatccgttcttttcccaacctggtgcacctattctccaatgtatgggctgttgtttttcgagagcatacccaactcctcttagatcgaagaaaaccatgctggtgcaaaagaatgtgacttcagagtccacctgctgtgtcgcaaagtcctacaatcgggtgactgtgatgggtggatttaaggtggagaaccataccgcatgccattgtagcacttgttactatcataagagc

SEQ ID NO: 13283 - DNA, 348 bp, synthetic construct
  misc_feature 1..348: note = source = /note="Description of Artificial Sequence: Synthetic coding sequence"
  source 1..348: mol_type = other DNA
atggattattatcgaaaatatgcagccatctttcttgtaacattgagtgtctttttacacgtgcttcattcagctccagacgtacaagattgtcctgaatgtacactacaggaaaatccgtttttctctcaaccgggagcacctatcttgcaatgtatggggtgctgcttctctcgggcttaccctacccccttacgttctaagaaaacaatgctcgtgcagaaaaatgtcacaagcgaatccacgtgttgtgttgctaagtcatacaacagagtaacagtgatgggagggttcaaagtagaaaaccatacggcatgccattgctctacgtgttattaccacaagtca

SEQ ID NO: 13284 - DNA, 348 bp, synthetic construct
  misc_feature 1..348: note = source = /note="Description of Artificial Sequence: Synthetic coding sequence"
  source 1..348: mol_type = other DNA
atggactattacaggaagtacgctgctatctttctggtgaccctctccgtgttcctgcatgtcctccactctgcccccgatgtgcaggactgccctgaatgtaccctgcaagaaaaccccttcttctcacagcctggagccccaatactgcagtgcatgggttgctgcttttcacgggcgtaccccacccctctaagaagtaagaaaaccatgttggtccagaagaatgtgacttccgagtctacatgctgtgtagcaaaatcctataatagagtgaccgtgatgggagggtttaaggttgagaaccacactgcctgtcactgttcaacatgttattaccataagtct

SEQ ID NO: 13285 - DNA, 348 bp, synthetic construct
  misc_feature 1..348: note = source = /note="Description of Artificial Sequence: Synthetic coding sequence"
  source 1..348: mol_type = other DNA
atggattactaccgcaagtacgctgctatattcttggtgactctcagcgtgttcctgcatgtcctccatagcgcacccgacgtgcaagattgtcccgagtgcacactgcaagagaatccattcttcagccaaccaggcgctcccatcttgcaatgcatgggatgctgtttctcgcgcgcctaccctaccccattgcgttcaaagaagaccatgctggtccagaagaacgtgacgtctgagtcgacatgttgcgtggcgaaatcttataaccgcgttacagtaatgggtggttttaaggtcgagaatcacaccgcctgccattgttctacatgctattatcataagtcc

SEQ ID NO: 13286 - DNA, 348 bp, synthetic construct; identical to SEQ ID NO: 13277
  misc_feature 1..348: note = source = /note="Description of Artificial Sequence: Synthetic coding sequence"
  source 1..348: mol_type = other DNA

SEQ ID NO: 13287 - DNA, 348 bp, synthetic construct
  misc_feature 1..348: note = source = /note="Description of Artificial Sequence: Synthetic coding sequence"
  source 1..348: mol_type = other DNA
atggactattatcgcaaatacgcagccatcttcttggttacactatctgtgtttctccatgtgctccactccgcccctgacgtgcaggactgtcccgagtgtacgctccaggaaaacccattcttctcccaacccggcgccccgatcctgcagtgtatgggatgttgcttttcccgggcgtatccaacacccctgaggtctaaaaaaaccatgcttgtgcagaaaaatgtgactagcgagtccacttgctgcgtcgccaaaagctataatagggtaaccgttatgggtggatttaaggttgagaaccatactgcctgtcactgttctacatgctactaccacaagtcc

SEQ ID NO: 13288 - DNA, 348 bp, synthetic construct
  misc_feature 1..348: note = source = /note="Description of Artificial Sequence: Synthetic coding sequence"
  source 1..348: mol_type = other DNA
atggattactacaggaaatacgccgccatattcctggtgaccctgagcgtgtttctgcacgtgctccacagcgcacccgacgttcaagactgtccagagtgtacactgcaggagaatccctttttcagtcagccgggggccccaatcctgcaatgtatggggtgctgcttctcaagagcataccccactccactccgatcaaagaagactatgctcgtccagaagaacgtcacctctgagagcacttgctgcgtggccaagtcctacaatagggttacagttatgggagggttcaaagtggaaaatcatactgcctgtcattgtagcacctgctactatcataagagc

SEQ ID NO: 13289 - DNA, 348 bp, synthetic construct
  misc_feature 1..348: note = source = /note="Description of Artificial Sequence: Synthetic coding sequence"
  source 1..348: mol_type = other DNA
atggattattaccgcaagtatgcagcgattttcctggtgaccctgagcgtcttcctgcatgtgctgcattccgctccagacgtgcaggattgccctgaatgcacgctgcaagagaatcctttttttagccagccaggcgccccaattctgcagtgtatgggttgctgtttctcccgcgcatatccaaccccactaagaagcaagaagactatgctggtgcaaaaaaacgtgaccagcgagagtacctgctgtgtggccaagagctacaaccgcgttacggtcatgggtggttttaaggtggaaaatcacacggcatgccattgttccacttgttactaccacaaaagc

SEQ ID NO: 13290 - DNA, 348 bp, synthetic construct
  misc_feature 1..348: note = source = /note="Description of Artificial Sequence: Synthetic coding sequence"
  source 1..348: mol_type = other DNA
atggactattacagaaagtacgctgcgatcttcctggttactcttagtgtgttccttcacgtcctgcacagcgccccagacgtgcaagattgccctgagtgtaccctgcaggagaatccattctttagtcaaccgggagcccccatcttgcagtgtatggggtgctgcttctcgcgggcctaccccaccccactccgcagcaagaaaacgatgctggtccagaagaacgtgaccagcgaatccacgtgttgcgtcgcgaaatcatacaaccgcgtgacggtcatgggaggctttaaggtggaaaatcacactgcatgccattgctccacttgttactaccataaatcg

SEQ ID NO: 13291 - DNA, 348 bp, synthetic construct
  misc_feature 1..348: note = source = /note="Description of Artificial Sequence: Synthetic coding sequence"
  source 1..348: mol_type = other DNA
atggactattataggaagtatgctgctattttcctcgtaactttatccgtctttttgcacgtgctccactctgcccctgacgtacaggattgtcccgagtgtacactgcaggaaaatcctttttttagtcagccaggagcccccattctacaatgtatgggatgctgcttttccagagcctaccccactccactgcgctccaagaagaccatgctcgtgcagaagaacgtgacctccgagtcaacttgctgtgtcgccaaatcatacaaccgggtcaccgttatgggtggatttaaagttgagaaccacaccgcctgccactgctccacatgctactaccataaaagt

SEQ ID NO: 13292 - DNA, 348 bp, synthetic construct
  misc_feature 1..348: note = source = /note="Description of Artificial Sequence: Synthetic coding sequence"
  source 1..348: mol_type = other DNA
atggactactatcgtaagtacgcagctatttttcttgtgacactgtccgtgttcctgcatgtgttgcattccgctcccgacgtgcaagattgtcctgaatgtaccttgcaggagaaccctttcttctcacaaccaggcgctccaatcttgcagtgtatgggctgctgcttcagcagggcatatccaactccactcaggtcaaagaagaccatgctcgtgcaaaaaaacgtaacttccgaatccacctgttgcgtagccaagtcatacaaccgtgtgaccgtcatgggaggctttaaggtcgagaaccataccgcatgtcactgcagtacctgctactaccacaagtcc

SEQ ID NO: 13293 - DNA, 348 bp, synthetic construct
  misc_feature 1..348: note = source = /note="Description of Artificial Sequence: Synthetic coding sequence"
  source 1..348: mol_type = other DNA
atggattactacaggaaatacgcagccattttcctcgtcactctctcagtgttcctccacgtgcttcacagcgcaccagacgtgcaagattgtccagaatgcactctgcaagagaatccttttttctcgcagccaggtgccccaatactgcaatgcatgggatgttgtttttcgagggcatacccaaccccacttcgctccaaaaagacgatgcttgtgcagaaaaacgttacttccgaatcgacctgttgcgtggcaaagtcatacaatagagtgaccgtgatgggaggatttaaggtggagaatcataccgcgtgtcattgctccacttgttactaccacaagtca

SEQ ID NO: 13294 - DNA, 348 bp, synthetic construct
  misc_feature 1..348: note = source = /note="Description of Artificial Sequence: Synthetic coding sequence"
  source 1..348: mol_type = other DNA
atggactattatagaaagtacgctgctatcttcctcgtgaccctctccgtattcctgcacgtgctccatagtgccccagatgttcaggactgcccggaatgtacgttacaggagaatccgttctttagccagccaggtgctccgatactgcagtgtatggggtgctgcttttctcgggcttacccgaccccattaaggtcaaagaaaaccatgctcgttcaaaaaaacgtgacttctgagagcacatgctgtgtggcaaagagttacaaccgggtgacagtgatgggtgggttcaaggtggaaaatcacactgcctgccactgcagcacatgttattaccataagtcc

SEQ ID NO: 13295 - DNA, 348 bp, synthetic construct
  misc_feature 1..348: note = source = /note="Description of Artificial Sequence: Synthetic coding sequence"
  source 1..348: mol_type = other DNA
atggattattacagaaagtatgcggcaatattcctagtaactctgtcggttttccttcatgtgcttcatagtgctccagatgtgcaggattgccctgagtgcactctgcaggaaaaccctttcttttcccagcctggagcccccatactacagtgcatgggatgttgcttcagtcgggcgtatcccacacctctgcgctcaaaaaaaacaatgctcgtgcagaaaaatgtgacatccgaatctacatgttgtgtggcaaagagttataacagggtgacagtgatggggggattcaaagtcgaaaaccacacagcgtgtcactgttcgacttgttattatcataaatct

SEQ ID NO: 13296 - DNA, 348 bp, synthetic construct
  misc_feature 1..348: note = source = /note="Description of Artificial Sequence: Synthetic coding sequence"
  source 1..348: mol_type = other DNA
atggattactacaggaagtacgcagcaatattccttgtgacgttgtcagtgtttctccacgtactgcactccgcacctgacgtgcaagactgtcccgagtgcaccctgcaagaaaatcccttctttagccagcctggtgcccctattttgcagtgtatgggatgttgcttctcacgtgcgtaccctacccctctccgaagcaaaaagactatgcttgtccagaagaacgtgacttcagagtcgacctgctgtgtggccaagagctataatcgcgtcactgtgatgggcgggttcaaggtggaaaaccataccgcttgtcattgctcgacctgttactaccataagtca

SEQ ID NO: 13297 - DNA, 348 bp, synthetic construct
  misc_feature 1..348: note = source = /note="Description of Artificial Sequence: Synthetic coding sequence"
  source 1..348: mol_type = other DNA
atggactattatcggaagtatgccgccatcttcctagttactttgtcggtgttcctgcacgtgctgcattcggctcccgacgttcaggattgcccagagtgtaccctccaagaaaatcccttcttcagccagcccggagctcctatcttgcaatgcatggggtgttgtttctctcgagcctatcctaccccactgcgctccaaaaagactatgctcgtacaaaaaaatgtgacctcagaaagcacttgttgcgtggctaaatcttacaaccgtgtgacagtgatgggtgggttcaaagtcgagaaccataccgcatgtcattgctccacctgttattaccacaagtcc

SEQ ID NO: 13298 - DNA, 348 bp, synthetic construct
  misc_feature 1..348: note = source = /note="Description of Artificial Sequence: Synthetic coding sequence"
  source 1..348: mol_type = other DNA
atggattactaccgaaagtacgcagcaattttcctggtcactctttccgtgtttctgcatgtgctgcactccgccccagatgtccaagactgcccagaatgcaccctgcaagaaaatccttttttctcccagcccggcgcgcctatccttcaatgtatgggttgttgtttctccagggcatacccgactccgctcaggagcaagaaaacgatgcttgtgcagaagaacgtgacttctgagtccacctgctgcgttgcaaagtcatacaatcgagtcactgtgatgggcggttttaaggtggagaaccacaccgcctgccattgttcaacctgttactatcacaagagc

SEQ ID NO: 13299 - DNA, 348 bp, synthetic construct
  misc_feature 1..348: note = source = /note="Description of Artificial Sequence: Synthetic coding sequence"
  source 1..348: mol_type = other DNA
atggactactaccgaaaatacgctgcaatcttcctagtcaccctgagcgtgttcttacacgtgttgcactcagctccggatgtccaggactgtcccgaatgtactctgcaggaaaaccctttcttttcacagcccggcgctcctatcctccagtgtatgggatgttgctttagcagagcttaccccacgcccttgcgatctaagaagactatgttggtgcaaaagaatgtgacgtctgagagtacctgttgtgtggcgaagtcctacaaccgagttaccgtcatgggcggcttcaaggttgaaaaccacaccgcttgccactgcagcacctgttactatcataaatca

SEQ ID NO: 13300 - DNA, 348 bp, synthetic construct
  misc_feature 1..348: note = source = /note="Description of Artificial Sequence: Synthetic coding sequence"
  source 1..348: mol_type = other DNA
atggactactacaggaagtacgcggccattttcctagtcaccctgagtgttttcctccacgttctgcactccgctccagatgttcaagactgtcctgaatgcactctacaggagaacccattcttctcccaaccaggcgctcctatccttcagtgcatgggctgttgcttttcccgggcatacccaacaccgcttcgtagcaagaagaccatgctagtccagaaaaatgtcacttccgaatcaacatgctgtgtggctaaaagctataatcgtgtaaccgttatgggaggttttaaggtggagaatcatactgcctgccactgctccacgtgctattatcacaaaagc

SEQ ID NO: 13301 - DNA, 348 bp, synthetic construct
  misc_feature 1..348: note = source = /note="Description of Artificial Sequence: Synthetic coding sequence"
  source 1..348: mol_type = other DNA
atggactattatcgcaaatatgctgccatattcttggtgaccttaagcgtgtttttgcacgtcctacacagtgctccggatgttcaggactgccccgagtgtacactccaggagaatccattcttttcccagccaggggcacccatactacagtgtatgggctgctgtttcagcagagcctacccgacaccattgaggagcaagaagaccatgctcgtgcaaaaaaatgtcaccagcgaatcaacctgctgtgtagcaaagagctataaccgcgtcactgtaatgggtgggtttaaggttgagaaccacacagcttgccactgctccacctgttattatcataagtca

SEQ ID NO: 13302 - DNA, 348 bp, synthetic construct
  misc_feature 1..348: note = source = /note="Description of Artificial Sequence: Synthetic coding sequence"
  source 1..348: mol_type = other DNA
atggactactaccggaagtacgctgcaatcttcctcgtgactctctcggtctttcttcatgtgctgcattccgccccagatgtgcaagattgtcctgagtgtactctgcaagagaatcccttcttttctcagcctggcgcgccgatcctgcaatgtatggggtgctgttttagccgcgcctatccaacgccgcttagatcgaagaaaactatgctggtccagaagaatgtgacgtcggaatctacctgttgtgtcgcaaagtcctacaacagagtgaccgtgatggggggatttaaggtcgagaaccatactgcatgccactgcagcacctgctactaccataagtct

SEQ ID NO: 13303 - DNA, 348 bp, synthetic construct
  misc_feature 1..348: note = source = /note="Description of Artificial Sequence: Synthetic coding sequence"
  source 1..348: mol_type = other DNA
atggactactacagaaagtatgccgccatcttcttggtaaccctcagcgtattccttcatgtgcttcacagcgcccctgatgtccaggactgccccgagtgtacccttcaggagaacccgtttttttcgcagccgggcgctccgattcttcaatgcatgggctgttgtttttcccgcgcctaccccacacccttacgctccaagaagaccatgttggtccagaagaacgtcacttccgagtcaacctgctgtgtcgccaagagctacaaccgcgtgacggttatgggcggtttcaaggtcgagaaccacacggcctgccactgctctacgtgctactaccacaaaagt

SEQ ID NO: 13304 - DNA, 348 bp, synthetic construct
  misc_feature 1..348: note = source = /note="Description of Artificial Sequence: Synthetic coding sequence"
  source 1..348: mol_type = other DNA
atggattactatcgtaagtatgctgccatattcctcgtaaccctgagcgtgtttctgcacgttctacactctgcaccagacgtgcaggattgcccagagtgtactctgcaggaaaatccctttttctcacagccgggagcacccattctgcagtgcatgggttgttgcttctcccgggcctacccaacacctctgaggagtaaaaaaactatgttggtccagaaaaatgtgaccagcgagagcacgtgctgtgtggctaaatcttacaaccgtgtgaccgttatggggggctttaaggtagagaatcacacggcttgccactgcagtacctgttattaccacaaatca

SEQ ID NO: 13305 - DNA, 348 bp, synthetic construct
  misc_feature 1..348: note = source = /note="Description of Artificial Sequence: Synthetic coding sequence"
  source 1..348: mol_type = other DNA
atggactactaccggaagtatgcagctatttttctagtaaccttgtccgtgttcctgcacgttctccatagtgcccccgatgtgcaggactgtccggagtgcacgctgcaagagaatccattctttagccagcctggcgctccaattctccagtgtatggggtgttgcttttccagggcctaccctactcccctcagatctaagaagaccatgctggtgcagaagaacgttactagcgaaagcacctgttgcgtagctaagagctacaatagagttaccgtgatgggggggtttaaggtggaaaatcatacagcttgtcattgttctacctgctactatcacaagtcc

SEQ ID NO: 13306 - DNA, 348 bp, synthetic construct
  misc_feature 1..348: note = source = /note="Description of Artificial Sequence: Synthetic coding sequence"
  source 1..348: mol_type = other DNA
atggattattatcgcaaatatgctgctatattccttgtcacccttagcgtttttctgcacgtgttacatagtgcaccagatgtacaggattgcccggaatgcacacttcaagaaaacccattttttagccagccaggagcaccaatcctgcagtgcatgggatgttgtttttcgcgagcttatccaacaccccttcgatctaagaaaactatgcttgttcaaaaaaatgtgacgtcggagtccacatgttgtgtggcgaagagctataaccgggttacggttatgggaggctttaaggttgaaaaccacacagcgtgtcattgcagtacatgttattaccataaatcg

SEQ ID NO: 13307 - DNA, 348 bp, synthetic construct
  misc_feature 1..348: note = source = /note="Description of Artificial Sequence: Synthetic coding sequence"
  source 1..348: mol_type = other DNA
atggactactacagaaaatacgccgccatcttcctcgttacattgagcgtctttctccatgtcctccatagtgcgcctgatgtacaagattgccctgagtgcactctgcaggaaaatccctttttttctcagccaggcgcacccatcttacagtgcatgggatgttgcttctcccgggcctacccaacccccctgcgatccaagaagaccatgctggtgcagaagaacgttacatccgagagcacctgttgcgtagcaaaatcctacaacagggttacggtaatggggggcttcaaggtggagaatcataccgcctgccattgcagtacttgttattatcacaaatcc

SEQ ID NO: 13308 - DNA, 348 bp, synthetic construct
  misc_feature 1..348: note = source = /note="Description of Artificial Sequence: Synthetic coding sequence"
  source 1..348: mol_type = other DNA
atggactattacaggaagtatgcagccatcttccttgtaacattatctgtcttcttgcacgtcttgcacagtgcgccagacgtccaggattgcccggaatgcactttacaggaaaacccgttcttctcacaaccaggggctcctatactgcagtgcatgggctgctgcttttcccgggcttaccctacccctctgcgctctaaaaagaccatgctggtgcaaaagaatgtcacgtctgagagcacttgctgtgtggctaagagctacaatcgtgtcacagtcatgggtggtttcaaggtggaaaatcataccgcctgtcattgcagcacttgctactatcataaaagc

SEQ ID NO: 13309 - DNA, 348 bp, synthetic construct
  misc_feature 1..348: note = source = /note="Description of Artificial Sequence: Synthetic coding sequence"
  source 1..348: mol_type = other DNA
atggattactaccgcaagtacgccgcaattttcctggtgaccctgtcagtgtttttgcatgtcctccatagcgccccagacgtccaggactgccctgaatgcaccctgcaggaaaacccgtttttctctcagccgggagccccgatcctccagtgtatgggatgttgcttctccagagcttaccccactccgctgcgcagcaaaaagactatgctggtgcaaaagaacgtgacctccgagtcgacttgttgcgtggccaagtcgtacaacagggtcactgtcatgggaggattcaaggtcgaaaaccacaccgcatgtcactgcagcacgtgttactatcacaagtcg

SEQ ID NO: 13310 - DNA, 348 bp, synthetic construct
  misc_feature 1..348: note = source = /note="Description of Artificial Sequence: Synthetic coding sequence"
  source 1..348: mol_type = other DNA
atggactactatagaaagtacgcagccatctttctggtgaccctttctgttttcctccatgtcctgcattcggcaccagatgtgcaagactgtcctgaatgtacgctccaggagaacccgttcttttcccaaccaggagctcctattcttcaatgtatgggatgttgcttctcccgcgcgtaccccaccccactgcgttcaaaaaagactatgcttgtgcagaagaacgtgacttccgaatctacttgctgtgtggcaaagagctacaatagagtcaccgtcatgggtggcttcaaggtggaaaaccatactgcctgtcactgctccacttgttactatcacaaatcc

SEQ ID NO: 13311 - DNA, 348 bp, synthetic construct
  misc_feature 1..348: note = source = /note="Description of Artificial Sequence: Synthetic coding sequence"
  source 1..348: mol_type = other DNA
atggattattatcgtaaatatgcggcgatatttctagttacgctatcggtatttttacatgttctacattcggcgccggatgtacaagattgtccggaatgtacgctacaagaaaatccgtttttttcgcaaccgggtgcgccgatattacaatgtatgggttgttgtttttcgcgtgcgtatccgacgccgttacgatcgaaaaaaacgatgttagtacaaaaaaatgtaacgtcggaatcgacgtgttgtgtagcgaaatcgtataatcgagttacggtaatgggtggttttaaagtagaaaatcatacggcgtgtcattgttcgacgtgttattatcataaatcg

SEQ ID NO: 13312 - DNA, 348 bp, synthetic construct
  misc_feature 1..348: note = source = /note="Description of Artificial Sequence: Synthetic coding sequence"
  source 1..348: mol_type = other DNA
atggactattatcgtaagtatgccgctatattcctcgttactctgtctgtgttcctgcatgtgctgcactctgctcctgacgtgcaggattgtccagagtgtaccctacaggagaatccattcttcagtcagcctggggcacccatactgcaatgcatggggtgttgcttttccagggcctatcctactcccctgcgatctaaaaagaccatgctggtgcaaaagaatgtgacttcggagtcaacttgctgtgttgccaagagctacaaccgggtaacggtgatggggggtttcaaggtcgagaatcataccgcatgccactgtagtacatgctattaccacaaatct

SEQ ID NO: 13313 - DNA, 348 bp, synthetic construct
  misc_feature 1..348: note = source = /note="Description of Artificial Sequence: Synthetic coding sequence"
  source 1..348: mol_type = other DNA
atggattattatcggaaatatgcagccattttcctggtgactcttagcgtctttttgcacgtacttcattccgcccctgatgtgcaggactgccccgagtgtaccctacaggaaaacccattcttcagtcaacccggcgctccaatcctgcagtgtatgggctgctgtttcagtagggcatatccgactcccctgcgtagcaagaagacaatgttggtccagaaaaatgtgacatccgaatccacatgctgtgtggctaagtcatacaacagggtcacagtgatgggcggtttcaaagtcgaaaatcacactgcctgtcattgttctacatgttattaccataagtcc

SEQ ID NO: 13314 - DNA, 348 bp, synthetic construct
  misc_feature 1..348: note = source = /note="Description of Artificial Sequence: Synthetic coding sequence"
  source 1..348: mol_type = other DNA
atggattactacaggaaatatgcagcgattttcctggttacattgtctgtcttcctgcatgtgctccactcggccccggacgtgcaggattgtcccgaatgcacacttcaagagaatccttttttttctcaaccgggggctcctatcctacagtgcatgggctgctgtttctctagggcataccctacgccccttaggtccaaaaagactatgctggtccagaagaatgtaacctcagagagcacatgctgtgtggcgaaatcatacaacagagtgacagtgatgggcggattcaaggtcgagaaccatactgcttgtcactgctctacttgttactaccacaagagc

SEQ ID NO: 13315 - DNA, 348 bp, synthetic construct
  misc_feature 1..348: note = source = /note="Description of Artificial Sequence: Synthetic coding sequence"
  source 1..348: mol_type = other DNA
atggactactatcggaaatacgcagcgatctttctggtaactctgagcgtgttccttcatgttctccattcagcgccggatgtgcaagactgcccagaatgtaccctgcaagaaaaccccttcttctctcagccgggagcgccgatcctgcagtgtatggggtgttgcttttcgagagcctacccaactcccttgaggtccaagaaaactatgctggttcagaagaatgtcacctcggagtcgacctgctgcgtcgccaaaagctacaatagagtgactgtcatggggggtttcaaggtggagaaccacaccgcctgccattgctccacctgctattaccacaagagc

SEQ ID NO: 13316 - DNA, 348 bp, synthetic construct
  misc_feature 1..348: note = source = /note="Description of Artificial Sequence: Synthetic coding sequence"
  source 1..348: mol_type = other DNA
atggactattacagaaagtacgcagccatcttcctcgttactctttcagtgttcctgcacgtgctgcatagcgcgcctgacgtccaagactgtccagaatgcaccctgcaagaaaacccattcttctcccagccaggagcccccattttgcagtgtatgggatgctgcttcagccgggcatacccgaccccgttgcgttccaagaaaactatgctcgttcagaagaacgtgaccagcgagtcaacctgttgcgtggcgaaatcgtacaaccgagtgacggtgatggggggatttaaggtggagaatcatactgcgtgccactgttccacctgttactaccacaaaagc

SEQ ID NO: 13317 - DNA, 348 bp, synthetic construct
  misc_feature 1..348: note = source = /note="Description of Artificial Sequence: Synthetic coding sequence"
  source 1..348: mol_type = other DNA
atggactactatcggaagtacgcagccatctttctagtgactctgtccgtcttcctacacgttctgcacagtgctcccgacgtacaggattgcccagagtgtaccctgcaagaaaaccccttttttagccagccaggagctcccatccttcagtgcatgggctgttgcttctcacgtgcttaccccacacccttacggtctaagaagaccatgttagtacagaagaacgttactagcgagtctacttgctgcgtagccaagtcttacaatcgggtgaccgtcatggggggcttcaaggtggagaatcataccgcatgccactgcagtacttgctattatcacaaatca

SEQ ID NO: 13318 - DNA, 348 bp, synthetic construct
  misc_feature 1..348: note = source = /note="Description of Artificial Sequence: Synthetic coding sequence"
  source 1..348: mol_type = other DNA
atggattactatcgcaagtacgcagcgatatttctggtgaccctgtccgtttttcttcatgtgcttcattcagcacctgacgtgcaagactgtcctgaatgcaccctccaggaaaacccatttttctcccaacctggagcgcctatcctgcaatgtatgggatgttgtttcagcagggcctaccccactcctctgcgatccaagaaaaccatgcttgtgcaaaagaacgtgacctcagagagcacgtgttgtgtggcaaagtcttacaatagagtcaccgtcatgggtgggtttaaggtggagaaccacactgcatgtcactgcagcacctgctactaccacaagagc

SEQ ID NO: 13319 - DNA, 348 bp, synthetic construct
  misc_feature 1..348: note = source = /note="Description of Artificial Sequence: Synthetic coding sequence"
  source 1..348: mol_type = other DNA
atggactactataggaagtacgccgctatcttcctagtgacgctgtccgtctttctgcacgtcttgcacagcgccccagatgtgcaagactgtccagagtgcacattgcaggagaatccattttttagccaacctggggctcccatcctccagtgcatgggatgttgcttcagccgagcgtatcccactccactccgatccaaaaaaacaatgctggtacagaaaaatgtgacatcagaaagcacatgttgtgtagctaagtcgtacaaccgggttacggtgatgggggggttcaaagtcgaaaatcatactgcctgccactgctctacttgctactatcataagagt

SEQ ID NO: 13320 - DNA, 348 bp, synthetic construct
  misc_feature 1..348: note = source = /note="Description of Artificial Sequence: Synthetic coding sequence"
  source 1..348: mol_type = other DNA
atggattattacaggaaatacgcggctatatttctggtcactctctctgtcttcctccatgtgctgcacagcgctcctgacgttcaggactgtccagaatgtaccctccaggagaatcctttcttttctcagcccggagcacctatccttcagtgtatgggatgttgcttttctcgggcttaccctacccccctcagatccaaaaagactatgctcgtacagaagaatgtaaccagcgagtcaacctgctgtgtcgctaaaagctacaaccgagtgaccgtcatgggggggttcaaggtggagaatcacactgcctgccactgcagtacctgctactatcacaagagt

SEQ ID NO: 13321 - DNA, 348 bp, synthetic construct
  misc_feature 1..348: note = source = /note="Description of Artificial Sequence: Synthetic coding sequence"
  source 1..348: mol_type = other DNA
atggactactatagaaaatacgcagcaatcttcctggtgaccctctccgtgtttctccacgtcctccacagcgccccagacgtgcaagattgtcccgaatgcacgctgcaggaaaacccgttcttctcgcagccgggcgctccgattttgcaatgcatgggatgctgtttttcgcgggcctacccaactcctctccgttcgaagaagactatgctggtacagaagaacgttaccagcgagtccacctgctgcgtggccaagtcatacaatcgcgtgactgttatgggagggttcaaggtggagaatcataccgcgtgtcactgctccacttgctactaccacaaaagc

SEQ ID NO: 13322 - DNA, 348 bp, synthetic construct
  misc_feature 1..348: note = source = /note="Description of Artificial Sequence: Synthetic coding sequence"
  source 1..348: mol_type = other DNA
atggattactatcgcaaatatgcggctatattcctggttaccctgtcggtcttcttgcatgtactgcactctgccccagacgttcaggactgtcctgagtgcacactgcaggaaaatccttttttcagccagcctggtgcacccattctacaatgcatgggctgctgttttagccgcgcttatcctacccccctaaggtccaagaagactatgctggttcagaaaaacgtgacatcagaaagcacttgctgcgtggctaagtcgtacaacagagtcacagttatgggcgggtttaaggtcgagaatcacacagcgtgccattgtagtacatgttactaccataaaagt

SEQ ID NO: 13323 - DNA, 348 bp, synthetic construct
  misc_feature 1..348: note = source = /note="Description of Artificial Sequence: Synthetic coding sequence"
  source 1..348: mol_type = other DNA
atggactactacaggaagtacgcagccattttcctggtgactctgtcggtgtttctccatgtcctgcactcggccccagatgtacaggattgtccggaatgcacgttgcaagagaacccgttcttctcacagcccggagccccgatcctccaatgcatgggctgttgtttcagtagagcctatccaacccccctgcggtcgaagaaaaccatgcttgtgcagaaaaatgtgacctcagagagcacttgctgtgtagcgaagtcttacaaccgcgttaccgtcatgggagggtttaaggtggaaaaccacactgcatgccactgctccacttgctactaccacaagtca

SEQ ID NO: 13324 - DNA, 348 bp, synthetic construct
  misc_feature 1..348: note = source = /note="Description of Artificial Sequence: Synthetic coding sequence"
  source 1..348: mol_type = other DNA
atggattactacagaaaatatgcggccatcttcctggtgacactgagcgtgtttctgcacgtgcttcattctgctcctgatgtgcaggattgcccagagtgcaccctccaggagaatccattttttagccagcctggcgcccccatcttgcagtgcatggggtgttgcttcagcagagcttaccccacgcccctcagatccaaaaagacgatgctagttcagaaaaatgtcacctccgagagtacatgttgcgtcgccaagagctacaatcgcgtcactgtgatgggcggcttcaaagtcgagaaccacacggcctgtcattgcagtacctgttactatcacaagtct

SEQ ID NO: 13325 - DNA, 348 bp, synthetic construct
  misc_feature 1..348: note = source = /note="Description of Artificial Sequence: Synthetic coding sequence"
  source 1..348: mol_type = other DNA
atggactactatcgaaagtatgcagccatctttctggtaactctgtctgttttcctgcacgtcctgcattcagctcccgatgttcaggattgcccagagtgtaccttacaggagaacccattcttttcacagcccggcgctcccattctgcaatgtatgggatgctgtttttcaagggcgtaccccacgcccctgaggagcaagaaaaccatgctggtccagaagaacgtaacctcagagagcacctgttgtgtggccaagagttacaatcgagtcaccgtgatgggggggttcaaggttgaaaaccacacggcatgtcactgctccacttgttattaccataagtcc

SEQ ID NO: 13326 - DNA, 348 bp, synthetic construct
  misc_feature 1..348: note = source = /note="Description of Artificial Sequence: Synthetic coding sequence"
  source 1..348: mol_type = other DNA
atggactactacagaaaatatgccgccatcttcttggttaccctgagtgttttcctccacgtcttgcacagtgcccctgacgtgcaggattgtccagagtgtactcttcaggaaaatccgttttttagccaacctggagcacctattttgcagtgcatgggctgctgtttttccagggcctacccgaccccgctgcggagcaagaaaaccatgctcgtccagaaaaacgtgaccagtgaatccacctgctgcgtggcaaagtcgtataaccgggtgaccgtcatgggcggcttcaaggttgaaaatcacacagcttgtcactgttctacatgctactatcacaaatca

SEQ ID NO: 13327 - DNA, 348 bp, synthetic construct
  misc_feature 1..348: note = source = /note="Description of Artificial Sequence: Synthetic coding sequence"
  source 1..348: mol_type = other DNA
atggactactatcggaaatacgcggcgatctttcttgtcactctgtccgtgtttcttcatgtgctccattcagccccagatgtgcaggattgtcctgagtgtacgcttcaggaaaacccatttttcagccaacccggggccccaattttgcaatgtatgggatgttgcttttccagagcctaccctacccctctgcgtagcaaaaagacgatgctggtgcaaaagaacgtcacctcagaatcgacttgctgtgtcgcaaaatcgtacaacagagtcactgtgatggggggattcaaggtcgaaaatcacactgcatgccattgttctacctgctactaccacaagtcc

SEQ ID NO: 13328 - DNA, 348 bp, synthetic construct
  misc_feature 1..348: note = source = /note="Description of Artificial Sequence: Synthetic coding sequence"
  source 1..348: mol_type = other DNA
atggattattatagaaaatatgctgcgatttttctcgtaactttatcagtattcctccatgtgctccattctgcccccgatgtccaggattgcccagaatgcacgctccaggagaatccttttttttcacagccaggggcacccatactacagtgtatgggatgttgcttttcacgggcatatcctactccactcagatccaaaaagacgatgttagtacagaaaaatgtcacttcggaatctacttgctgcgtggcaaaaagttataaccgagttacagtaatgggaggattcaaagtggaaaatcatacagcatgccattgtagtacttgttattatcataaatct

SEQ ID NO: 13329 - DNA, 348 bp, synthetic construct
  misc_feature 1..348: note = source = /note="Description of Artificial Sequence: Synthetic coding sequence"
  source 1..348: mol_type = other DNA
atggactactacaggaaatacgccgccattttcctggttaccttgagtgtgttcctgcatgtactccactccgcacccgacgttcaggactgccccgaatgtactctgcaggaaaaccccttcttttcccagcccggtgcgccaattctgcagtgcatgggctgttgcttcagccgcgcttaccccacaccattgaggtccaaaaaaaccatgctggtccagaaaaatgtcacatcagaatctacttgttgcgtcgccaagtcctacaacagagtcactgtgatgggcggtttcaaagtggaaaaccacaccgcctgccattgctctacctgctactaccataagtcc

SEQ ID NO: 13330 - DNA, 651 bp, synthetic construct
  misc_feature 1..651: note = source = /note="Description of Artificial Sequence: Synthetic coding sequence"
  source 1..651: mol_type = other DNA
atggcgaccgggagccggacctcgctgctgctggccttcggactgctgtgcctcccatggctgcaagaggggtcggcattccctaccatccctctgtcccggctcttcgacaacgccatgctccgggcccatcggctgcaccaactggcctttgatacctaccaagaattcgaggaggcgtacatcccaaaagaacagaagtactcgttcctgcagaatccgcagacctcactgtgcttttctgagtcgattccaaccccgtcgaacagagaggaaacccagcagaagtcaaacctcgaactgctccggatctcactcttgcttatccaatcttggctcgaaccggtgcagtttttgagatcagtctttgccaacagcctggtgtacggagcgtcggactccaacgtgtacgatctgcttaaggacctggaagaaggaatccagactctcatgggtcggctggaagatggctcaccgcgcactggacagatcttcaaacagacctactccaaatttgatacgaactcccacaacgacgacgccctgttgaagaattatggactgctgtactgcttcaggaaggacatggataaggtggaaactttccttcggattgttcaatgccgcagcgtggaaggatcgtgtggcttc

SEQ ID NO: 13331 - DNA, 651 bp, synthetic construct
  misc_feature 1..651: note = source = /note="Description of Artificial Sequence: Synthetic coding sequence"
  source 1..651: mol_type = other DNA
atggcaaccggcagcagaacttcactcctcctcgcgtttggcctcctttgcctgccctggctgcaggagggatcggcgttccctaccatccctctgtcgagactgtttgataacgctatgcttagggctcaccgattgcatcagctcgcctttgacacctaccaggagttcgaagaagcctacatccccaaagaacaaaagtattcgttccttcagaacccgcagaccagcctgtgctttagcgaatcgatcccgactccgtccaaccgcgaagaaactcagcagaagtcaaacctcgagctgctgcggatttcgctgctgctgatccaatcgtggctggaaccagtgcaattccttcggtccgtgttcgccaattcactcgtctacggcgcctcagactctaatgtttacgatcttttgaaggacttggaggaaggaatccaaaccctcatgggtcgcctcgaagatggatctccgcgtacgggtcagatcttcaaacagacttactcgaaattcgacacgaactctcacaatgacgatgccctgcttaagaactacggactgctgtactgtttccgcaaggacatggacaaggtggagactttcttgcgtattgtgcaatgccggagcgtcgaggggtcctgcggcttc

SEQ ID NO: 13332 - DNA, 651 bp, synthetic construct
  misc_feature 1..651: note = source = /note="Description of Artificial Sequence: Synthetic coding sequence"
  source 1..651: mol_type = other DNA
atggctaccggatcccggacttcattactcctggcattcgggctactgtgtctcccgtggcttcaggagggaagtgctttccctaccattcccctctctcggctgtttgacaacgccatgctccgcgctcaccgattgcaccagttggctttcgacacatatcaggagttcgaggaagcctacataccaaaggagcagaagtatagttttttgcaaaatccacagacctcattgtgcttctccgagtcgatccctacccctagtaacagagaagagactcagcagaagtcaaacctggaattgctcagaatctcactgctgcttatccagagctggctggaacctgtccagtttctgaggtccgtgttcgcgaactccttagtgtatggcgccagcgactctaacgtctacgaccttctgaaggacctggaagagggtatccaaacgctcatgggcaggttggaggacggatcacccaggactgggcagatttttaaacagacgtatagcaagtttgatactaattctcacaacgacgatgccttgctcaaaaattatggcctactgtactgtttcagaaaagatatggataaggtggaaacctttctacgcatcgtgcagtgtagatcagtagagggaagttgcggcttc

SEQ ID NO: 13333 - DNA, 651 bp, synthetic construct
  misc_feature 1..651: note = source = /note="Description of Artificial Sequence: Synthetic coding sequence"
  source 1..651: mol_type = other DNA
atggcaaccgggtcccggaccagtttgttattagcattcggtctattatgtctcccctggctgcaggaaggatctgctttccctaccatccctctaagtcgtctgttcgacaacgcaatgcttcgtgcacacaggctacatcaactggccttcgatacataccaggaattcgaagaagcttacattccaaaagaacagaagtatagctttttgcagaacccccagaccagcctgtgtttctctgagtctatacccaccccctctaaccgggaagagacacagcagaagagcaacctggaactactgagaattagtttactactgatacagtcttggttggaacccgttcagttcctacggagcgttttcgccaatagtctggtgtatggcgcaagcgactccaacgtgtatgacctcttgaaagacctagaggaggggatccaaaccctgatgggcagactcgaggatggctctccacgaactggacagatcttcaagcaaacatacagcaaatttgatactaacagccataacgacgacgctctcctgaagaattacgggctcctatactgttttcgcaaggacatggataaggtggaaactttcctgcgcattgtgcaatgtcggtctgtggagggatcctgcggcttt

SEQ ID NO: 13334 - DNA, 651 bp, synthetic construct
  misc_feature 1..651: note = source = /note="Description of Artificial Sequence: Synthetic coding sequence"
  source 1..651: mol_type = other DNA
atggcaaccgggtctagaacctctctgttactggcttttggcctcctgtgtcttccttggcttcaggaagggagtgcctttcccaccatccccctctctaggctttttgacaacgccatgctgagggcacacagactacaccagttggcctttgacacgtatcaagagttcgaagaggcctatattccgaaggaacagaaatacagtttcctacagaacccccaaacctctctgtgcttctctgaatcgatcccaacccctagtaatcgcgaagagacacagcagaaatctaaccttgagcttctgagaatttctctgctgctaatccagtcctggctggagcccgtgcagtttcttaggtccgttttcgccaactccctggtttatggcgcctcggactctaacgtgtacgatctgttgaaggacctggaggaggggatccagactctaatggggcggctggaggatgggtcacctaggaccgggcagatatttaagcagacttactccaaatttgatacgaactcgcataatgatgatgcgctgctgaagaattatggcctcctgtattgttttaggaaggacatggacaaagtggaaactttcctccgcattgttcaatgcagatccgtggaggggtcctgcggcttt

SEQ ID NO: 13335 - DNA, 651 bp, synthetic construct
  misc_feature 1..651: note = source = /note="Description of Artificial Sequence: Synthetic coding sequence"
  source 1..651: mol_type = other DNA
atggccacagggagccgcactagtctccttttggccttcggacttctgtgtctcccatggctccaagagggatcagcattccctactatccctctgagtcgcctgtttgacaacgctatgctacgagctcaccggctgcaccagctagccttcgacacatatcaggaattcgaggaggcatacatcccaaaagagcagaaatatagttttttgcaaaacccacaaacctccctgtgcttctcagaaagcatacccacaccaagcaatcgagaagagacccagcaaaagtcgaacctcgaattactgaggatctccctgttactcatccagtcttggttggagcccgtgcagttcctgcgctcagtctttgccaattccctggtgtacggcgcctcagattccaatgtctacgacctactgaaggatcttgaagagggcatacagacactcatggggcgcctagaggatggatcccccaggacgggccagatcttcaagcagacatactccaagttcgacactaacagccacaatgatgacgcgttgttgaaaaactacggtctgctgtattgctttcggaaggacatggataaggtcgagacattcctgcgaattgttcagtgccgctcggtagaaggttcgtgcgggttc

SEQ ID NO: 13336 - DNA, 651 bp, synthetic construct
  misc_feature 1..651: note = source = /note="Description of Artificial Sequence: Synthetic coding sequence"
  source 1..651: mol_type = other DNA
atggctacaggctcgcgtaccagtctgctattggcatttggtctcctctgtcttccctggttgcaagaagggtcagcattcccgactatcccactatctcgtctattcgacaatgctatgttgcgtgcccaccggctacatcagctggctttcgatacttaccaggaattcgaggaagcttatatccctaaggagcaaaagtactcatttctacagaacccacaaacttcactctgtttttctgaatctatacctacaccaagtaaccgcgaggagactcagcagaaaagcaaccttgaacttttgaggatctccttgctgctaattcagagttggctagaaccggtgcagttcctgcggtctgttttcgcaaacagcctggtctacggtgcctcggattctaacgtttacgatttgttaaaagatcttgaggagggcattcaaacattgatgggtaggctagaggacggatcccctcgcaccggacagattttcaaacagacgtactctaaattcgatacaaactcccataatgacgatgctctgctgaagaattatggcttgctttactgttttcgtaaggacatggataaggtcgaaacttttctccgaattgtccagtgtagatccgttgagggctcctgtggtttt

SEQ ID NO: 13337 - DNA, 651 bp, synthetic construct
  misc_feature 1..651: note = source = /note="Description of Artificial Sequence: Synthetic coding sequence"
  source 1..651: mol_type = other DNA
atggctaccggttcccggacctcattgctcctcgccttcggtctgctgtgtctgccgtggctgcaagagggatcagcattccccactatcccactgtccagacttttcgataacgccatgctccgcgcccatcggctgcaccagctcgctttcgacacgtaccaggagttcgaagaggcgtacattcctaaggagcagaaatactccttcctgcagaacccacaaacctccctgtgctttagcgagtcgatccctaccccctcaaaccgggaagagactcagcagaagagcaacctggagttgctgaggatctctttgctcctgattcaatcttggctggagccagtccagttcctgcggtccgtgttcgccaactccctggtgtatggagcgtcggatagcaacgtgtacgatcttctcaaagacctcgaagaaggaattcaaaccctcatgggacgcctggaggacggcagcccgcgcactggacagatcttcaaacaaacctactccaaattcgacacgaactcccacaatgatgacgcgcttctgaaaaactacggcctgttgtactgctttaggaaagatatggacaaggtggaaactttcctgcggattgttcagtgcagatcggtcgagggaagctgcggattt

SEQ ID NO: 13338 - DNA, 651 bp, synthetic construct
  misc_feature 1..651: note = source = /note="Description of Artificial Sequence: Synthetic coding sequence"
  source 1..651: mol_type = other DNA
atggccactggttcgaggacctctctgcttttggcattcggcctcctgtgccttccctggctgcaagaaggctccgcattccctacgattccactttcgagactgttcgataacgccatgttgcgtgcacaccgacttcatcaactggcatttgacacctaccaggagtttgaagaagcgtacatcccgaaggagcaaaagtacagttttctgcaaaatccccagaccagcctctgctttagcgaatccatcccaactcctagcaatcgagaagagacgcaacagaagtcgaacctggagcttcttcgaatatcactcctgcttattcagtcatggttggaacctgttcaatttctccggtctgtatttgcaaactcactggtctacggtgcgtcggattcgaacgtgtatgacctcctgaaggacctcgaggaagggattcagacccttatgggacgcctggaggacgggagcccacgaaccggtcaaatctttaaacagacctactcgaagttcgatacgaattcccataatgatgatgcgctcctgaagaactacgggcttctctactgttttagaaaggatatggacaaagtggagactttcctgagaatcgtgcagtgtaggtcagtggaaggctcctgtggtttt

SEQ ID NO: 13339 - DNA, 651 bp, synthetic construct
  misc_feature 1..651: note = source = /note="Description of Artificial Sequence: Synthetic coding sequence"
  source 1..651: mol_type = other DNA
atggcaactggatccagaacctccctcctcctggcttttgggctcctgtgtctgccatggctgcaagagggaagcgccttcccgactattccgctctcacggctctttgacaacgccatgttgcgggcacacaggcttcaccaacttgccttcgatacttaccaggagttcgaagaagcatacatcccgaaggaacagaagtactccttcctccaaaatccgcaaacctcactttgcttctcggagtcgattccgaccccatccaaccgggaagaaactcagcaaaagagcaatctggaactgttgcgtatctcactgctgcttatccagtcgtggctggaacctgtgcaattcctgcgctctgtattcgcgaactcgctggtctatggagctagcgatagcaatgtctacgatctgctgaaggatctcgaggaaggcatccagaccctgatggggaggctggaggacggaagcccgagaactggacagatcttcaagcagacctactccaaattcgacactaactcccataatgacgacgcccttctgaagaactacggactgttgtactgcttcagaaaagacatggataaggtggagacttttctccgcattgtgcagtgccgctctgtggagggatcctgtggcttc

SEQ ID NO: 13340 - DNA, 651 bp, synthetic construct
  misc_feature 1..651: note = source = /note="Description of Artificial Sequence: Synthetic coding sequence"
  source 1..651: mol_type = other DNA
atggccaccggcagccgtacctctctgctgcttgccttcggcctgttgtgcctcccatggctgcaggagggaagcgccttccctacaatccctctctcccggttgtttgacaacgccatgctaagggcccatcgcctgcatcagctcgctttcgacacatatcaggagtttgaagaggcatacatccctaaggagcaaaagtactccttcctgcaaaacccacagacgagcctctgtttttcggaaagcatccctacaccttccaaccgggaagagacacagcagaagagcaacctcgagctcctaaggatctctttgctgctaattcagtcttggctggagcctgtgcagttcctgcgctccgtgtttgctaacagtttagtctatggagctagcgattcaaacgtgtacgacctgctgaaggatttagaggagggcatccagacgctgatgggacgacttgaggatggctcccctcggaccggccagattttcaagcagacttatagtaagtttgacaccaactctcacaacgacgatgccttgctgaagaattatggactgctgtattgttttagaaaggacatggataaggttgaaacctttctcaggattgttcagtgcaggagcgtggagggcagttgcgggttt

SEQ ID NO: 13341 - DNA, 651 bp, synthetic construct
  misc_feature 1..651: note = source = /note="Description of Artificial Sequence: Synthetic coding sequence"
  source 1..651: mol_type = other DNA
atggcaactggctcccggacatcgctcctgctcgccttcggattactgtgtctgccctggctgcaggagggaagcgcctttccaacaataccactgtccaggctcttcgacaatgccatgcttcgggctcaccgccttcaccaactagctttcgacacctaccaggagtttgaagaggcttacattccaaaagaacagaaatactcctttctgcagaatcctcaaaccagtctgtgtttttcggagtcgattcccacaccatctaatcgggaggagacacaacagaagagcaacctcgagctgctgagaatctcattgctgttgatccaatcatggcttgaaccggtccaattcctgcgatccgtcttcgccaattcacttgtgtacggggcaagcgatagtaacgtctatgatctgctgaaagatctcgaggaagggatacagaccttaatgggtagactggaagatggctcaccccgcaccgggcagattttcaagcagacctattctaagttcgataccaattcccacaatgacgatgccctgctcaaaaactacgggctgctgtattgctttaggaaagacatggataaagtagaaacctttctccgaatcgtgcagtgtaggagcgttgaggggtcttgcgggttt

SEQ ID NO: 13342 - DNA, 651 bp, synthetic construct
  misc_feature 1..651: note = source = /note="Description of Artificial Sequence: Synthetic coding sequence"
  source 1..651: mol_type = other DNA
atggccactgggtctcggacatcactgctcttggcattcggtctcctgtgcttgccctggctccaagaaggatccgcgttccccacgatacccttgagcaggctttttgataacgctatgctaagagctcaccgtctccaccagctggcctttgacacttatcaagaatttgaggaggcgtacataccaaaagaacagaagtacagttttctccagaacccgcaaacgagcttgtgcttttcggagagcatccctacccccagcaatcgcgaggaaactcaacagaagtctaatctggagctcctgcgcatcagtctactcctgatccaaagctggcttgaaccagtgcagtttttgcgcagtgtgtttgccaattccctagtgtacggggcctcagatagcaacgtatatgatctgcttaaggatctggaggagggcattcagaccttaatgggtaggctagaggacggtagcccacgaactggccaaatctttaagcagacgtactcaaagttcgacaccaactctcacaacgatgacgctctgctgaagaattacggtctgctatattgtttcagaaaggacatggacaaggtagagacatttctacggattgtgcagtgtcgaagcgtcgaagggtcctgcggattt

SEQ ID NO: 13343 - DNA, 651 bp, synthetic construct
  misc_feature 1..651: note = source = /note="Description of Artificial Sequence: Synthetic coding sequence"
  source 1..651: mol_type = other DNA
atggccactgggtcaagaacaagtcttctactggccttcgggctcctatgtttaccctggctgcaggaaggatcagcctttcccactatccccctctctcgactattcgacaacgccatgctgagagcccaccgccttcaccagcttgcattcgatacatatcaggaattcgaagaggcctatatcccaaaagagcaaaaatactcattccttcagaacccccagacaagtttatgcttctcagagagtattcctacaccaagtaaccgagaagaaacacagcagaaatccaatctcgaactgttaagaattagtctgctcctcatacagtcctggctggaacctgtgcagttcctgcgaagtgtttttgcaaattccctggtttatggggcctccgatagtaatgtctatgatcttctcaaagatctcgaagagggaatccagactttaatgggaagactcgaagacggatctcctaggactggacagatttttaaacagacttatagtaaatttgatacaaactctcataatgacgatgctcttctgaagaattatgggctcctctattgtttccgaaaagatatggataaggttgaaactttcctcaggattgtgcagtgcaggtccgttgaaggatcttgtgggttc

SEQ ID NO: 13344 - DNA, 651 bp, synthetic construct
  misc_feature 1..651: note = source = /note="Description of Artificial Sequence: Synthetic coding sequence"
  source 1..651: mol_type = other DNA
atggcgacggggagcaggaccagcctccttctggcttttggactcctctgtctgccatggctccaggaaggatcagccttccctactatcccactctctcggctgttcgataacgcgatgctccgcgcccaccgcctgcatcaattggcattcgacacgtaccaagagttcgaagaagcatacattccgaaagaacagaagtactcatttctgcaaaacccacagacctcgctctgcttctccgagagcattccgactccgtccaacagggaagaaacccaacagaaaagcaacctggaattgctgcgcatcagcctgctgttgatccagtcatggcttgagccggtgcagttccttcgatccgtgttcgccaactcgctcgtgtatggagctagcgactccaatgtgtatgatctgcttaaggaccttgaggaaggcattcaaactcttatgggacgtctggaggatggatcaccgcggactggacagatctttaagcagacttactccaagtttgataccaactcccacaatgatgatgccctgctgaagaactacggcctcctttactgcttcagaaaagacatggacaaagttgagacgttcctgagaatcgtccagtgcaggtcggtggaaggctcctgtgggttt

SEQ ID NO: 13345 - DNA, 651 bp, synthetic construct
  misc_feature 1..651: note = source = /note="Description of Artificial Sequence: Synthetic coding sequence"
  source 1..651: mol_type = other DNA
atggccacgggttcgagaaccagcctgctgctggctttcgggctgctgtgccttccctggttgcaggagggatccgcgtttccgactatccccttgtcgcggctctttgacaatgccatgcttagagcgcatagattgcatcagctggcgtttgatacctaccaagagttcgaggaagcatatatccccaaagaacaaaagtactcattcctccagaacccgcagacttcgctctgcttctccgaatcgatccctaccccttccaatagggaagaaacccagcagaaatcgaacctcgaactcctgcggatctctctgcttctcatccaatcatggctggagccggtccagtttctgagatctgtgttcgctaattcactggtctacggcgcgagcgactccaacgtgtacgacctgctgaaagacttggaagaaggcatccaaaccttgatgggtcgcctggaggacggctcacctcggactggccagatcttcaagcaaacctacagcaaattcgacaccaattcgcataacgacgacgcactgctcaagaattacggcctcctgtactgcttcagaaaggatatggacaaggtggaaactttccttcgcatcgtgcagtgtcggagcgtcgaaggaagctgtggcttc

SEQ ID NO: 13346 - DNA, 651 bp, synthetic construct
  misc_feature 1..651: note = source = /note="Description of Artificial Sequence: Synthetic coding sequence"
  source 1..651: mol_type = other DNA
atggcgactgggtcccgcacgtcgctgctgctggcatttggactgctgtgcctgccctggctgcaggaaggatcagccttcccgaccattccgctgtctcggctgttcgacaacgccatgctcagagcccatcgcctgcatcagctggcctttgacacctaccaggaattcgaggaggcgtacatcccaaaggagcagaagtacagtttcctgcagaacccacaaacttcgctgtgtttttccgagtcaatcccgaccccttcaaaccgggaagaaacccaacaaaagtccaatctggaactgctccggatttcccttcttctgatccaatcgtggctggagcccgtgcagtttctgaggagcgtctttgccaattccctcgtgtatggagcatccgactcaaacgtgtacgatctcctgaaggatctggaggagggaatccagacccttatgggcagactcgaggatgggtcgccgcgcaccggacagatcttcaaacagacttacagcaagttcgatactaactcccacaacgacgacgccttgttgaagaactacggattgctgtattgcttccggaaagatatggataaggtcgagactttcctgcgcatcgtacagtgcagaagcgtggagggctcgtgtggtttc

SEQ ID NO: 13347 - DNA, 651 bp, synthetic construct
  misc_feature 1..651: note = source = /note="Description of Artificial Sequence: Synthetic coding sequence"
  source 1..651: mol_type = other DNA
atggctactggatctcgcactagtcttctcctcgcttttggactgttgtgcctcccttggcttcaagaaggatccgcatttcctaccattcctcttagccgcctctttgataatgcaatgcttcgggctcacaggctgcaccaactggcatttgacacataccaagagttcgaggaagcctacattccaaaggaacagaagtacagctttttacagaacccccagacttccctatgcttcagtgagagcattccaacaccatccaatcgcgaggagacccagcagaaaagtaatctagaactgctgaggatcagcctgctgctcatccagtcttggctggaacccgtgcagtttctgaggagcgttttcgcgaactcattagtttacggcgcctctgattccaatgtttacgaccttctgaaagatttggaggaagggattcagacactgatgggccgtctggaggacggcagtcccaggacaggacaaatctttaagcaaacttatagtaagttcgacaccaattcacacaacgatgatgctctgctgaaaaattatggactcttgtactgctttagaaaggatatggataaagtcgagactttcctccgcatcgtgcagtgtaggagcgtggaagggagctgcgggttc

SEQ ID NO: 13348 - DNA, 651 bp, synthetic construct
  misc_feature 1..651: note = source = /note="Description of Artificial Sequence: Synthetic coding sequence"
  source 1..651: mol_type = other DNA
atggcgaccggcagtaggactagcctgttgcttgccttcggccttctctgcctcccctggctgcaggagggctccgcgtttccaaccatccctctgtctcggctgttcgacaatgctatgcttcgcgcacacagacttcaccagttggcttttgatacctatcaggagttcgaagaagcctacataccaaaggagcagaaatattccttcctgcagaatccacagactagcctctgtttcagtgaaagcattccaactccctctaatcgtgaggaaactcagcagaagtccaatctagagcttctccgcattagcctgctcctgatccaatcttggctggaaccggtgcagtttctgcgcagtgtattcgcgaacagtctggtctacggggcttcagacagtaacgtctatgacctgctgaaagatctggaggagggcatacaaacattgatggggcgattagaggatgggagcccacgtactggccaaatctttaaacagacttattccaaatttgatactaacagccacaatgatgatgccctactcaagaactatggactgctgtactgctttcggaaggacatggataaggtcgagacttttctaaggatcgtgcagtgtcgctcagtggaaggttcttgtgggttc

SEQ ID NO: 13349 - DNA, 651 bp, synthetic construct
  misc_feature 1..651: note = source = /note="Description of Artificial Sequence: Synthetic coding sequence"
  source 1..651: mol_type = other DNA
atggcaacagggagcagaacttctctcctcctggcttttggcttgctctgcttaccttggctgcaggaaggcagtgcttttcctacgattcctctgtcacgcttattcgacaatgccatgctaagagcgcacagactccaccaactcgcattcgacacctatcaggagttcgaggaggcatacataccaaaagagcagaagtactcttttctacaaaacccccagacatctctttgcttttcggagtcgattccaaccccctctaaccgggaagaaacccagcagaaaagcaacctggaactgctgcggatctcactactcttgatccagtcttggctagaaccggtgcagttcttgaggtcggtttttgcaaattctttagtttacggggcctcagactcaaatgtatacgatctcctgaaagatcttgaagaagggatccagaccctgatgggcagattggaggatgggtctcctcgaaccggacaaatttttaagcagacatatagcaagtttgacactaattcacacaatgacgacgctctgctgaagaattacggactactctattgctttcggaaagacatggacaaagttgagacattcctgaggattgttcagtgtcgcagcgtggaaggatcctgcggcttc

SEQ ID NO: 13350 - DNA, 651 bp, synthetic construct
  misc_feature 1..651: note = source = /note="Description of Artificial Sequence: Synthetic coding sequence"
  source 1..651: mol_type = other DNA
atggcgacgggctcgcgcacttccctcctccttgccttcggtctgctgtgccttccttggctgcaggaggggtcggcgttccccactatcccactgagcaggttgttcgataacgcgatgctcagggcacacaggttgcatcaactggccttcgacacctaccaagagttcgaagaggcttacatcccgaaagagcaaaagtacagctttctgcagaacccccaaacctccctgtgtttctccgaatccatcccaactccctctaaccgggaggaaactcagcagaagtcgaacctggaactgcttcgcatcagcctgctcctcatccagtcgtggctggagccggtgcagtttcttcggtcagtttttgcaaacagccttgtctacggggcctccgactcgaacgtctacgatctcctcaaggacctggaagaaggcatccagactctgatgggaaggcttgaggacgggtccccccgcaccggacagattttcaagcagacctacagcaagtttgacactaattcccacaacgacgacgcccttctcaagaattacggactgctgtactgcttccgcaaagacatggacaaggtggaaactttcctccgcatcgtgcaatgcagatcggtggaaggttcctgcggcttc

SEQ ID NO: 13351 - DNA, 651 bp, synthetic construct
  misc_feature 1..651: note = source = /note="Description of Artificial Sequence: Synthetic coding sequence"
  source 1..651: mol_type = other DNA
atggctactggctcccggactagccttctcctcgcgttcgggcttttgtgtctgccatggcttcaggagggatccgccttccccacgattcctctgtcgaggttgttcgataacgctatgctgcgggcacatcggctgcaccaactggcattcgacacataccaggagttcgaggaggcttacattcctaaggaacagaagtacagttttctgcaaaatccgcagacctcactctgcttcagcgaatctattccgaccccctctaatagggaggagacacagcagaagagcaacctcgagctcctgcgaatctccctcctgttgattcagtcatggctcgaaccggtccagtttcttcggtccgttttcgccaacagcctggtctacggagcctccgattccaatgtgtatgatctcctaaaggatttggaggaaggaattcagaccctcatgggcaggctcgaggacgggagccctcggactgggcagatttttaaacagacatattcaaaattcgatactaattcccacaatgacgacgcgctgctcaagaactacggcctcttatattgcttcaggaaagatatggacaaagtggagactttccttaggattgtccagtgcaggtctgtggagggctcgtgcggcttc

SEQ ID NO: 13352 - DNA, 651 bp, synthetic construct
  misc_feature 1..651: note = source = /note="Description of Artificial Sequence: Synthetic coding sequence"
  source 1..651: mol_type = other DNA
atggctaccgggtcgcgcacctctctgttgctcgccttcgggctcctgtgcctgccgtggctccaagagggatcggccttccctactattccgttgagcaggctgttcgataatgctatgctccgggcgcaccggctgcatcagttggcgtttgacacctaccaggaattcgaagaggcctacatcccgaaggaacaaaagtactccttcctccagaaccctcaaacctccctgtgcttttctgaaagcatacctaccccatccaaccgcgaggaaactcaacagaagtcgaatctggaattgctgagaatctccctgcttctcatccagagctggctcgagccggtgcaatttctccgctcagtgttcgcgaactcgctggtgtacggagcatcggacagcaacgtgtatgaccttctcaaggacttggaagaaggaatccagactctgatgggtcggctcgaggacggctcaccaagaaccggccagatcttcaaacagacttactctaagttcgacactaattcacacaacgatgatgccttgctgaaaaactacggccttctgtactgctttcgcaaggacatggataaagtcgaaacgttcctcagaatcgttcagtgtagatccgtcgagggttcttgtggcttt

SEQ ID NO: 13353 - DNA, 651 bp, synthetic construct
  misc_feature 1..651: note = source = /note="Description of Artificial Sequence: Synthetic coding sequence"
  source 1..651: mol_type = other DNA
atggccacgggctcccgcactagccttttgctggccttcgggctgctatgcttgccctggctgcaggaagggagcgccttccccacaatccctttgagcaggctttttgataacgcgatgttgagggcacacagattgcaccagttggcatttgatacgtatcaagagtttgaggaggcctacattcccaaggagcaaaaatattcatttctccagaatcctcagacctccttgtgcttctctgagtccattccgacccctagcaatagggaagaaacccaacagaagtcaaaccttgagttgctccgtatatctcttctgctcatccagtcttggctcgaaccagtgcagtttctgcggtccgttttcgccaatagcctcgtgtatggcgcgtccgacagcaacgtgtatgaccttctaaaggatcttgaagagggaatccagacgttaatgggccgcctagaagacgggagtccacgaactggtcaaatcttcaaacagacttatagcaagtttgatacaaacagtcataatgatgacgcccttctcaagaactacggactactgtactgctttaggaaggatatggataaggtagagaccttcctacgcatcgttcaatgccgctctgtggaagggtcctgcggcttt

SEQ ID NO: 13354 - DNA, 651 bp, synthetic construct
  misc_feature 1..651: note = source = /note="Description of Artificial Sequence: Synthetic coding sequence"
  source 1..651: mol_type = other DNA
atggccactggatccaggacctcactgctgctggcctttggtctgctttgcctgccatggctgcaagagggttcggcgtttccaaccattcctctctcacgcctgtttgacaacgcaatgttgcgcgcgcatcggctgcatcagctggcgtttgacacgtatcaagagttcgaagaagcctacattccaaaggaacaaaagtacagctttctgcaaaaccctcaaacttccctttgtttttctgaatcgataccgactccctcaaacagggaagagacgcagcagaaatcgaaccttgaacttcttcgtatctcgctgctcttgatccaatcctggctcgaaccagtccaattcctcagatccgtgtttgcgaactcacttgtctacggagcctccgattcaaacgtgtacgatctccttaaagacttggaagagggtattcagactcttatgggacgccttgaggatggttcacctaggaccgggcagatctttaagcaaacctacagcaagttcgacactaactcccataacgacgatgcactgctgaagaattacggacttctgtactgctttagaaaggatatggataaagtggaaacgttcctcaggatcgtccagtgtagatcagtcgaaggttcgtgtgggttt

SEQ ID NO: 13355 - DNA, 651 bp, synthetic construct
  misc_feature 1..651: note = source = /note="Description of Artificial Sequence: Synthetic coding sequence"
  source 1..651: mol_type = other DNA
atggctaccggaagcaggacctctctgctcctggcatttgggcttctttgtttgccttggcttcaagagggttccgcatttcctaccattccgcttagccgcttgttcgataacgcgatgcttcgagctcatcgactccatcaactggcattcgacacctaccaagaatttgaagaagcatacattccaaaggaacagaagtactcatttctccaaaatccacagacttcactgtgtttttcagagagcatcccaactccctcgaacagggaggaaactcagcaaaaatcaaatctcgagctgcttaggatttccctccttcttatccaatcctggctggaacctgtgcagttccttcggtctgtgtttgcaaactcgctggtctacggagcgtcggactctaacgtgtacgatctgctcaaggatctggaagaagggattcaaactctcatgggacgattggaagatgggtccccgcggaccggacaaatcttcaagcagacgtactcgaaattcgacaccaattcccacaatgatgatgcccttcttaagaactacggcctcctgtattgttttcgcaaggatatggacaaagtggagacttttctcagaatcgttcaatgccgctcggtcgagggaagctgcggcttt

SEQ ID NO: 13356 - DNA, 651 bp, synthetic construct
  misc_feature 1..651: note = source = /note="Description of Artificial Sequence: Synthetic coding sequence"
  source 1..651: mol_type = other DNA
atggcgacgggttcgcgtacctccctcctcctggccttcggccttctgtgcctgccatggctccaggagggatcggcattcccgaccattccactctcgcggctgttcgacaatgccatgctccgcgctcaccgcctgcaccagctggccttcgatacttaccaagaattcgaggaggcctacatccctaaggaacagaaatacagcttcctccagaatccccaaacctcactgtgtttctcagagagcattccaacgccttcgaaccgcgaggagactcaacagaagtcaaacttggagctgttgcggatctcgctgctgctcatccaatcgtggctcgaaccagtgcaattcctgcggtccgtgttcgcgaactccctggtgtacggagcatcagattccaatgtgtacgacctccttaaagacttggaggaaggtatccagacccttatgggaagattggaggacggcagcccgcgcactggacagatattcaagcagacctacagcaaattcgataccaattcgcacaatgatgacgcgctgctgaaaaactacggactgctgtactgtttccgaaaagatatggacaaggtcgaaaccttcctgaggattgtccagtgcagatcagtggagggatcctgcggcttc

SEQ ID NO: 13357 - DNA, 651 bp, synthetic construct
  misc_feature 1..651: note = source = /note="Description of Artificial Sequence: Synthetic coding sequence"
  source 1..651: mol_type = other DNA
atggctaccggcagtagaaccagcctgctcctcgccttcgggctgctctgtctgccttggctccaagaaggttccgcatttcctactatcccgcttagtagactgttcgataatgctatgttacgggctcatagattgcatcagttggcatttgacacgtatcaggaatttgaagaggcttacatcccgaaagagcagaagtactcatttctgcagaacccacagaccagtttgtgcttcagcgagtcaatccccacaccctccaaccgcgaggagacgcagcagaaaagcaacctggagcttcttagaatttcgctcctgctgattcagagctggctggagcctgtacaattccttagatctgtgttcgccaacagtctggtgtacggcgcttctgattccaacgtatatgatcttctaaaagacctggaggaggggattcagacgctgatgggtcggctcgaggatggttccccacggaccggtcagatctttaagcagacatacagcaagttcgacactaacagccataacgatgatgctttactgaagaattacggactgctctattgctttaggaaggatatggacaaagtggaaacctttctcaggatcgtgcagtgtagaagcgtggaagggtcctgtggattc

SEQ ID NO: 13358 - DNA, 651 bp, synthetic construct
  misc_feature 1..651: note = source = /note="Description of Artificial Sequence: Synthetic coding sequence"
  source 1..651: mol_type = other DNA
atggcaaccggatctcgcacttcattgttgctggctttcgggctcctctgcctgccctggcttcaagaaggatctgcattccctaccattcccttgtcccgtcttttcgataatgccatgctgcgagcacaccgactgcaccagctggcttttgatacctaccaggagtttgaggaggcgtatatcccaaaggagcagaagtacagtttcttacaaaatcctcagacctcgttgtgtttctctgaatcaataccaaccccaagcaacagggaggagacacagcagaagtccaatcttgaacttctgcggatatccctcctgctgatccaaagctggctggaaccagtgcaatttctgagatctgtgttcgctaacagtcttgtttatggagcctccgacagcaacgtttacgacctgctgaaggacctggaagaggggatccagacgttaatgggaaggcttgaggatggatcccctcgaacaggccaaatttttaagcaaacttactctaagtttgataccaactctcacaatgatgacgctctcctgaagaattatggtttgctgtattgcttcagaaaagacatggataaagtggagacatttttgcgcattgtgcagtgccggagcgtggagggaagctgtggattc

SEQ ID NO: 13359 - DNA, 651 bp, synthetic construct
  misc_feature 1..651: note = source = /note="Description of Artificial Sequence: Synthetic coding sequence"
  source 1..651: mol_type = other DNA
atggccactggcagcagaacttcactattgcttgctttcgggctgctttgtttgccctggcttcaagagggctctgcgtttcccacaatccctctcagcagattgtttgataacgccatgctgagagcccaccgtcttcaccagttggcattcgacacgtaccaggagttcgaggaggcttacatccctaaagagcaaaaatacagcttcctgcagaatcctcaaacaagcctgtgcttttcagaaagtatcccaacacccagtaatagagaagagactcagcagaagtctaacctagaactgctgagaataagcctgctcctcatccagtcttggctggaaccagttcagttcctgaggtctgtgttcgccaactccctagtctatggggcatcagacagcaatgtgtatgaccttctgaaggatttggaggagggcattcagactttaatggggcggttggaggatggcagtccaagaacaggacagattttcaagcaaacttactcgaaatttgacacgaacagtcataacgatgacgctctgttgaagaattacgggctgctgtattgctttcggaaagatatggataaggtggagactttcctgcggatcgtccaatgtcgcagcgtcgaaggcagttgcggcttc

SEQ ID NO: 13360 - DNA, 651 bp, synthetic construct
  misc_feature 1..651: note = source = /note="Description of Artificial Sequence: Synthetic coding sequence"
  source 1..651: mol_type = other DNA
atggctactggatctagaacgagtttacttttggcatttggacttttatgtttaccatggcttcaagaaggatctgcttttccaacgataccattatcaagacttttcgacaatgctatgcttagagcacatagattgcatcaacttgcatttgatacatatcaagaatttgaagaagcttatattcctaaagaacaaaaatatagttttttacaaaacccacaaacatctctttgtttctcagaatctattcctacaccatcaaacagagaagagactcaacaaaaatctaatcttgaattacttagaatttctcttttattaattcaatcatggttagaacctgttcaatttcttagaagcgtcttcgcaaatagtttagtatatggagcaagtgattctaatgtttatgatttacttaaggaccttgaagagggtattcaaactttaatgggacgattagaagatggaagtccaagaacaggacaaatttttaaacaaacatatagtaaatttgatactaactctcataatgatgatgcattgttaaaaaactatggattactttattgtttcagaaaagatatggataaagttgaaacatttcttagaattgttcaatgtagatctgttgagggtagttgcggattc

SEQ ID NO: 13361 - DNA, 651 bp, synthetic construct
  misc_feature 1..651: note = source = /note="Description of Artificial Sequence: Synthetic coding sequence"
  source 1..651: mol_type = other DNA
atggctacgggctcccgtacgagtctgctactggcgtttggtttgttgtgtctgccctggttgcaggaaggctcggccttcccaacgatccctctctcccgactgttcgataatgccatgctgcgcgcccaccgccttcaccaacttgccttcgacacatatcaggagttcgaggaggcctacatccctaaggaacagaagtactccttccttcaaaacccccagacttccctgtgctttagcgagtctatccccactccgagtaaccgtgaggagacccagcagaaatcgaacctagaactcctccgcatcagcctcttgttgattcagagctggctggagcccgtccagtttctgcgctccgtcttcgcgaattcgttggtctacggagccagcgactcgaacgtgtacgacctcctgaaggacttggaggagggcattcaaacactcatgggacgtttggaggatggatccccccgcaccggccaaatctttaaacagacctacagcaagtttgataccaactcccataatgacgatgccttgctgaaaaactacggccttctatattgctttagaaaggacatggataaagtggagaccttccttcgtatcgtccagtgccgttctgtagagggttcatgtggcttc

SEQ ID NO: 13362 - DNA, 651 bp, synthetic construct
  misc_feature 1..651: note = source = /note="Description of Artificial Sequence: Synthetic coding sequence"
  source 1..651: mol_type = other DNA
atggccaccggttcccggacgagcctcttgttggcattcggacttctctgcctgccgtggctgcaggagggatcagcctttcctaccatcccattgtcacggctgttcgataatgccatgctccgcgcacatagactgcatcaactggctttcgacacgtaccaggaattcgaggaggcctacatcccgaaggaacagaagtactccttcctccagaatccccagacctccctgtgtttctcagagtccatcccgactccatcgaatagagaggaaactcagcaaaaatccaacttggaactcctccggatctcccttctgctcatccagtcctggttggaaccggtgcaattcctgcggagcgttttcgcgaattcgctggtgtacggggcttcggacagcaacgtctatgacctgctcaaggacctcgaggaaggcattcaaactctgatgggtcgcctggaagatggaagccctcggaccggtcagatcttcaagcagacttattctaagttcgacaccaactcgcataacgatgatgctctgcttaagaattacggactgctgtactgcttccgcaaggatatggataaggtcgaaactttcttgcgcatcgtccagtgccgctcagttgagggatcctgcggattt

SEQ ID NO: 13363 - DNA, 651 bp, synthetic construct
  misc_feature 1..651: note = source = /note="Description of Artificial Sequence: Synthetic coding sequence"
  source 1..651: mol_type = other DNA
atggccaccggctcacgtacctcgttgctcctggctttcggactgttgtgtttgccgtggctacaagaagggtctgcttttccgaccattcccctgagtaggctgtttgataacgcaatgttgcgggcgcatagattgcatcagcttgcctttgacacctatcaagagtttgaggaagcatacatccctaaggaacaaaagtattcatttctacaaaatcctcaaacaagcttatgcttttccgaaagtattcctacaccgtccaacagagaagaaacccagcaaaagtctaatctggaattattaagaatttctctgttactgatccaatcctggcttgaaccggtgcagttcttaagatctgtgttcgcgaattcgctcgtttatggagcttcggattccaatgtttacgatcttttgaaagacctggaagaaggcattcagacgcttatgggccgtctcgaagatggaagcccgcgaacgggccagatctttaaacaaacttacagcaagtttgacacgaattcacataacgatgatgcgctacttaaaaattacggtttgttgtattgctttaggaaagatatggacaaagttgaaacgtttctccgtatcgtacagtgcagatcggtggaaggaagttgcggattt

SEQ ID NO: 13364 - DNA, 651 bp, synthetic construct
  misc_feature 1..651: note = source = /note="Description of Artificial Sequence: Synthetic coding sequence"
  source 1..651: mol_type = other DNA
atggcaaccggatcaagaacctctcttctcctggcatttggactcctgtgtctgccctggctgcaagagggcagcgccttcccgaccattccactttccaggctgtttgacaatgccatgctgcgcgcacatagacttcatcaactcgccttcgatacctaccaggagtttgaggaagcgtacattccaaaggagcaaaagtactcatttcttcagaacccacagacctcactgtgttttagcgaaagcatcccaactcctagcaatcgggaggaaactcaacaaaagtcgaatctggagctcttgcggattagcctgcttttgattcaatcctggttggaacccgtgcagttcctgcggagcgtctttgcgaactcgttggtgtacggagcatcggactccaacgtctacgacctgcttaaagatctggaagagggcatacagaccttgatggggcgtctggaagatgggtcgcccaggaccggtcagattttcaaacagacctacagcaaatttgacaccaactcgcataatgatgatgcacttcttaagaactacggacttctctactgcttccggaaagacatggataaggtggaaacttttctgcggattgtgcagtgtcgcagcgtggaaggttcttgcgggttt

SEQ ID NO: 13365 - DNA, 651 bp, synthetic construct
  misc_feature 1..651: note = source = /note="Description of Artificial Sequence: Synthetic coding sequence"
  source 1..651: mol_type = other DNA
atggccacaggtagtcgaacttccctgctactggcgttcggtctgctgtgtctcccttggctgcaagagggtagcgccttcccgaccataccgctctcgcggctcttcgataatgccatgttgagagcacaccgactccaccagcttgcatttgacacgtaccaagagttcgaagaggcgtacatcccgaaggagcagaaatattcgttccttcaaaatccccagacctctctctgtttctccgagagtatccccaccccgtcaaatcgtgaggaaacgcagcagaagagcaatctcgagctcttgcgaatcagcctgctactgatccagagttggttggagccagtccagttcctgagatctgtattcgcaaattcgttggtctatggcgcctcagacagcaatgtgtacgatcttctcaaggatctggaggagggcatccagacactcatgggcaggctcgaggatggctccccgcggacaggacagattttcaagcaaacttacagcaaattcgacaccaactcgcacaatgatgacgctcttttgaagaattatggcctgctatactgttttcggaaagacatggacaaggtagaaaccttcctgaggattgtgcaatgccgctcggtggagggctcctgcggtttc

SEQ ID NO: 13366 - DNA, 651 bp, synthetic construct
  misc_feature 1..651: note = source = /note="Description of Artificial Sequence: Synthetic coding sequence"
  source 1..651: mol_type = other DNA
atggcgaccggcagccggacctcgctgctgctggccttcggactcttgtgccttccctggttgcaagaaggatcagcatttcctaccatcccactgagccgactgttcgacaatgcaatgcttagggcacatcggcttcaccaattggccttcgacacctaccaagagtttgaggaggcgtacatccctaaagagcaaaagtattcctttctgcagaacccccagacgtcactttgtttttcggagagcattcctactccttccaatcgtgaagaaactcaacagaagagcaacctggagctgttgcggattagcctcctgctgatccagtcctggcttgaaccagtccagtttctgcgatccgtgtttgcaaattcgctggtgtacggagcatccgatagcaacgtctacgatctgctcaaggacctggaagaaggaattcagaccctgatgggcagactcgaagatggatcacctagaacgggccagatcttcaaacaaacttactccaagtttgataccaactcccataatgatgatgccctgcttaagaattacggcctcctctactgtttccgcaaggacatggataaggtggagacgtttctccgcattgtccagtgccggtcggtggaaggatcatgtggtttt

SEQ ID NO: 13367 - DNA, 651 bp, synthetic construct
  misc_feature 1..651: note = source = /note="Description of Artificial Sequence: Synthetic coding sequence"
  source 1..651: mol_type = other DNA
atggccaccggctcccgaacgtccttgttgcttgcctttggccttctttgccttccgtggcttcaggaaggttcagcgtttcctaccatcccactttcacgtctctttgacaatgcaatgcttcgcgcacatcgactccatcaactcgcgttcgacacttaccaagagtttgaggaagcatacattccaaaggagcaaaagtacagctttctgcaaaacccacaaacctcactttgtttttccgaatcaattccgacgccttcaaacagagaagaaactcagcagaaaagcaatctggaactgctgcgtatttccttgcttttgattcagtcgtggttggaacctgtccaattcttgcggagcgtgtttgcgaactcgttggtgtatggtgcctcggactcgaacgtgtacgatctcctgaaagatctggaagaagggattcaaactctgatgggaaggctggaggatggctcgccgcgtaccggacaaatcttcaagcagacctacagcaaattcgatacgaactcccacaacgatgacgcactgctgaagaattacggattgctctactgttttagaaaggatatggataaggtcgaaacttttctgcgaatcgtgcaatgcagaagcgtcgaagggtcgtgtggattt

SEQ ID NO: 13368 - DNA, 651 bp, synthetic construct
  misc_feature 1..651: note = source = /note="Description of Artificial Sequence: Synthetic coding sequence"
  source 1..651: mol_type = other DNA
atggccactggctccagaacaagcctgttgttggcattcggcctgctatgcctgccttggttacaagaaggaagtgccttccctacaatccccctttcgcggttgtttgacaacgctatgcttcgcgcacacaggttacaccagctggcgttcgacacctatcaggagtttgaggaggcctacatccccaaggagcagaagtactctttcctgcagaaccctcagaccagcctgtgtttcagcgagagcatccccactccttctaatcgagaggaaacacaacaaaagtccaatcttgaactgctcagaatctctctactcttgatccaaagctggctggagcctgttcagtttctccgatcagtcttcgccaattcactcgtttatggggccagtgactctaacgtttatgatctgcttaaggatctcgaagagggcattcagactctgatgggaaggctggaggacggaagcccccgaacaggtcagatattcaagcaaacctactctaagtttgatactaactctcacaatgatgacgccctcctcaaaaactacgggctgctgtactgcttccgcaaggatatggataaagtggaaacatttctcagaatagtgcagtgtagaagcgtggagggcagttgtggtttc

SEQ ID NO: 13369 - DNA, 651 bp, synthetic construct
  misc_feature 1..651: note = source = /note="Description of Artificial Sequence: Synthetic coding sequence"
  source 1..651: mol_type = other DNA
atggctactgggagcagaacaagcctactgcttgcttttggattgctgtgtctgccatggctccaggagggctcagcctttccaacgatccctctttctagactgttcgataatgccatgctgagagcgcatagactgcatcagctggcatttgacacctaccaagagtttgaggaggcatacatccctaaagagcaaaagtatagctttctccagaacccacagacatccctctgcttttctgaatccatcccgactcctagcaacagggaggaaacccagcagaagagtaacttagaactccttagaataagtctactcctgattcagagctggctggagcccgtccagtttctcaggtctgtttttgccaacagcctggtgtatggagctagcgatagcaatgtgtatgacctcctgaaggatctcgaagaggggatccagaccctcatgggaaggctggaggacggcagcccaagaacaggccagatatttaagcagacttactcaaaattcgacacgaatagccacaacgacgatgcgcttttaaagaactacggactactctactgcttcagaaaagatatggacaaggtcgagacttttttacggatagtgcagtgtaggagcgtggaaggcagttgcggtttt

SEQ ID NO: 13370 - DNA, 651 bp, synthetic construct
  misc_feature 1..651: note = source = /note="Description of Artificial Sequence: Synthetic coding sequence"
  source 1..651: mol_type = other DNA
atggcaaccgggagccggactagcctacttctcgcatttgggttattatgcttgccttggctgcaggagggtagtgctttccctacaattcccctgagccgtcttttcgataatgctatgcttagggcacatcggctccatcagttggcctttgatacctatcaggaatttgaagaagcatatatccctaaggaacagaagtatagttttctgcagaaccctcagacctctctgtgcttttcagaatccataccaaccccaagcaaccgagaagaaacacagcagaaaagcaatctggagctcctgaggatctctctcctgctgatacagagctggcttgagcccgttcagttcctgcggagcgtgtttgccaacagcctggtttacggcgcctccgattccaatgtatatgacctgttgaaagacctggaggagggcatacaaacactgatgggaagactggaagatggaagcccgcggacgggacaaatttttaaacaaacttactccaagttcgacactaattctcataatgacgatgcgctcctgaagaactacggactgctatattgtttcaggaaggatatggataaagtagagacctttttaagaatcgtccagtgccgcagcgtcgaagggtcatgtggattt

SEQ ID NO: 13371 - DNA, 651 bp, synthetic construct
  misc_feature 1..651: note = source = /note="Description of Artificial Sequence: Synthetic coding sequence"
  source 1..651: mol_type = other DNA
atggccactgggtcccgaacctctttactattggctttcgggttgctgtgcctgccgtggctccaggagggatctgcatttcctaccattcccctctccaggttgtttgataatgcaatgctcagagcccacaggctgcatcaattggcgttcgacacttaccaggaatttgaggaagcttacataccaaaggagcaaaaatattcatttttacaaaaccctcaaacttctttgtgttttagcgaatcaattccgacaccttctaatcgggaagagacacagcagaagagcaacctggaactcctccgcatctcactgctcctgatccagtcctggctggaaccagttcagttcctcaggagcgtgtttgccaactcactcgtttatggggcctcagattccaatgtctacgatcttcttaaagacctggaggaggggatacaaaccctaatgggaagactggaagacggctcaccaagaacgggacagatcttcaaacagacgtatagcaagtttgacacaaacagccacaatgatgacgctctgttaaaaaattatgggctcctgtattgttttaggaaagatatggataaggtggagacttttctgcgaatcgtacagtgtcgaagtgttgagggctcttgtgggttt

SEQ ID NO: 13372 - DNA, 651 bp, synthetic construct
  misc_feature 1..651: note = source = /note="Description of Artificial Sequence: Synthetic coding sequence"
  source 1..651: mol_type = other DNA
atggccaccggctctaggacttcattgctactggcattcggactgctgtgtttgccttggctgcaggagggtagcgcatttcccacgatcccgctgagcagactgttcgacaatgctatgctgagggcacacaggttacaccagctggcattcgatacctaccaagaattcgaggaggcttacatacctaaagaacaaaagtactcattcctgcagaatccgcagacaagcctttgcttttctgagtcaattccgaccccctcaaatcgtgaggagacccagcagaaaagcaatctggaacttctgcggataagcctgctgctgattcagagttggttggagcctgtgcagttcctgcgcagcgtctttgcaaatagtctggtgtatggcgctagtgattcaaacgtgtacgacttactgaaagacctggaggaagggatccagaccctgatgggccgtctggaggacggctccccaagaactggtcagatctttaaacaaacctactctaagttcgataccaactcacacaacgacgacgccttgctcaagaattacggactcctgtactgctttaggaaggatatggataaggtggagacttttctgcggatagtccagtgcaggagcgttgagggatcatgcgggttt

SEQ ID NO: 13373 - DNA, 651 bp, synthetic construct
  misc_feature 1..651: note = source = /note="Description of Artificial Sequence: Synthetic coding sequence"
  source 1..651: mol_type = other DNA
atggcaaccggttcacgaacctcattgcttctcgcctttggactgctgtgccttccatggctgcaagaaggaagcgcatttccaaccatccctctttcgcggttgtttgataacgcaatgctgcgtgctcatagactccatcagctcgcatttgacacttaccaggaatttgaagaggcgtacattccaaaagaacagaagtactctttcctgcaaaatcctcagacctccctgtgcttctcggaatcaatccccactcccagcaaccgggaggagactcaacaaaaatcaaacctcgaacttctgcgtatctccctgctccttatacaatcctggttggaaccagtgcaatttcttcggtcggtgtttgccaactcgctggtgtacggcgcgagcgactcaaacgtttacgatcttcttaaggatctcgaagaaggtattcagactctgatgggtaggctcgaggatggttcaccaagaaccggtcagatattcaaacaaacttactcgaaatttgataccaattcccataatgatgacgcacttttgaaaaactacggccttctctactgttttcgcaaggacatggataaagtggagacttttctgcgaatcgtccagtgccgctcggtcgagggctcgtgtggattt

SEQ ID NO: 13374 - DNA, 651 bp, synthetic construct
  misc_feature 1..651: note = source = /note="Description of Artificial Sequence: Synthetic coding sequence"
  source 1..651: mol_type = other DNA
atggcaaccggatcgagaacgtcgctgctgcttgcatttggtctgctctgccttccttggctccaagaaggtagcgcatttcctaccattcccctgtcaagactgtttgacaatgccatgctccgagcccaccgcctgcatcaacttgcatttgatacctaccaggaatttgaagaagcgtacattcctaaagagcagaagtactcatttctccaaaatccacagacttccttgtgtttttcagaaagcataccaaccccttctaatagggaagaaactcagcagaagtcgaacctggagttgctccggatctcgctgcttctgatccagtcatggcttgagcccgtgcaatttctgcggtcggtctttgcaaattcactggtgtacggggcctcggatagcaacgtgtacgatctgctgaaggatttggaagaaggaatacaaacgctcatgggccgtctggaagatggctcgcctagaaccggtcaaatcttcaagcagacttactctaagtttgacactaattcacataacgatgatgccctcttgaagaactacggactgctctattgtttccgaaaagatatggataaggtggaaacttttctgcgcattgttcagtgtcgatccgtcgaggggtcctgtggcttc

SEQ ID NO: 13375 - DNA, 651 bp, synthetic construct
  misc_feature 1..651: note = source = /note="Description of Artificial Sequence: Synthetic coding sequence"
  source 1..651: mol_type = other DNA
atggccaccggtagccggacgtcgttgctgctcgcatttgggctgttgtgtctgccctggcttcaggagggatcggccttccctaccatcccactctcgagacttttcgacaacgccatgctgcgagcacataggttgcatcagcttgcattcgatacttaccaagaatttgaagaagcctacataccaaaggagcaaaagtactcgtttctgcaaaaccctcagacctccctgtgttttagcgagagcattcccaccccctccaacagggaggagactcaacaaaagagcaacttggaactcctccgcatttccctcctgcttattcagtcatggctggaacccgtccaatttcttaggtcagtatttgccaattcgttggtgtacggcgcaagcgactccaacgtgtacgatctgcttaaagacttggaggaagggattcaaactcttatgggacgacttgaagatgggagcccgcgcaccggacagatattcaagcagacctactcaaagtttgatactaattcgcacaatgatgatgcactccttaagaactacggcctgctgtattgcttcagaaaagacatggataaagttgaaacgtttcttcgcatcgtgcaatgccggtccgtggagggttcatgtggtttt

SEQ ID NO: 13376 - DNA, 651 bp, synthetic construct
  misc_feature 1..651: note = source = /note="Description of Artificial Sequence: Synthetic coding sequence"
  source 1..651: mol_type = other DNA
atggctactggaagtaggacatctctcctcctggcctttggtctgctctgcttgccctggttgcaggaaggatctgcattcccaactatcccgctgagcaggcttttcgataacgcaatgctgagggcccacaggctgcatcagctggcgtttgatacctaccaagagttcgaggaggcctacatccccaaagagcagaagtactcttttctccaaaaccctcagacaagcttgtgtttctcagagagtatcccgaccccatccaacagagaggaaactcaacagaagagcaacttggagctgctcagaatatcactgttgttgatccagtcatggttggaacccgtccagtttttgaggtcagtgttcgcgaatagtctggtgtacggcgcctctgattctaacgtgtacgatctgctgaaggacttggaagagggcatccaaacactcatgggccgccttgaggacggctcacctagaacaggtcagatcttcaaacagacctacagcaaatttgacaccaacagccacaacgatgacgcactccttaaaaactacggactgttgtattgctttcgcaaggatatggataaagtagagaccttcctcaggatcgtacagtgccgctccgtggagggtagctgtggtttc

SEQ ID NO: 13377 - DNA, 651 bp, synthetic construct
  misc_feature 1..651: note = source = /note="Description of Artificial Sequence: Synthetic coding sequence"
  source 1..651: mol_type = other DNA
atggctactggttccagaacctctctgttgctggccttcggcctgctttgcctcccgtggctccaggagggctcagctttcccgaccatcccgctttcacgtcttttcgacaatgcaatgctccgcgcacacagattgcaccagctcgcgttcgacacctatcaagaattcgaagaggcctacatccctaaggaacaaaagtactcgttcctccagaacccacagaccagcctgtgcttctccgaaagcatccccaccccatcgaaccgcgaggaaactcaacaaaaatccaacctggagctgctgcggattagtttgctgcttatccaatcctggctggagccagttcaattccttcggagcgtgtttgctaacagtctggtctacggggccagcgattcgaacgtgtacgacttgctgaaggatctcgaggagggaatccagaccctcatgggacgtctggaagatggttcaccgaggactggacaaatctttaagcagacgtactcgaaatttgacactaattcgcataatgacgatgcgctcctcaagaactacgggctgctgtactgcttccgcaaggacatggacaaagtcgaaactttcctcaggatagtgcagtgccgatcagtggaaggatcctgtggcttt

SEQ ID NO: 13378 - DNA, 651 bp, synthetic construct
  misc_feature 1..651: note = source = /note="Description of Artificial Sequence: Synthetic coding sequence"
  source 1..651: mol_type = other DNA
atggccaccggaagccgcacatccctgcttttggcctttggacttctgtgcctcccctggctacaggaaggaagcgcgttccctaccattcctctttcccgtttgtttgataatgccatgctacgcgcccatcgactccaccaacttgccttcgacacataccaagaatttgaggaggcatacatccctaaggagcagaagtattccttcctgcagaatccccagacttcactgtgcttttctgaatcaatccccacacccagtaatcgggaggaaactcaacagaaatccaacttggagctgctgaggatctccctcctgctgatccaaagttggttggagccagtccaatttttgcggtctgtgtttgctaactccctggtgtatggggcttcagactcgaatgtatatgatctactgaaagatctggaggagggaattcaaaccctgatgggtagattggaggatgggagccctagaactgggcaaatcttcaagcagacatactccaaatttgacaccaactcacataatgatgatgcccttcttaagaactacgggcttctgtattgtttccggaaggatatggataaggtggagacattcttaagaatagttcagtgtaggtccgtggagggcagttgcgggttt

SEQ ID NO: 13379 - DNA, 651 bp, synthetic construct
  misc_feature 1..651: note = source = /note="Description of Artificial Sequence: Synthetic coding sequence"
  source 1..651: mol_type = other DNA
atggcaacaggcagtaggactagtctgctgctcgccttcgggctcctctgtcttccgtggttacaggagggcagtgcgttccccactattccactctctcggctgttcgacaatgccatgcttagggcccatcgattgcaccagctggctttcgacacctatcaggagtttgaagaggcttatattcctaaggagcagaagtattccttcctgcagaatccacagacaagtttatgcttttcagagagtatccctacacctagcaaccgggaagagactcagcaaaaatccaacttggagctgctgcgcattagcctgctgcttatacaaagctggttagaacccgtacagttcctgcgctcagtgtttgccaactcccttgtgtacggcgctagcgactctaatgtgtacgatcttctgaaagacttggaggaggggattcaaaccctgatgggccgcctggaggacggtagccctaggacagggcaaattttcaagcagacttacagcaaatttgacactaactctcacaacgacgacgcactcctcaagaattacggtctactttactgttttagaaaggatatggataaggtggagaccttcctgcgtatcgttcagtgtaggagcgtggagggcagttgcggattt

SEQ ID NO: 13380 - DNA, 651 bp, synthetic construct
  misc_feature 1..651: note = source = /note="Description of Artificial Sequence: Synthetic coding sequence"
  source 1..651: mol_type = other DNA
atggccactggaagcagaacctccctgctcctcgcgtttggactgttgtgtctgccatggctccaagagggttcagcatttccaacgattcctctgtcccggctctttgacaatgcaatgcttcgagcacatagactgcatcaactcgcatttgatacttaccaggaatttgaagaggcatacattcctaaagagcaaaagtactcctttctgcagaacccacaaacttcactttgtttctcggagtcaattcccaccccttcgaaccgggaagaaacccaacaaaagtctaacctggagctgctgaggatttccctcctcctcatacagtcgtggctggagcccgtgcagtttcttcgaagcgtgttcgcaaactcgctcgtgtacggagcgtccgattcgaacgtgtacgaccttcttaaagatttggaggaaggaatacaaaccctgatgggtagactcgaagatgggtcaccaagaactggtcagattttcaagcagacctactcgaagtttgatactaactcccataacgatgacgcacttttgaaaaactacggactgctctactgtttcaggaaggacatggacaaggtggagacttttctgagaattgtgcaatgtaggtcggtggagggtagctgcggcttt

SEQ ID NO: 13381 - DNA, 651 bp, synthetic construct
  misc_feature 1..651: note = source = /note="Description of Artificial Sequence: Synthetic coding sequence"
  source 1..651: mol_type = other DNA
atggccacagggagcagaacctcgctgctactcgcttttggactactatgcctcccttggcttcaggagggaagtgcgttccctacaattcctctgagccggctatttgataatgctatgctgcgggctcacagactgcaccaactggctttcgacacctaccaggaatttgaggaagcgtacattcctaaggaacaaaaatattcatttctgcagaaccctcagacgtccttatgcttcagtgagtcaatacccacaccgtctaacagggaggagacccagcagaagtctaatctggaactactgagaatttcactgctactcatccagagttggctcgagcctgtgcaattcctgagatccgtgtttgccaattccttggtttatggggcctctgattcaaacgtatacgatctcctgaaagacctagaggaaggcatccagacacttatgggcagactcgaggatgggtcccctaggaccggacaaatctttaaacagacttatagcaagttcgatacaaactcgcataatgatgacgctctccttaagaactatggattgttgtactgtttcaggaaggatatggataaagttgagaccttcttgcgcattgtgcagtgtagatcagtggaagggtcttgtggcttc

SEQ ID NO: 13382 - DNA, 651 bp, synthetic construct
  misc_feature 1..651: note = source = /note="Description of Artificial Sequence: Synthetic coding sequence"
  source 1..651: mol_type = other DNA
atggccaccggcagccgcacatctttgctgctcgccttcggactgctgtgcctgccctggttgcaggaaggcagtgcgtttccgacaattcctctctcccgcctgtttgataacgccatgcttcgcgctcaccgactccaccagttggcgtttgatacttaccaggaattcgaggaggcatatattccaaaggaacaaaaatactcctttcttcagaatccacagacctccctgtgcttctccgagagcatccccaccccttcaaaccgcgaggaaacccaacaaaaatctaacctggaactgttgcgcatcagcttgttgctcattcaaagttggttggaacccgtccagtttctgcggtctgtgtttgcgaactccttggtgtatggcgccagcgacagcaatgtgtacgacctgctgaaggacttggaggagggcattcagactctgatggggcgccttgaggacggaagtccaaggaccggccagattttcaaacagacatacagtaaattcgacactaattcacacaatgatgacgctctcttgaaaaactacggacttttgtactgctttagaaaggatatggacaaggtggagacgtttctgagaatagtgcagtgcaggtcagtcgaaggctcctgcgggttt

SEQ ID NO: 13383 - DNA, 651 bp, synthetic construct
  misc_feature 1..651: note = source = /note="Description of Artificial Sequence: Synthetic coding sequence"
  source 1..651: mol_type = other DNA
atggccactggtagcaggacttctctgctcctcgccttcggcttgctgtgcctgccttggcttcaagaaggatcagcattcccaaccattccactgtctcgtttgttcgacaacgctatgctgcgtgcacatcgcctgcaccagttggctttcgacacttaccaagaatttgaggaggcttacatcccaaaagagcagaagtactcttttctgcaaaatccccagacctctctgtgcttttctgaatcaatcccaactccctccaacagggaagaaactcaacaaaaaagtaacctggaattgctcaggatatctctcctgctgattcaaagctggctcgagccagtacaattcctccgctccgttttcgccaatagtctggtctatggcgcatccgacagcaacgtgtatgaccttttgaaggatctcgaagagggcattcaaaccctgatgggccgccttgaggacggatctccaaggacaggtcagatctttaagcaaacttattccaagttcgacaccaacagccataacgacgatgccctcctcaagaactacggactgctgtattgtttccgtaaagatatggacaaagttgagacattccttcgcatcgtacaatgtaggtcagtggagggcagctgcggtttt

SEQ ID NO: 13384 - DNA, 651 bp, synthetic construct
  misc_feature 1..651: note = source = /note="Description of Artificial Sequence: Synthetic coding sequence"
  source 1..651: mol_type = other DNA
atggccaccgggagccgcacctcgttactgctagcattcggccttctgtgcctgccttggctccaggagggcagtgcattccccaccatacccctgagtcgcctcttcgataatgccatgctgcgggcccaccggctgcatcagctggcatttgatacatatcaagagttcgaagaggcgtacatcccaaaggagcagaagtatagctttttacagaatccccagacctctctgtgttttagtgaaagcataccaacaccttcgaatcgcgaggagacccagcaaaaaagcaacctcgaactgttaaggataagcctgctgttgatccagtcttggctggaacccgtgcagttcttgcgaagcgtctttgcaaatagccttgtgtacggggccagtgacagcaacgtgtatgaccttctgaaggatctcgaggagggcattcaaactctgatgggccggcttgaagatggaagtccaaggaccgggcagatcttcaaacagacctactccaaattcgataccaattctcacaacgacgatgccctgctgaagaactatggtctgctttactgctttcgcaaagatatggacaaagttgaaacgtttctgcgaatagttcagtgccgttcagtggagggcagttgtggattt

SEQ ID NO: 13385 - DNA, 651 bp, synthetic construct
  misc_feature 1..651: note = source = /note="Description of Artificial Sequence: Synthetic coding sequence"
  source 1..651: mol_type = other DNA
atggcgactggatcgagaactagccttctcctcgcattcggtttgctttgtttgccgtggttgcaagagggatccgctttccctaccatcccactctcgcgcctgttcgataatgccatgctgagagcacaccgcctgcatcaactggcgtttgatacctaccaggaattcgaggaggcttacattccgaaagagcaaaagtactcatttttgcaaaacccacaaacttctctttgctttagcgagagcatacctaccccgtcgaaccgcgaagaaacccagcagaagagtaacctggagctcctccggatctcgctcctgctcatccagtcctggcttgaaccagtccagttccttcgctcggttttcgccaatagcctcgtgtacggagcgtccgattccaatgtctatgatctcctgaaagatttggaagaaggaattcagaccttgatgggccggctggaagatggaagccctcggactggacagatctttaagcaaacgtactcaaagtttgacaccaattcacacaacgatgacgccctcctgaagaactacggtttgctgtactgttttaggaaagacatggacaaagtggaaaccttcctccgaattgtccagtgccggagcgtcgaaggatcatgcggtttc

SEQ ID NO: 13386 - DNA, 651 bp, synthetic construct
  misc_feature 1..651: note = source = /note="Description of Artificial Sequence: Synthetic coding sequence"
  source 1..651: mol_type = other DNA
atggcaacgggctcccgcacttcattgctgctcgcctttggactgctgtgcctgccttggctccaggagggatcagcgttcccaaccatccccctgtcgcgcctgttcgacaatgcgatgctcagagcacataggctgcaccagcttgcattcgacacctaccaagagtttgaggaggcatacatcccgaaggaacagaagtactcatttctgcaaaatccgcaaacgtcactgtgcttctcggaaagcattccaactccatccaatcgcgaagagactcagcaaaagtcaaacctcgaactgctgcggatttcgctgctgctcattcaatcgtggctcgagccggtgcagttcctgaggagcgtgttcgccaacagcctcgtctacggagcctccgatagcaacgtgtacgatctgctgaaggacctggaggaaggaatccaaactctcatgggtcggctggaggatggcagcccaagaaccggacaaatcttcaaacagacctactcgaagttcgacaccaattcgcataacgatgacgcacttctcaaaaactacggcctgctgtactgcttccggaaagacatggacaaggtggaaaccttcctgcgtatcgtgcagtgcagatcggtggagggatcctgcggattc

SEQ ID NO: 13387 - DNA, 651 bp, synthetic construct
  misc_feature 1..651: note = source = /note="Description of Artificial Sequence: Synthetic coding sequence"
  source 1..651: mol_type = other DNA
atggcaacgggatcacggacctcacttctgctggcattcggcctgctctgtctcccttggctgcaggaaggttcggcctttccgactatcccactttcgaggttgtttgataacgccatgcttagggctcatcgcctgcaccaactggcatttgacacctaccaagaattcgaagaagcatacattcccaaagaacagaaatactccttcctccagaacccccaaacctcgttgtgtttcagcgagagtatacctacgccttcgaatagagaagaaactcagcaaaaatcgaacttggaactgctgcgaatatccctgcttttgattcagtcctggcttgaaccagtgcagttcctgagaagcgtctttgccaattcactcgtctacggagcaagcgattcgaacgtttacgacctcctgaaggatctcgaagaaggtattcaaaccctcatggggcggcttgaagatggcagcccccggactggacagatctttaaacagacttactcaaagtttgatactaactctcataacgatgatgccctgcttaagaactacggacttttgtactgctttagaaaagatatggacaaagtcgaaacctttctgagaattgtccagtgtagaagcgtggagggctcctgtggtttt

SEQ ID NO: 13388 - DNA, 651 bp, synthetic construct
  misc_feature 1..651: note = source = /note="Description of Artificial Sequence: Synthetic coding sequence"
  source 1..651: mol_type = other DNA
atggcaacaggatcacgcacatcccttctcctggcttttggattactctgtttgccttggttacaggaggggtcggcctttcctacaatccccctatcacgcctattcgataacgccatgctaagagctcatcgtctccatcagttggccttcgatacttatcaggaattcgaagaagcttacattcccaaggaacagaaatattcatttctacagaatccacagacatccctgtgtttcagtgaaagtatccccactccatctaatcgggaagaaacacagcagaagtccaacttagaactccttcgaatctccctcctgctcattcagtcatggctggaaccggtccagttcctgagatccgttttcgctaattccttagtgtatggggcctcagattccaacgtgtatgatctgctcaaagacttagaggaaggaattcagacactcatgggacggctcgaagatgggagtcctcggacagggcagatattcaaacagacatattcaaaatttgacactaactcccataatgatgatgccctgctcaaaaactatgggctgctgtattgttttagaaaagatatggataaagtcgaaactttcctgagaattgtgcagtgtagaagtgtagaagggtcatgcgggttc

SEQ ID NO: 13389 - DNA, 651 bp, synthetic construct
  misc_feature 1..651: note = source = /note="Description of Artificial Sequence: Synthetic coding sequence"
  source 1..651: mol_type = other DNA
atggccaccggctcccggacctcgctgctcctggcattcggactgctctgtctcccatggttgcaggaagggtccgcttttcccaccatcccgctgtcgcggctctttgacaacgcaatgctgcgagcccacagactgcaccagctcgccttcgacacttaccaggagttcgaggaagcatacatcccgaaggagcaaaagtactcctttcttcagaatccgcagaccagcctttgcttttccgaatcaatcccgaccccgtcaaatcgggaagagacgcaacagaaaagcaatctggagctcctgagaatctcgctcctgctcattcagtcatggctggaacctgtgcaatttcttagatcggtgttcgcaaattccctggtctacggcgcatcggattccaacgtgtacgacctgctgaaagacttggaggaaggaattcagacgcttatggggagactcgaggacggaagcccgcgaactggccagatcttcaaacagacgtactccaaattcgacaccaattcgcataacgacgatgctctcctgaagaactacgggctgctgtactgcttccggaaggacatggacaaagtcgagactttcttgcgcatcgtgcaatgtaggagcgtcgaaggttcatgcggattt

SEQ ID NO: 13390 - DNA, 651 bp, synthetic construct
  misc_feature 1..651: note = source = /note="Description of Artificial Sequence: Synthetic coding sequence"
  source 1..651: mol_type = other DNA
atggccacgggcagcagaacatccctcttacttgccttcggcctgctgtgtcttccctggttgcaggaggggtctgcgtttccaacaattccactgtcacgactgttcgataatgcaatgctcagagcccatagactccatcagttggcctttgatacctaccaggaattcgaagaggcgtatataccaaaggagcagaagtacagctttctgcagaacccccaaacttcactgtgttttagcgagtctatcccgacccctagtaatagggaggagacacagcaaaagagtaacttagagctgctgcgaatctccctgctgctgatccagtcctggcttgagcccgttcagttcctgcgcagcgtttttgccaactccctcgtttacggcgccagcgatagcaatgtctatgacctgttgaaagacctcgaagaaggaatacagactcttatggggcgtctggaggacggctccccccggacaggccagatatttaaacagacatatagcaaattcgatactaattcacacaacgacgatgcgctcctgaaaaactatggtcttctatactgctttagaaaggatatggataaggttgagacattcttgcgtattgtgcagtgcagatccgtggaaggaagttgcggtttt

SEQ ID NO: 13391 - DNA, 651 bp, synthetic construct
  misc_feature 1..651: note = source = /note="Description of Artificial Sequence: Synthetic coding sequence"
  source 1..651: mol_type = other DNA
atggccaccggaagtaggaccagtctgctgttggcgtttggacttctctgtttgccttggctccaggaaggttcagcgttccccacaattcccttgtcacgcctgtttgataatgcgatgctcagagcacacaggctccaccagctggcatttgatacctatcaggagttcgaagaggcttacattcctaaggaacagaagtattcgtttttacagaatccacagacttcactgtgcttctccgagtcaatccccacaccttcaaatcgggaggagacccaacagaagagcaatttggaattgctccggatatccctgttgttgattcagagttggttggaacctgtgcagtttctccgtagcgtcttcgccaacagtctggtatacggggctagcgattccaacgtctacgatctgctcaaagacctggaggagggtatccaaaccctgatgggccgtctggaagatgggagcccccggaccggccagatttttaaacagacctacagtaagttcgataccaattctcacaatgacgacgcgctgctgaaaaactatggcctactttactgttttagaaaagacatggacaaggtcgaaactttcctgcggattgttcaatgtcgctccgtggaagggagttgcgggttc

SEQ ID NO: 13392 - DNA, 651 bp, synthetic construct
  misc_feature 1..651: note = source = /note="Description of Artificial Sequence: Synthetic coding sequence"
  source 1..651: mol_type = other DNA
atggcaactggctcaagaacctcgttgttgctggcgttcggtctgctgtgcctgccgtggctccaagagggctccgcattcccaactatcccgctctcgcgactctttgacaacgccatgctgcgggcacacaggctccaccagctcgccttcgatacgtaccaggaattcgaggaagcatacattccgaaggaacagaagtattcattcctccagaacccgcaaacctcgctgtgtttttcggagtcaatcccgaccccatcaaaccgggaagaaacccagcagaagtcgaacctcgaacttctgcggatctcccttctgctgattcagtcgtggctggaaccggtgcagtttttgcggtcggtgttcgcgaatagcctcgtctacggagcttcagactcgaacgtgtacgacctcctgaaggacctggaggagggcatccagactctcatgggcaggcttgaggacggctccccacgcaccgggcaaatctttaagcagacttactccaagttcgatactaactcccataatgacgatgctctgcttaagaactacgggctcctctactgcttccgtaaagacatggataaggtggagacgttcctgagaatcgtgcagtgcagatcggtcgaaggatcgtgcggcttt

SEQ ID NO: 13393 - DNA, 651 bp, synthetic construct
  misc_feature 1..651: note = source = /note="Description of Artificial Sequence: Synthetic coding sequence"
  source 1..651: mol_type = other DNA
atggccacgggaagccgcacatctctgctgctcgcctttgggctcctgtgccttccctggctgcaggaaggcagcgcctttccaacaatccccctgtcacgactgtttgacaacgccatgctgcgagcacacaggttgcaccaactagctttcgatacataccaggaattcgaggaggcatacattccaaaggaacagaagtattctttcctgcagaatccccagacctcgttgtgcttttcagaatctattccaactccctctaacagggaggaaacacagcagaaaagtaacctagagcttctccgaatctccctgctgctgatccagtcctggctggaacccgtccagttcctgaggtccgtgtttgcaaatagtctagtgtatggtgcgagtgactcgaacgtttacgacttgttgaaggatctggaggaggggatacagaccctgatgggtagactggaagacggaagtccccgcacaggtcagatctttaagcagacctatagcaaatttgacacaaatagtcacaatgatgatgccttgctaaagaactacggattattgtattgcttccgtaaggatatggataaagtcgagacattcctgcgaattgtgcaatgtagatctgtagaaggctcttgtggcttc

SEQ ID NO: 13394 - DNA, 651 bp, synthetic construct
  misc_feature 1..651: note = source = /note="Description of Artificial Sequence: Synthetic coding sequence"
  source 1..651: mol_type = other DNA
atggcgacggggagccgtactagccttctgcttgcatttggtttgctgtgtctgccatggctgcaagaaggatcggcatttcccaccatccccctgtcgcggctgtttgataacgcgatgcttagagcacataggcttcatcagctcgccttcgacacttaccaggaattcgaggaggcatacatcccaaaggaacagaagtattcctttctccagaacccccagacttccctgtgtttttccgaatccattcctaccccgtcaaatcgcgaagaaactcaacagaagtcaaatcttgaacttcttcggattagcctcctgctcatccagtcctggcttgaaccggtccagtttctccgatcggtgttcgctaactctctggtctacggagcatcggactctaacgtttacgatctcttgaaagacttggaagaaggtatccagacccttatgggtcgactcgaagatggatcgcctcggactggtcaaatcttcaagcaaacttatagcaagtttgataccaattcacataacgatgatgcactgcttaagaattacggtctgctgtactgtttccggaaggatatggataaggtggaaaccttccttcgcattgtgcaatgtagaagcgtggagggatcatgtggattc

SEQ ID NO: 13395 - DNA, 651 bp, synthetic construct
  misc_feature 1..651: note = source = /note="Description of Artificial Sequence: Synthetic coding sequence"
  source 1..651: mol_type = other DNA
atggcgaccggctcacgcacttcgcttcttcttgcatttggattgctttgcttgccttggctgcaggaaggtagcgcctttcctactatcccactgtcccggctttttgacaacgcgatgctgagggcgcacaggcttcatcagttggcatttgacacctaccaggagttcgaggaagcgtacattcctaaagaacagaagtactcgtttctgcaaaaccctcaaactagtctttgttttagcgaatcgatccctaccccatcaaaccgagaagagactcaacaaaagagcaatctcgaacttctcaggatctcgttgcttctcatacaatcctggctggaaccagtgcaatttctgagaagcgtttttgcaaatagcctcgtgtacggagcgtcagatagcaacgtgtatgacctgctgaaggatctggaggagggcatacagacgctcatgggtcggctggaagatggatcaccccgcaccggccaaatctttaagcaaacctactccaaatttgataccaactcgcataacgacgacgcccttcttaagaactacggactgctgtactgctttaggaaggatatggataaggtggagactttccttcgaattgtccagtgtcgctcagtcgagggctcgtgtggtttt

SEQ ID NO: 13396 - DNA, 651 bp, synthetic construct
  misc_feature 1..651: note = source = /note="Description of Artificial Sequence: Synthetic coding sequence"
  source 1..651: mol_type = other DNA
atggcgaccggcagccggacgtcactgttgctggcattcggcctgctctgcctgccctggctgcaagagggatcggcgttcccaacgatcccgctctcgagattgttcgacaacgctatgcttagagctcataggcttcaccagctcgccttcgacacttatcaagaatttgaagaggcatacatcccgaaagaacagaaatactcgttcctccagaacccgcagacttccctgtgcttctccgaatcgatccctacccctagcaaccgtgaagagactcaacaaaagtcaaacctggaattgctgcggatcagcctgctgctgatccagtcgtggctggagccggtgcagttcctccgctccgtttttgccaattctcttgtctacggggcctccgatagcaacgtgtacgacctgctgaaggacctcgaggagggaatccagacccttatgggacgcctcgaggacgggagcccacggactggacagattttcaagcaaacctactcgaagttcgataccaactcacacaatgacgatgccctcctgaaaaattacggcctcctgtactgcttccgaaaggatatggacaaggtcgaaacttttctgcgcattgtgcagtgtcgctccgtggaaggttcatgcggattt

SEQ ID NO: 13397 - DNA, 651 bp, synthetic construct
  misc_feature 1..651: note = source = /note="Description of Artificial Sequence: Synthetic coding sequence"
  source 1..651: mol_type = other DNA
atggcaacaggatctagaacttcattacttctggcattcggattgttatgccttccatggttgcaagaaggatcagcgttccctacaattccactgtcacgactgttcgataatgctatgctcagagcacacagattgcatcagcttgcatttgacacataccaagagtttgaggaggcttacatcccaaaggagcaaaaatactcttttttgcaaaacccacaaacatccctctgtttctctgaatctattccaaccccttcaaatcgagaagaaacgcaacaaaagtcaaaccttgagttgcttcgcatttcattgcttttgatccagtcttggctggaacctgttcagttcctacgcagtgtgtttgctaactctttagtttatggagcttcggattcgaacgtttacgatttgcttaaggaccttgaagaaggtattcaaacattgatgggtagattagaggatgggtcaccaagaacaggacagatattcaaacaaacatactctaaattcgacacgaattcacacaacgacgacgctcttctgaagaattacggacttctatactgttttagaaaagatatggataaggtagagacgttcctacgcattgtccaatgtaggagcgttgagggaagctgcggtttt

SEQ ID NO: 13398 - DNA, 651 bp, synthetic construct
  misc_feature 1..651: note = source = /note="Description of Artificial Sequence: Synthetic coding sequence"
  source 1..651: mol_type = other DNA
atggctaccggttcccggacttcactcctcctcgccttcggactgctgtgtttgccgtggctgcaggagggttccgccttcccgaccatccccctctctcggcttttcgacaatgccatgctgcgcgcccaccggctccaccagctggcgttcgacacctaccaggagtttgaagaagcgtacatcccgaaggagcaaaagtactccttcctgcaaaaccctcagacgtcactctgtttcagcgaatcgattccaaccccatctaacagggaagaaacccagcaaaaaagcaacctcgaactcctgcgcatctctctgctgctcatccagtcgtggctcgagccggtccaattcctgagaagcgtgttcgccaattcactcgtgtacggcgcatcagattcgaacgtgtatgacctgttgaaggaccttgaagagggcattcaaactttgatgggacggcttgaggatggatcaccaaggactggacaaatcttcaaacaaacgtactcaaagttcgacacgaactcacacaatgatgacgctctccttaagaattacgggctgctgtactgcttccgcaaggacatggataaggtcgagacttttctgcggattgtgcagtgccgctcggtggaaggatcttgcgggttc

SEQ ID NO: 13399 - DNA, 651 bp, synthetic construct
  misc_feature 1..651: note = source = /note="Description of Artificial Sequence: Synthetic coding sequence"
  source 1..651: mol_type = other DNA
atggcaaccggctcccgcacttcgctgctgctggcatttggtttgctgtgtctcccatggctccaagaagggagcgcgttccctactatcccgttgtcccgtctttttgataacgcaatgctccgagcacataggctgcatcaactcgcatttgatacctaccaggaatttgaggaagcctacattcctaaggaacagaagtactcgttccttcagaaccctcaaacctccctgtgcttctcggaatcgatcccaactccgtccaaccgcgaggaaacgcaacagaaatccaacctcgagcttctccgaatctcactgctgttgattcaatcgtggcttgaacctgtgcaatttctgaggtctgtctttgcaaattcgcttgtctacggagcatccgattcgaacgtctacgatctgttgaaggaccttgaagaagggattcaaacccttatgggacggcttgaggacggtagccctcggaccggtcaaatcttcaaacagacgtacagcaagtttgatacgaactcacacaacgacgacgcgcttctcaagaactacgggctgctgtactgtttccgtaaggacatggataaggttgaaacctttctgcgcattgtgcagtgtcgctccgtggaaggctcatgtggcttc

SEQ ID NO: 13400 - DNA, 651 bp, synthetic construct
  misc_feature 1..651: note = source = /note="Description of Artificial Sequence: Synthetic coding sequence"
  source 1..651: mol_type = other DNA
atggcgacgggttcgcgtacgtcgctactattagcgtttggtttattatgtctaccgtggttacaagaaggttcggcgtttccgacgataccgctatcgcgtctatttgataatgcgatgctacgtgcgcatcgactacatcaattagcgtttgatacgtatcaagaatttgaagaagcgtatataccgaaagaacaaaaatattcgtttttacaaaatccgcaaacgtcgttatgtttttcggaatcgataccgacgccgtcgaatcgtgaagaaacgcaacaaaaatcgaatttagaattactacgaatatcgttattattaatacaatcgtggctagaaccggtacaatttttacgttcggtatttgcgaattcgctagtttatggtgcgtcggattcgaatgtatatgatctattaaaagatttagaagaaggtatacaaacgctaatgggtcgattagaagatggttcgccgcgtacgggtcaaatatttaaacaaacgtattcgaaatttgatacgaattcgcataatgatgatgcgttattaaaaaattatggtttactatattgttttcgaaaagatatggataaagtagaaacgtttttacgtatagttcaatgtcgatcggtagaaggttcgtgtggtttt

SEQ ID NO: 13401 - DNA, 651 bp, synthetic construct
  misc_feature 1..651: note = source = /note="Description of Artificial Sequence: Synthetic coding sequence"
  source 1..651: mol_type = other DNA
atggcaactggctctcgcacctccctgctgctggcctttggtctgctgtgcctgccctggttgcaagagggatccgcattccctaccattcctctgtcgcgtcttttcgataacgccatgctcagagcacataggctccatcagctggcatttgatacttaccaagaattcgaggaggcatacatacctaaggagcaaaagtactcatttcttcaaaatccacagaccagcttgtgtttttcagagtcgatacctaccccctctaaccgggaggaaacccagcaaaaatcgaatctggagcttttgcgcatttcccttctgctgatccaatcctggcttgagccagtccaatttcttagatcagtctttgctaactcactggtgtatggcgccagcgattccaatgtgtacgaccttctgaaggatcttgaagaaggaatccagactcttatgggtcgtctcgaggacggctccccccgtacgggccagatctttaaacagacttactcaaagtttgatactaattcccataacgacgatgcactcctgaagaactacggcttgctgtattgttttcgcaaggatatggataaggtggaaacttttctcaggatcgtgcagtgccgatcggtggaaggatcctgtggtttc

SEQ ID NO: 13402 - DNA, 651 bp, synthetic construct
  misc_feature 1..651: note = source = /note="Description of Artificial Sequence: Synthetic coding sequence"
  source 1..651: mol_type = other DNA
atggctacgggatcacggacctcccttttgcttgcttttggcctgctttgtctcccttggctgcaagagggttccgccttcccaacgattcctctgtctaggttgtttgacaacgcaatgctcagagcgcatcgcctccaccagttggcgttcgacacctaccaggaatttgaagaagcgtacatccctaaggagcagaaatactcctttctgcaaaatcctcagacctccctctgcttttcggaatccattccaaccccgtccaatcgcgaagaaacccaacagaaatcgaatctggaactgctgagaatttctctcctgcttattcagtcctggcttgaacctgtgcagtttctgagatcagtgttcgcaaacagcctggtgtacggtgcatcggatagcaacgtgtacgatttgctgaaggacctggaggaaggaattcagactctgatgggcagactcgaagatggctccccgcgaaccgggcagattttcaaacaaacttacagcaagtttgacaccaactcgcataacgatgatgcactgcttaagaattacggactgctctactgttttcggaaggacatggataaggtcgaaacttttctccgcatcgtgcagtgcaggtcagtcgagggatcttgcggtttt

SEQ ID NO: 13403 - DNA, 651 bp, synthetic construct
  misc_feature 1..651: note = source = /note="Description of Artificial Sequence: Synthetic coding sequence"
  source 1..651: mol_type = other DNA
atggccaccggttctagaacatctcttcttctcgctttcggactgttatgtcttccttggctacaggagggcagcgccttcccaaccattcctcttagtaggctttttgacaacgccatgcttcgtgctcatcgcttacatcaacttgcgttcgatacctaccaagagtttgaagaggcatacatccccaaagagcaaaagtactcttttctccagaacccacaaacctcactttgtttttcggaatcaatacccacgccctccaatcgcgaggagactcaacagaagagtaatcttgagctgttgaggatttccttattgctgatccaaagctggctggaacctgttcagtttcttagatcagttttcgcaaatagccttgtttatggggcaagtgattcaaacgtgtatgaccttttgaaggatctcgaggaaggtatacaaacgctgatgggaaggttagaggacggatcaccaaggactggtcagatcttcaagcagacttacagcaagtttgatactaacagccataacgatgatgcacttttgaaaaactacggtttattatattgtttcagaaaagatatggacaaggtagagacattcctcaggattgtccagtgtcgttcggtcgagggaagttgtggtttt

SEQ ID NO: 13404 - DNA, 651 bp, synthetic construct; identical to SEQ ID NO: 13340
  misc_feature 1..651: note = source = /note="Description of Artificial Sequence: Synthetic coding sequence"
  source 1..651: mol_type = other DNA

SEQ ID NO: 13405 - DNA, 651 bp, synthetic construct
  misc_feature 1..651: note = source = /note="Description of Artificial Sequence: Synthetic coding sequence"
  source 1..651: mol_type = other DNA
atggccaccggctcccgaacttctctcctgctggcctttggacttctctgcctgccctggctgcaggagggatccgcatttcccaccatccccctctccaggctgtttgataatgcgatgcttagagcccaccgccttcatcaactggcgtttgacacgtaccaggagtttgaagaggcttacattccaaaagaacagaagtatagttttctccagaatccccagacgagcctttgctttagtgagtctatcccaactccctctaatcgggaagaaacgcagcagaagtctaatctggaattgctgaggatcagcttgctgctgatccagagttggctggaaccggtgcagtttctgcggagcgtgttcgctaattccttggtgtatggggcgtccgattctaacgtgtatgatctgctgaaggatctggaggaggggattcaaacattgatggggcgactggaggatggctctccacgcaccgggcagatcttcaagcagacctattcaaagttcgacaccaattcacataatgacgatgctctgttgaagaattatggcctcctgtactgcttccggaaggacatggacaaagtggagacctttcttcgcattgtccaatgtaggtcagtggagggcagctgcggattc

SEQ ID NO: 13406 - DNA, 651 bp, synthetic construct
  misc_feature 1..651: note = source = /note="Description of Artificial Sequence: Synthetic coding sequence"
  source 1..651: mol_type = other DNA
atggccaccggaagtagaacgtctctgctgcttgcgtttgggctgctgtgtcttccatggctgcaggaagggtcagcttttcctaccataccgctcagtcgactgtttgataacgcaatgctgcgggctcataggttgcatcagttggctttcgacacttatcaggagtttgaggaggcatacatccccaaagagcaaaagtactccttcctgcagaacccccagaccagcttgtgtttttccgaatctattccaacaccttccaaccgggaggagacccaacagaagtccaacctggagctgctcagaatttccctgctgttgatccaaagctggctcgaacccgttcaattcctgaggtccgtatttgccaattccctcgtgtatggtgcctctgactcaaatgtttacgatttgcttaaggacctcgaagagggcatccagacacttatgggcaggctcgaggacggttctccaaggacaggccaaatattcaagcagacctacagtaagttcgatacgaattctcataacgatgatgccctgctgaagaactacgggctgctgtactgcttccggaaagatatggataaagtggaaacttttttgcggatagtccagtgcagaagcgtggaaggaagttgtgggttc

SEQ ID NO: 13407 - DNA, 651 bp, synthetic construct
  misc_feature 1..651: note = source = /note="Description of Artificial Sequence: Synthetic coding sequence"
  source 1..651: mol_type = other DNA
atggctaccggatcaagaacctcacttctgctggccttcggcctgttgtgcctgccctggttgcaggaagggtctgccttccccacaattcctctgtctaggcttttcgacaatgcaatgctacgagctcatagactccatcagctggcattcgatacgtaccaagaatttgaagaagcatatataccaaaggagcagaagtactcctttctgcagaacccacagacaagcctgtgcttcagcgaatctattccaaccccatcaaaccgagaggaaacgcagcagaagtcaaatcttgaactgctgcgaatcagtctcctgctgatccaatcatggctggagccggtgcagttcctccgatccgtcttcgcaaattctctcgtgtatggtgcgagtgattctaacgtgtatgacctgctaaaggatctcgaagagggcatccaaaccttgatgggcagactagaggatggatcacccagaactggacaaatattcaaacagacatactcgaagtttgacacaaactcccataatgatgatgcattgctgaagaactatggcctactgtattgctttagaaaggacatggataaggtggaaaccttccttcgcatcgtgcagtgcaggtcagtagaaggaagttgcggcttt

SEQ ID NO: 13408 - DNA, 651 bp, synthetic construct
  misc_feature 1..651: note = source = /note="Description of Artificial Sequence: Synthetic coding sequence"
  source 1..651: mol_type = other DNA
atggcaacagggtcccggacatccctgctgcttgcttttgggttactgtgccttccatggctccaagagggaagcgcgttccctacaattccgctatcccgactctttgataacgcaatgctgagggctcacaggctgcaccaactcgctttcgatacatatcaggaattcgaagaagcttatatacctaaggagcagaagtacagcttccttcaaaatcctcagacgtcactgtgcttctcagagtcaattccaaccccatctaaccgggaggagacccagcagaaaagcaacctagaacttctgaggatctccctgctcctaattcagagttggctggaaccagttcagttcctcaggtccgtgttcgcaaactctctcgtgtatggagccagtgatagcaatgtgtacgacctgctaaaggatctggaagaggggatccagacattaatgggaagacttgaggacgggagcccccgcaccggccagatctttaagcagacctacagcaagttcgatactaactcccacaatgatgacgctcttctgaaaaattacgggttactgtactgttttaggaaggatatggacaaggtggaaacatttttacgaattgtgcagtgcaggtccgttgagggatcatgcgggttc

SEQ ID NO: 13409 - DNA, 651 bp, synthetic construct
  misc_feature 1..651: note = source = /note="Description of Artificial Sequence: Synthetic coding sequence"
  source 1..651: mol_type = other DNA
atggccactgggtccaggacgtcgctgcttctcgcgttcggtctgttgtgccttccttggcttcaggaagggtcggcattcccaactattcctctttcccgtttgttcgataatgcaatgcttagagcacatcgcctgcatcagctggcatttgatacgtaccaggaatttgaagaggcctacattcccaaagaacaaaagtactccttcttgcagaacccccagacttcgctttgctttagcgaatcaatccccacgcccagcaatcgtgaggaaactcaacaaaagtcaaacctggagcttctgagaatttcactgctccttattcaatcctggcttgaacctgtccaatttctgagatccgtttttgctaactcgctggtctacggggccagtgactcgaacgtgtacgatcttctcaaggacctggaggaaggaatccagaccctcatgggtagactggaagatgggtcgccccggaccgggcagattttcaaacaaacctactccaaattcgataccaactcgcacaatgacgacgcgctgcttaagaattacggactcctgtactgttttagaaaggacatggacaaggtggaaactttcctcaggatagtccagtgccgaagcgtcgaaggatcctgtggattt

SEQ ID NO: 13410 - DNA, 651 bp, synthetic construct
  misc_feature 1..651: note = source = /note="Description of Artificial Sequence: Synthetic coding sequence"
  source 1..651: mol_type = other DNA
atggctaccggatcgcggacctccctactgctggccttcgggctgctgtgcctcccatggctgcaggagggcagcgcgtttcctacaataccattaagccgcttgtttgacaacgctatgctgcgggcccacagactgcaccagctcgcctttgacacctatcaggaattcgaagaagcctacatccccaaagagcagaaatactcattcctgcaaaatccccagacctccctctgcttctccgaatcaatccccactccatcgaatagggaggagacacagcagaagtctaatctggagctactgcgaatctctctactgctcattcagagctggctagagcccgtgcagttcctccggtcggtcttcgccaacagccttgtatacggcgcttctgactccaacgtgtatgacctgttgaaggatttggaggagggaatacagacattaatgggtcgcctcgaggacggttctcctaggacaggacagatttttaagcagacatatagtaaatttgacacaaactctcacaatgacgacgctctgcttaagaactacggccttctttattgttttcggaaggatatggataaggtggagacgttcttgcgtatcgtgcaatgcagaagcgtagaagggagctgcggcttc

SEQ ID NO: 13411 - DNA, 651 bp, synthetic construct
  misc_feature 1..651: note = source = /note="Description of Artificial Sequence: Synthetic coding sequence"
  source 1..651: mol_type = other DNA
atggctaccggatcccgaaccagcctgctcctcgcatttggcctgttgtgcctgccgtggctgcaggaaggctcagcatttcccactatcccactgagtcgtctgtttgacaacgcaatgctgcgcgcccaccgcctgcaccagctagccttcgatacctaccaggagtttgaagaagcctatatcccaaaggagcagaagtactcatttcttcagaatcctcagacctccttgtgtttcagcgagtccattccaacaccgtctaatcgggaagagacccagcagaagagcaatctggaacttctgcgaattagcctgctgcttattcagagttggctggagccagtgcagttcctccgtagtgtgttcgcaaatagcttggtgtacggagcctccgatagcaatgtttacgatttgctgaaagatctggaggaaggaatccaaacgttgatgggacgcctggaggatggcagcccacgtacaggacaaatttttaagcagacgtactctaaatttgacacaaacagccacaacgacgacgcattattgaagaattacgggctgctgtactgcttccgcaaagatatggacaaagttgaaacttttctgcgtattgtgcaatgtcgtagcgttgaggggtcatgcggtttc

SEQ ID NO: 13412 - DNA, 651 bp, synthetic construct
  misc_feature 1..651: note = source = /note="Description of Artificial Sequence: Synthetic coding sequence"
  source 1..651: mol_type = other DNA
atggctaccggcagccggactagcctgctgctggccttcgggcttctttgtcttccctggttgcaggaagggtcagctttccccactatcccactctcgcgcttgttcgataacgctatgctgagagcccacagattgcaccagctggccttcgacacctaccaggagtttgaggaagcctacataccaaaagaacagaaatattcttttttgcagaacccccagacgtcgctctgcttctccgagtctatccccactccgagcaatcgcgaggaaacccagcagaagtccaatttagaactcctgaggatttccctcctactgatccaaagttggttggaacccgtgcagtttctgcgctctgtctttgccaacagcttagtctacggcgcctcagacagcaatgtgtatgatctgctgaaggacctggaagaaggcatccaaaccctcatggggcgcctcgaggacggttctcctcgcaccggccaaatattcaagcagacctatagcaaatttgacacgaattctcataacgacgatgccctgttgaagaattatgggttgttgtattgttttcgcaaggatatggataaagtggagactttcttgcgaatcgtgcagtgcaggtccgtggaagggtcatgtggcttc

SEQ ID NO: 13413 - DNA, 651 bp, synthetic construct
  misc_feature 1..651: note = source = /note="Description of Artificial Sequence: Synthetic coding sequence"
  source 1..651: mol_type = other DNA
atggctacaggcagtagaacctcgctgcttttggcgttcggcctgctctgtctcccatggttgcaagaaggctctgcatttcctaccattcccctatccaggctattcgacaatgcgatgctgcgggcccacagactgcaccagctggccttcgacacatatcaagaatttgaagaggcttacattcccaaggagcagaagtactctttcctgcaaaacccccagacctcactctgtttctctgagtctatccccactccatccaacagggaagaaacccagcagaagagcaatctagagttgctgcggatttcactgctgttaatccagtcctggttagagcccgttcagtttttacgatctgtgttcgctaattctttagtctacggtgcatcagactcgaacgtctatgacctgctgaaagatctggaggagggcattcaaacactcatgggccgtctcgaggacggatcccccaggactggccaaattttcaagcagacatactccaagttcgatacaaatagtcacaatgacgatgctctgctgaagaattacgggctactgtactgcttccggaaggacatggataaggtggagacatttctgcggattgttcagtgtcggtctgtggaagggagctgtgggttc

SEQ ID NO: 13414 - DNA, 651 bp, synthetic construct
  misc_feature 1..651: note = source = /note="Description of Artificial Sequence: Synthetic coding sequence"
  source 1..651: mol_type = other DNA
atggccacggggtcaaggacctccctgctgttggccttcggtctgctgtgtcttccatggctccaagaaggaagcgcattccctaccattccattgtcacgactgttcgacaatgcaatgctcagagcccatcgtctgcatcagcttgccttcgacacctatcaggagtttgaagaggcgtatattcctaaggagcagaagtacagctttttgcagaacccacagacaagcttgtgcttcagcgaatctatacccacaccctcgaaccgcgaggagactcagcaaaaaagcaatctggagctccttcgcatctctctattgcttatccagtcgtggctagaacccgttcagttcttaaggtccgtcttcgccaacagtcttgtctacggcgcctccgactctaacgtgtacgatctccttaaggatctggaggagggtatccagactctcatgggccggctggaggacggctctcctagaaccggtcagatcttcaagcagacttattctaagtttgatacgaactctcacaatgacgacgccctactgaaaaattacgggctcctgtactgttttcgaaaggacatggataaagtcgaaacattcttgcgcatcgtacagtgtcggtcagttgagggatcctgcgggttc

SEQ ID NO: 13415 - DNA, 651 bp, synthetic construct
  misc_feature 1..651: note = source = /note="Description of Artificial Sequence: Synthetic coding sequence"
  source 1..651: mol_type = other DNA
atggcaacaggaagccggacaagtcttttgttggcttttggcctgctgtgtctgccgtggctgcaggaggggagcgctttccccaccatccccctctctcgcctcttcgacaacgctatgttgcgggctcaccggcttcatcaactggctttcgacacttatcaggaattcgaagaagcttacattcccaaggagcagaagtacagtttcctccagaacccgcagacgagcttgtgtttcagtgagtctattccaactcctagcaatcgtgaggaaactcaacagaaatcaaacctagagctcctcagaatctctctgctgctgatccagtcttggcttgaacccgttcagtttctgagaagtgtgtttgctaacagcctggtctatggagcctctgactcaaatgtgtatgatcttctgaaggacctggaggagggaatccagaccttgatggggagactggaggatggtagccctaggacaggccaaatcttcaagcagacatattctaaattcgatactaattcccataatgacgacgccctcctgaagaactacggcctgctctattgttttcggaaagatatggacaaggttgaaacgttcctccgaattgttcagtgtcggtcagtcgagggatcgtgcggtttc

SEQ ID NO: 13416 - DNA, 651 bp, synthetic construct
  misc_feature 1..651: note = source = /note="Description of Artificial Sequence: Synthetic coding sequence"
  source 1..651: mol_type = other DNA
atggccactggatcccggacctcgctcctcctggcctttggtctgctgtgcctgccgtggctccaggaaggatcagcgtttccaactatccctctctcccggttgtttgacaatgcgatgttgcgggctcatcggctccaccagttggcgtttgacacctatcaggaattcgaagaggcgtacatccctaaagagcagaagtacagctttctgcagaatccacagactagcctctgcttctcggaatcgatcccgaccccatctaaccgggaagagacgcaacagaagtcgaatcttgaattgctccgcatctccctgctcttgattcaaagctggctggagcccgtgcagttcttgcggtcagtgttcgccaattccctggtgtacggagcaagcgattcgaacgtgtatgacctcctgaaggacttggaagaaggcatccaaaccctgatgggccgcctggaagacggcagcccacggaccggacaaatcttcaagcagacttacagcaagtttgataccaactcccacaatgatgacgctttgctgaagaactacggactcctgtactgtttcagaaaggatatggacaaagtggaaaccttcctccgcattgtgcaatgcagatcagtggaagggtcatgtggcttc

SEQ ID NO: 13417 - DNA, 750 bp, synthetic construct
  misc_feature 1..750: note = source = /note="Description of Artificial Sequence: Synthetic coding sequence"
  source 1..750: mol_type = other DNA
atggaaaaaggacctgtgcgagcaccagcagagaagccgagaggtgcacgctgctcgaacggttttccagagcgtgaccctcctaggcctggtccatccagacctgcagagaagcccccaagaccagaggccaagagcgcccaaccggcagacggatggaagggcgaacggccccgttccgaagaagataacgaactgaacttgcctaaccttgctgcagcatacagctcaatactttcgtcacttggggagaatcctcagagacaaggcctcctgaaaacgccttggagagccgcgtcggctatgcagttctttaccaagggataccaagaaactatttccgatgtgctcaacgatgcaattttcgatgaggaccacgacgagatggtgatcgtgaaagacatcgatatgttttcaatgtgcgaacatcatctggtaccttttgtgggaaaagtgcatattggatacttgcccaataagcaggtgctgggcttgtcgaagctggctaggatcgtcgaaatctattcgcgcagactgcaagtgcaggaaagacttaccaagcagattgcagtggcaatcaccgaagcactgcgtccggcaggagtgggagttgttgtggaagccacgcatatgtgtatggtgatgcggggagtgcagaagatgaacagcaagaccgtgacttccaccatgctgggagtctttagggaagatccaaagacccgggaggaatttcttactctgataagaagc

SEQ ID NO: 13418 - DNA, 750 bp, synthetic construct
  misc_feature 1..750: note = source = /note="Description of Artificial Sequence: Synthetic coding sequence"
  source 1..750: mol_type = other DNA
atggaaaaaggcccagtgcgggcccccgccgaaaaacctcgaggtgcaaggtgttccaacggcttccccgaaagggatcccccccgaccgggcccctcgagaccagcagagaagccgcctaggcctgaggccaaatcagcccagcctgccgatgggtggaagggggagagacctagaagtgaagaggacaacgagctgaatctacctaatctagcagccgcttattcttctatcctgagttcactgggagagaatccacagcggcagggcttgctcaagaccccgtggcgggcagcttccgccatgcaattcttcaccaagggttaccaggaaacaatctcagacgtgctgaacgatgcaatttttgacgaggaccacgacgagatggttattgtgaaggacattgacatgttttccatgtgcgagcatcacttggtgccctttgtgggaaaagttcacatcggatacttgccaaacaaacaggttctcgggttgtcaaagttggctcgaatcgtcgaaatctactcaagacggctgcaggtgcaggagcgcctgacgaagcagattgctgtggcaatcacagaggctctgcggcccgccggagtgggagtagtggtcgaagccacacatatgtgcatggtcatgaggggtgtccagaagatgaattcaaagaccgtcactagcaccatgctaggcgtcttccgcgaggatcccaaaactagggaagagttcctaaccctcattagatcc

SEQ ID NO: 13419 - DNA, 750 bp, synthetic construct
  misc_feature 1..750: note = source = /note="Description of Artificial Sequence: Synthetic coding sequence"
  source 1..750: mol_type = other DNA
atggagaaaggaccggtgcgggccccagcagagaagccacgcggcgcacggtgttcgaatggcttcccggagcgcgatccgccgcggcctggcccgtcgcgcccggccgaaaaaccgccgaggcccgaagcgaaaagcgcccaaccggcggatggttggaaaggtgaaagaccgaggtcggaagaggataacgagttgaatctgccaaacctggccgccgcatactccagcattctgtcctcactgggagaaaatccacagcgccaggggctcttgaaaactccttggagggccgcatccgctatgcagttcttcaccaagggataccaagaaactatcagcgatgtgttgaacgacgccattttcgatgaggaccacgacgaaatggtgatcgtgaaggatatcgacatgttctctatgtgcgaacatcacttggtgccttttgtgggaaaagtccacatcggctaccttccgaataagcaagtgctcggtctgtcgaaactggcgagaatcgtggaaatctactcgcgtagactccaggtccaggaacgcttgaccaagcagatcgccgtggcaatcaccgaggctttgcgcccggcgggagtgggagtggtcgtggaagcaacccatatgtgcatggtcatgcgcggagtgcagaagatgaacagcaagactgtcaccagcactatgctcggtgtgttcagggaagatcctaaaactcgcgaagagtttcttactctgatccgctcc

SEQ ID NO: 13420 - DNA, 750 bp, synthetic construct
  misc_feature 1..750: note = source = /note="Description of Artificial Sequence: Synthetic coding sequence"
  source 1..750: mol_type = other DNA
atggagaagggccccgtccgagcacctgccgagaagcctcgcggagcccgatgctccaatggcttccccgagcgcgacccaccccgacctggaccttctcgaccagccgaaaagccacctaggccagaagcgaagtccgctcaaccagccgatggttggaagggagagcgcccacgaagtgaggaggacaatgagctgaatcttcccaacctggccgccgcttactcctcaatcctctcaagcctgggagagaacccgcaaagacaggggttactgaaaactccttggcgggcggcttccgccatgcagtttttcacaaaagggtatcaggagactatttccgatgttctgaacgacgcaatatttgatgaggaccatgatgaaatggttatagtgaaggacatcgatatgttcagcatgtgcgagcaccatctcgtgccattcgtgggcaaagtgcacattggatatttgcccaacaaacaggtgctgggactatccaagcttgcccggatcgtggagatttactcacgtaggcttcaggtacaggagaggctgactaaacagattgcagtagcgattacggaggctttgaggcctgctggagtgggagttgtggtagaggccacccatatgtgcatggtgatgagaggcgtccaaaaaatgaatagcaaaaccgtgacctctaccatgttgggcgtgttccgtgaggaccctaaaacccgcgaggaattcctgaccttgatccggagc

SEQ ID NO: 13421 - DNA, 750 bp, synthetic construct
  misc_feature 1..750: note = source = /note="Description of Artificial Sequence: Synthetic coding sequence"
  source 1..750: mol_type = other DNA
atggaaaaggggccagtgcgggcgccagcggagaagcctcggggcgcacgatgctcgaatggattccccgagagagaccctcctcgacccggcccaagcagaccagcagagaaaccccccaggcccgaagctaagtctgcccagcccgccgatggctggaaaggcgaacggccgcggtctgaagaagacaacgagctcaatttgcctaacctcgcagctgcctatagctcaatcctttcatcactaggggagaatcctcagcgccagggactgctcaagactccatggcgagcagccagtgccatgcagttctttaccaagggctaccaggaaaccatctcagatgtcctaaacgatgccatttttgacgaagatcatgacgagatggtaatcgttaaggatattgacatgttctcaatgtgtgagcaccacctcgtgccattcgtcgggaaggtgcacattgggtatctgccaaacaagcaggtactgggcctctctaagctggcgcggattgttgagatttacagcaggcgtctccaggtgcaggaacgccttacaaaacagatcgccgtggccatcaccgaggctttgcggcccgccggcgtcggagtggttgtggaagccacgcatatgtgcatggttatgaggggagtccagaagatgaactctaagacagtgacctccactatgctcggtgtcttcagggaggatcctaagacgcgcgaagagtttctgacccttatccgcagc

SEQ ID NO: 13422 - DNA, 750 bp, synthetic construct
  misc_feature 1..750: note = source = /note="Description of Artificial Sequence: Synthetic coding sequence"
  source 1..750: mol_type = other DNA
atggagaaaggcccagttcgcgccccagccgaaaagccgaggggtgccagatgtagcaatggcttcccggagcgtgacccgcccaggcctgggccgtcaagaccggccgagaaaccacctcgtcctgaggccaagtcggctcagccagctgacggctggaaaggggagagaccgaggtcggaggaggataacgagctgaatctgcccaacctggccgcagcgtatagctctattctatcctccctgggggaaaacccccagaggcagggactccttaagacaccatggcgtgccgcttctgcaatgcaattttttaccaagggctaccaggagacaatttcggatgttttaaacgacgcgatatttgacgaggaccacgatgagatggtgatcgtcaaggacattgacatgttctccatgtgtgagcaccaccttgtccccttcgtgggtaaggtgcatataggatatctcccaaacaagcaggtgctcgggttatcaaaactggccaggatagtggaaatttattcccggcgcctgcaagtccaagaaagactgaccaagcaaatcgccgtcgccataaccgaagcgctaagaccagccggggtcggtgttgtcgtggaggctacgcacatgtgtatggtcatgcgtggagtccagaaaatgaacagtaagaccgtgaccagtaccatgctcggggtgtttcgcgaggaccctaaaacacgcgaggaattcttgaccttgattagatca

SEQ ID NO: 13423 - DNA, 750 bp, synthetic construct
  misc_feature 1..750: note = source = /note="Description of Artificial Sequence: Synthetic coding sequence"
  source 1..750: mol_type = other DNA
atggaaaaaggccccgtgagggcacctgccgaaaagcccaggggagccagatgtagcaacgggttccctgagagggatccacctaggcctggtccttccagaccggctgagaagccacctagaccagaagcgaagtccgcacaacccgcggatggatggaagggagaaagaccaaggtcagaagaggataatgaacttaaccttcccaatcttgcagccgcttacagctcgatcctgtcatccctgggagagaaccctcaacggcagggtctgctcaagactccttggagagcagcatccgcgatgcagttcttcaccaagggctaccaggaaacgatatcggatgtgcttaacgatgcgatttttgacgaagatcacgatgaaatggtgatcgtcaaagatattgatatgttttccatgtgcgaacaccatctcgtgccttttgtgggaaaggtccacattggctaccttccaaacaagcaagtgctggggttgtccaagctcgcccggattgtggagatttactccagacgtctccaggtgcaggagcggctgactaagcagatcgccgtggcaattaccgaagcacttagaccagctggcgtgggagtcgtcgtggaagcaactcatatgtgtatggtgatgcggggagtccagaaaatgaacagcaagactgtgaccagcaccatgcttggtgtgttccgtgaggacccaaagacccgtgaggaatttcttactctgatccgctcc

SEQ ID NO: 13424 - DNA, 750 bp, synthetic construct
  misc_feature 1..750: note = source = /note="Description of Artificial Sequence: Synthetic coding sequence"
  source 1..750: mol_type = other DNA
atggagaaaggtcctgtgcgggcccccgctgagaaacctagaggggcccggtgcagcaacgggtttcctgaacgggacccaccaaggcccgggccaagtaggcccgccgagaaaccgcctaggccggaggctaagtctgcacagcccgccgacggttggaagggagagaggcccagatccgaggaagataatgaactcaacctcccaaatctggccgctgcctacagctcaattctgagcagtctgggcgagaacccgcaaaggcagggactgctgaagacaccctggcgcgcagcatccgcaatgcagttttttaccaagggttaccaggagaccatttcagacgtgttgaatgacgcaattttcgatgaggaccacgacgagatggtaatcgtcaaagacattgacatgttctctatgtgcgagcaccatctcgtgccgttcgtcggaaaggtgcacatcggctacctccccaacaagcaggttttgggcctttccaaacttgcccgcattgttgagatctactctcgccggctccaagtccaagagagattgacaaagcagattgccgtcgccatcactgaggcccttaggcccgccggggtgggggtggtggtggaggctactcacatgtgcatggtgatgaggggggtccaaaagatgaactccaagaccgtaacttccactatgctcggcgtcttccgcgaggacccgaaaacccgggaggagttcctcaccctcatccgcagt

SEQ ID NO: 13425 - DNA, 750 bp, synthetic construct
  misc_feature 1..750: note = source = /note="Description of Artificial Sequence: Synthetic coding sequence"
  source 1..750: mol_type = other DNA
atggaaaagggtccagtcagagcacccgctgagaagccccgcggagccagatgtagcaacggttttccagagcgagaccctccaagacccggtcccagccggcccgccgagaaacctcctcgcccagaggctaagtcggctcagcccgcagacggttggaagggcgaaagaccaagatcagaggaggataatgagctgaatctgccgaaccttgccgccgcttatagttcaattctgtcctccttgggcgagaatccacagcgtcagggcctgctcaagaccccatggagagccgcaagcgcgatgcaattttttactaaaggctaccaggaaactatttcagatgtcctgaatgacgccatattcgatgaagatcatgacgaaatggttatagttaaggacatcgatatgttcagtatgtgcgagcaccatttagtgccctttgtgggcaaagtccatatcggttacctccccaataagcaggtgctcgggctgtccaagctggcacggatcgtcgagatatacagccgcagactccaggtgcaggagagactgaccaagcagattgcagtggcaatcaccgaagccttacggcctgccggagtgggagtggtggtcgaagctacacacatgtgtatggtcatgcgtggagtgcagaagatgaattcgaaaaccgtcacatcaacaatgctgggagtgttccgtgaggaccccaaaactcgagaagagttcctcacactgattcgaagc

SEQ ID NO: 13426 - DNA, 750 bp, synthetic construct
  misc_feature 1..750: note = source = /note="Description of Artificial Sequence: Synthetic coding sequence"
  source 1..750: mol_type = other DNA
atggagaagggccccgtgagggcccccgcggaaaagcctcgcggtgcgcgctgttccaacggattcccagagagagacccccctcgtccgggcccgtcccgcccggctgaaaagccaccacgccctgaggccaagagcgcgcagcccgcggacggctggaagggtgaaaggcctcgcagcgaagaggacaatgaactgaatcttccaaatttggcggccgcctactctagcatcctgagcagcctgggtgaaaatccacagcgccaaggtctgcttaagaccccatggcgcgcagcaagcgccatgcaattcttcaccaagggctatcaggagactattagtgatgtcctgaacgacgcaatctttgacgaggaccatgatgagatggttatcgtgaaagatatcgatatgttttctatgtgcgaacatcacctggtcccatttgtgggtaaagtgcacattggctatctgcctaataagcaagttctaggcttgtcaaaactggcccgcatcgtagagatttactcccgacgtctgcaggtacaggagcgtctgaccaagcagatcgcggtggctatcaccgaggccctgcgcccagcaggagtgggcgttgtcgtggaggctactcacatgtgtatggtgatgcgtggcgttcagaagatgaatagcaaaacagtcacgagcactatgctgggtgtcttccgggaagatccaaagacgcgggaggagtttctcaccttaatccgcagt

SEQ ID NO: 13427 - DNA, 750 bp, synthetic construct
  misc_feature 1..750: note = source = /note="Description of Artificial Sequence: Synthetic coding sequence"
  source 1..750: mol_type = other DNA
atggagaaaggccccgtccgcgctcctgctgaaaaaccacggggtgccaggtgcagtaatggtttccctgaacgggatccccccaggcctggcccatctcgtcccgcagagaaaccccccaggcctgaggctaaatccgcacagccggccgatggttggaagggcgagagacctcgtagcgaggaagacaacgaattaaacctgcccaatttggccgcagcttactccagcatcttgtcgagtctcggggaaaatccgcagcgacaagggttgctaaaaactccctggagggctgccagtgccatgcagttttttaccaaaggataccaggagaccatctcagatgtgcttaatgatgccatatttgatgaagatcatgacgagatggtcatcgtcaaggatatagatatgttcagcatgtgtgaacatcaccttgtgccctttgtaggcaaggttcatattggctatttacccaacaagcaggtactgggtttatctaagctggcccgtatagtcgagatatactcacggaggctccaggtccaggagagattgactaaacagattgcagtcgctatcacggaggcgctgcggcctgctggcgttggagtcgtggtggaggcaacacacatgtgcatggtgatgcggggtgtccagaaaatgaactcaaaaaccgtgactagcacaatgctgggagtttttcgggaggatccaaaaacccgcgaagagttcctgacactaattcggtca

SEQ ID NO: 13428 - DNA, 750 bp, synthetic construct
  misc_feature 1..750: note = source = /note="Description of Artificial Sequence: Synthetic coding sequence"
  source 1..750: mol_type = other DNA
atggagaaggggcccgtcagggccccggctgaaaagccccggggagctagatgttcaaatggttttccagagagggatccacctagaccaggacctagcagacccgcggaaaaaccaccgagaccggaagccaaaagtgctcagcctgctgacggttggaagggggagagaccgaggagcgaagaagataatgaactcaacctgcctaatctggctgctgcttatagttccattctgagctctttaggggaaaatccccaaagacagggactcctgaagactccttggcgcgccgcttcggcaatgcaattctttaccaaaggttatcaagagaccatatccgacgtgctcaatgacgccattttcgatgaggatcatgatgaaatggttatcgtcaaggacatcgatatgttttccatgtgcgagcaccacttggtgccttttgtcgggaaggttcacattggatatctgccaaataaacaggtcctggggctgtcaaaattagcccgaattgtggagatatatagcagacgcctgcaggtgcaggaacgcctaacaaaacagatcgcggtagcgatcaccgaggccctgcggcctgccggcgtgggcgttgtagtagaggccactcacatgtgcatggttatgcggggggtgcagaaaatgaactctaagacagtgaccagtacaatgctcggagtatttagagaggatccaaaaacccgcgaggaattcctcacactcatccgatcc

SEQ ID NO: 13429 - DNA, 750 bp, synthetic construct
  misc_feature 1..750: note = source = /note="Description of Artificial Sequence: Synthetic coding sequence"
  source 1..750: mol_type = other DNA
atggagaaagggccggtgagggctcctgccgaaaagccgcggggagcccgctgctcgaatggcttcccggaacgggacccgccgcggccggggccaagccggccggccgaaaaacccccacgcccagaagcgaaatccgctcagccggcggacggatggaaaggagaaagacctcgatcggaagaggataatgaacttaacctccctaacttggccgcggcatacagctcgatcctctcgagcctgggagaaaaccctcagcgccaaggacttctgaaaacgccatggcgggcggcgtcagcgatgcagtttttcactaagggataccaagagactatttccgacgtcctgaacgatgcgattttcgacgaggatcacgatgagatggtcatcgtgaaggacatcgacatgttctcgatgtgcgaacatcacctggtcccgttcgtggggaaggtccatatcggataccttccgaacaagcaagtcctcggactgtcgaagctggcacggattgtcgagatttactcgcggcggctgcaggtgcaggagcgcctgaccaaacaaatcgcagtcgccatcactgaagccctgcgacctgctggcgtgggcgtcgtggtggaagcaacccacatgtgtatggtgatgcggggagtgcagaaaatgaactcaaaaactgtcacttcaacgatgctcggcgtctttagagaagatccaaagactcgcgaagaattcctcactctcatccgctca

SEQ ID NO: 13430 - DNA, 750 bp, synthetic construct
  misc_feature 1..750: note = source = /note="Description of Artificial Sequence: Synthetic coding sequence"
  source 1..750: mol_type = other DNA
atggaaaaggggccagttagggcaccagcagagaaaccaaggggtgcccgatgttctaacggattccctgagcgggacccgcccaggccagggccgtcccggcccgctgaaaaaccccccagacccgaggcaaagagcgcacagcccgcggacggctggaagggcgaaagaccccgatctgaggaggacaacgagcttaatcttccaaacttggccgcagcttacagctccattctcagtagcctgggggagaacccccaacgtcagggtctccttaagactccgtggagggccgcctctgccatgcaatttttcacaaaagggtatcaggagacaatttctgacgtgctgaatgacgctatcttcgacgaagatcacgatgagatggtgatcgttaaggacatcgacatgttttccatgtgtgagcatcatctcgtcccgttcgtgggcaaagtgcatatcgggtatctgcctaacaagcaagtcctgggactttcaaagttggcccgaatagtcgagatatattcaaggcgattgcaggtgcaggaacgcctgaccaagcagattgcggtagcaatcacggaggccctcagacctgcaggagtgggcgttgtggtggaagcaacccatatgtgcatggtgatgcggggcgtgcagaagatgaactcaaagactgtgaccagcacaatgcttggagtgttcagggaagacccaaagaccagagaggaatttttaaccttaatccggagt

SEQ ID NO: 13431 - DNA, 750 bp, synthetic construct
  misc_feature 1..750: note = source = /note="Description of Artificial Sequence: Synthetic coding sequence"
  source 1..750: mol_type = other DNA
atggagaaaggaccggtgagagctcccgcagagaagcctcggggcgcccggtgtagcaatgggtttccagaaagggacccaccgcgccccgggccgtcacggccagctgagaagcccccccggcccgaagctaagtcagcacagccagcagacgggtggaagggcgaacgcccacgcagtgaggaggacaatgagctgaacctgccaaatttagctgccgcttacagttctatcttgtctagcctgggggagaacccacagcggcagggtttgctgaagacgccttggcgggcggcatccgccatgcagttctttaccaagggctatcaggagacaatatccgatgtgctgaacgacgccatattcgatgaggaccatgacgagatggttattgtcaaagacatagatatgttctcaatgtgcgagcaccatctagtgccgtttgtgggaaaggttcacatcggatatctgccgaacaagcaagtcctcgggctgagcaaactggcacgtattgtcgagatatatagccgtcgcctccaggtgcaggaacggctaacaaaacagatcgcagtcgccataacagaagctcttaggcctgcgggagttggcgttgtggttgaggctactcacatgtgtatggtaatgcggggggtccaaaaaatgaacagtaagacagtgaccagcaccatgctgggagtgttccgcgaggaccctaaaacacgcgaggaatttctgactctgatacgatct

SEQ ID NO: 13432 - DNA, 750 bp, synthetic construct
  misc_feature 1..750: note = source = /note="Description of Artificial Sequence: Synthetic coding sequence"
  source 1..750: mol_type = other DNA
atggagaagggccctgtccgggctcctgccgagaaaccccgaggggctcgttgctccaacggcttcccggagagggatccaccccgacctggcccttcacggccagctgagaagccgcctcggccagaggcgaagtctgcccagcccgcagacggatggaagggtgaaagacctagaagcgaagaggacaatgaactcaacctcccaaaccttgcagcggcttacagctcaatacttagcagcctgggcgagaatccgcagaggcaaggcctcctcaaaacgccttggcgagcggcaagcgcgatgcagttcttcaccaaggggtatcaagaaaccatatctgacgtgctgaacgacgcgatttttgacgaagaccacgatgaaatggtcatcgtaaaggacattgacatgttctctatgtgcgagcaccacctggtaccctttgttggcaaggtccatatcgggtatctgcccaacaagcaggtactgggcctgagcaagctcgcccgaattgtcgaaatctatagtcgtagattacaagtgcaggaaaggttgacaaagcagattgccgtggctatcactgaggccctgcggcccgctggagtaggtgtggtggttgaggcgacccatatgtgtatggtcatgcgcggagtccagaaaatgaattctaaaacagtgacgtccaccatgctgggggtgttcagagaggatcccaaaacacgtgaagagtttcttaccctaattaggtct

SEQ ID NO: 13433 - DNA, 750 bp, synthetic construct
  misc_feature 1..750: note = source = /note="Description of Artificial Sequence: Synthetic coding sequence"
  source 1..750: mol_type = other DNA
atggaaaagggaccagtgagggctcccgctgagaaacctaggggggccaggtgttctaacggctttcctgagagggacccgccacgccctggccctagcagacccgcggaaaagccacctcgtccagaagccaagtctgcccaacctgccgacggatggaaaggggagagaccaaggtccgaggaggacaatgaactcaatctcccaaatctggccgcagcctacagttccatactgtccagccttggggaaaaccctcagaggcaaggattgctgaaaactccgtggagagcggcttccgccatgcagttcttcacgaagggttaccaggaaactatttctgacgtcttaaacgatgccatcttcgatgaagaccacgatgaaatggtcatcgtaaaagacatcgatatgtttagcatgtgtgagcaccatctggtcccattcgtcgggaaggtgcacattggttatttgcccaacaagcaggtactcggcctgtcaaagctagcaaggattgtggagatctactcgcggagactccaggtgcaggagaggcttaccaagcagatagccgttgccatcaccgaggctctgcgacctgccggagtaggcgttgtggtagaggcaacacacatgtgcatggtgatgcggggagtgcagaagatgaattccaagaccgtaacgtccactatgctgggcgtattcagagaggaccccaagacacgcgaagagtttcttactctcattagaagc

SEQ ID NO: 13434 - DNA, 750 bp, synthetic construct
  misc_feature 1..750: note = source = /note="Description of Artificial Sequence: Synthetic coding sequence"
  source 1..750: mol_type = other DNA
atggaaaagggtccggttagagcgccggctgaaaagccacgtggtgctagatgcagcaatggttttccggagcgtgatcctccgcgaccgggtccctcacgcccagccgaaaaaccaccgagacctgaggcgaaatcagcacaaccggcggatggttggaaaggcgaaagaccgcggagtgaagaagataatgaactgaatctccctaacttagccgcagcatatagcagtatcttgtctagcttaggtgaaaacccgcaaagacagggcctattgaaaacaccgtggcgcgctgcgagcgccatgcagttttttacgaaaggataccaggagacaatatctgatgtactgaacgacgcgatcttcgatgaggatcatgacgaaatggttatagtgaaagatattgatatgttctcgatgtgtgagcatcatcttgtgccgttcgttggcaaggtgcatataggctacctgccgaataaacaagtactgggtctaagcaaactggcccggatagtagaaatctacagtagacggcttcaggttcaagagcgtctgacaaagcaaatcgccgtggcgattacggaagctctcagacccgccggggttggagtggtggtagaggcaacgcatatgtgcatggtgatgagaggagtccagaaaatgaattctaagacagtgacatccaccatgcttggagtttttcgcgaggatccaaaaacgcgtgaggaatttctcacattgattcgttcc

SEQ ID NO: 13435 - DNA, 750 bp, synthetic construct
  misc_feature 1..750: note = source = /note="Description of Artificial Sequence: Synthetic coding sequence"
  source 1..750: mol_type = other DNA
atggagaagggccccgtgcgcgcccccgccgagaaaccaaggggagcccggtgctcgaacggatttccggagagggatccgccgcgtccaggcccgagtcgccctgccgagaagccaccgcgcccagaggccaaaagcgcccagcctgccgatggctggaagggtgagcgcccgcgctccgaggaggataatgaactgaacctgcccaatctggcggctgcctactccagcattctctcgagtcttggcgagaacccccagcgacagggcctgctcaagacaccctggcgcgccgcctccgccatgcaattcttcacgaaaggataccaggagacaattagtgacgttctcaacgacgcgatctttgacgaggatcacgacgagatggtaattgtcaaggacatcgatatgttttcaatgtgtgagcaccacctcgttccattcgtgggcaaggtgcatattggctatttgcccaacaagcaggtgctcggacttagcaagctggctcgtattgtggagatttacagtcgtcgtctgcaagttcaggagaggctgacaaagcagattgcagtcgcgattaccgaggccctgcgcccggccggagtgggagtggtggtcgaggctactcacatgtgcatggtgatgcgaggcgtgcagaagatgaacagcaagacggtcacttccactatgctgggagttttccgcgaagatcctaagacgcgcgaggagttcctgaccctcattcgatcg

SEQ ID NO: 13436 - DNA, 750 bp, synthetic construct
  misc_feature 1..750: note = source = /note="Description of Artificial Sequence: Synthetic coding sequence"
  source 1..750: mol_type = other DNA
atggagaagggaccggtgagggcgcccgcggaaaagccccggggtgcacgatgctctaacggtttccctgaacgagatccacctcggccgggcccctcgcggcctgccgagaagcccccgaggcctgaggccaagagcgcccagccagcggatggatggaagggagaaagaccacgcagcgaagaggacaatgaactgaatcttcccaacctcgcggcagcatactcgagcatcctgtcctcactcggagaaaaccctcaaagacaagggctgctgaaaaccccatggcgcgccgcgtcggcaatgcagttctttaccaagggataccaggagactatttccgatgtgctcaacgatgcaatattcgacgaggatcatgacgaaatggtgattgttaaggatatcgacatgttttcgatgtgtgaacatcatttggtcccattcgtgggtaaggtccacatcggatacctccctaacaaacaggtgctggggctgagcaagctcgcccgcatcgtggaaatctactcgcgaaggcttcaggtgcaggaacgacttaccaagcaaatcgcagtggccattaccgaggctctgcgccctgcaggagtgggtgtggtcgtcgaggccacccatatgtgtatggtgatgcgcggagtgcaaaagatgaacagcaagactgtcacctcaactatgcttggagtctttagggaagatcctaagaccagagaagaatttcttaccttgatacgatcc

SEQ ID NO: 13437 - DNA, 750 bp, synthetic construct
  misc_feature 1..750: note = source = /note="Description of Artificial Sequence: Synthetic coding sequence"
  source 1..750: mol_type = other DNA
atggaaaagggaccggtgagagctcccgccgaaaagccacgcggcgcgaggtgctccaacggttttcccgaacgggatcctccacgacccggcccctctcgtcctgctgagaagcccccaaggccagaggcaaagagtgcacagccagccgacggatggaagggtgagcgaccgcgatctgaggaggacaacgaactgaatctgcccaatctggcagcagcctactctagtatactcagctcactgggggaaaatcctcagaggcagggcctgttgaaaactccatggagggctgcttcagcaatgcagttttttactaagggctatcaggaaaccatctccgatgtgctgaatgacgcgatcttcgatgaggatcatgatgagatggtgatcgtgaaggacatcgacatgttcagcatgtgtgaacatcaccttgtaccctttgtggggaaagtgcatattggttacctccccaataagcaggtacttggtttatctaaactcgcccggattgttgagatctattcccggcggctgcaggtgcaggagcgtttaactaagcagattgccgtggcaattactgaagcacttagacctgctggagtcggagtcgtcgtggaggcaactcacatgtgcatggtcatgagaggagtgcagaagatgaattctaagacagtgacctctaccatgttaggagtgttcagggaagatcccaaaacacgagaagaattcctcaccctcataagaagc

SEQ ID NO: 13438 - DNA, 750 bp, synthetic construct
  misc_feature 1..750: note = source = /note="Description of Artificial Sequence: Synthetic coding sequence"
  source 1..750: mol_type = other DNA
atggaaaagggccccgtgagagcgccagctgaaaaacccagaggagccaggtgttctaacggattccccgagcgcgacccccctcggccagggccttccaggcctgcagagaagcccccgcggcccgaggccaaatctgcacagcccgctgacgggtggaagggcgagcgacctagaagcgaggaggataacgagctcaacctgcctaatctcgccgccgcttactccagcattctctctagcctgggtgaaaacccacagcgccagggtctgctgaaaactccttggagagccgcctccgcaatgcagttttttacaaaaggctatcaggaaacaatttccgacgtgctgaacgatgctatcttcgatgaggaccatgatgagatggttatcgtgaaggacattgatatgttcagcatgtgtgaacaccatttggtgccttttgtaggaaaggtgcacatcggctatctccccaataaacaggtgctcgggctgagcaagctggcgaggatcgtcgagatatatagccggaggctccaggtgcaagaacgcctgacgaagcagatcgccgtggctattaccgaggcattgagaccggctggcgtgggagttgtcgtggaggccacccatatgtgcatggtgatgcgcggagtccaaaaaatgaattctaaaacagtcacatctactatgctcggagtgtttagggaagacccaaaaacgagggaagagtttctgacactcatcagaagc

SEQ ID NO: 13439 - DNA, 750 bp, synthetic construct
  misc_feature 1..750: note = source = /note="Description of Artificial Sequence: Synthetic coding sequence"
  source 1..750: mol_type = other DNA
atggaaaaggggccggtgagagctcctgccgaaaaaccgcgcggcgcgcggtgctccaacggattccccgagcgtgatccaccgaggccaggcccgtcgcggccagccgaaaagccaccgcggcccgaggccaagtcggcccaaccagccgacggatggaaaggagaacgccctagatccgaagaggacaatgaactgaacctgccgaaccttgccgcggcatattcctccatcctctcgtccctcggagaaaacccgcaacgccagggcctgctgaaaactccgtggagggcagcttcggcaatgcagttctttacgaaaggataccaagaaaccatctcggacgtgcttaatgatgctattttcgatgaggaccacgacgaaatggtgatcgtgaaggacattgacatgttttcgatgtgcgagcaccatttggtgccatttgtgggcaaggtccacatcggataccttccaaataagcaggttctcggtctgagcaagctcgcgcgaatcgttgagatttactcacgcagactccaggtgcaggagcggctcaccaagcagatcgcggtggccatcactgaggcccttagaccggctggagtgggagtggtcgttgaggcaacccacatgtgcatggttatgaggggggtgcagaaaatgaactcgaaaaccgtcacttctactatgctcggcgtgttccgcgaagatccaaagacccgggaggaattcctgactctcatccgcagc

SEQ ID NO: 13440 - DNA, 750 bp, synthetic construct
  misc_feature 1..750: note = source = /note="Description of Artificial Sequence: Synthetic coding sequence"
  source 1..750: mol_type = other DNA
atggaaaaggggccggtccgggccccagcggaaaaaccgcgtggtgctcgctgctctaacggcttcccggagcgcgacccacctcgcccgggtccgtcgaggccggccgaaaaaccaccgaggcccgaagctaagtcagcacaaccagcggacggatggaagggagagcggccacgaagcgaagaggacaatgagctgaacctgccgaatttggccgccgcctactcctcaatcctctcgtccctgggcgaaaaccctcaacgccagggactgctcaagactccctggagagcagcgtccgccatgcagttcttcaccaaggggtaccaggaaaccattagcgacgtgctcaacgatgccatcttcgacgaggatcacgatgagatggtcatcgtgaaggatatcgacatgtttagcatgtgcgaacatcacctggtgccattcgtgggaaaggtgcacatcggatacctgcctaataagcaagtcctgggcctgtcgaaacttgcacggatcgtggaaatctactcccggagactgcaagtccaggagcggttgacgaagcagatcgcggtggcaattactgaggcgcttcgccctgctggagtcggcgtggtcgttgaagccacccatatgtgtatggtgatgcggggagtgcagaagatgaacagcaaaactgtgacttcgaccatgctcggagtgtttagagaggacccgaaaactagagaagaattcctcaccctgatccgctca

SEQ ID NO: 13441 - DNA, 750 bp, synthetic construct
  misc_feature 1..750: note = source = /note="Description of Artificial Sequence: Synthetic coding sequence"
  source 1..750: mol_type = other DNA
atggaaaagggtcccgtcagagcaccagcagagaagcctaggggagccagatgttcaaacggatttccagaacgggatcctcctaggccaggtcccagcagaccagcggaaaagcctccccgtcccgaagcaaaatcagctcagccagccgatgggtggaagggagaaaggcccagaagcgaggaggacaacgaactgaacctcccaaacctggccgcagcgtactccagcattctttcctcgctgggcgagaacccccagaggcaagggcttctgaaaaccccatggcgtgccgcatcagccatgcaattcttcaccaagggataccaggaaactatttccgacgtgctcaacgatgcaatctttgatgaggaccacgacgagatggtgatcgtcaaggatattgatatgttttcgatgtgcgagcaccacctggtgcccttcgtgggcaaagtgcatatcggatacctcccaaataagcaggtgctgggcttgtcgaaacttgcaagaatcgtggaaatctacagcaggagactgcaagtgcaagaacgtttgactaagcaaatagcagtggccatcactgaggcccttcgtcctgcgggagtgggcgtggtcgtggaagccactcatatgtgcatggtgatgcggggagtccagaagatgaattcgaaaaccgtcacctcaactatgcttggagtgtttagagaggaccccaaaaccagagaagagtttctgacgctcattcgatcc

SEQ ID NO: 13442 - DNA, 750 bp, synthetic construct
  misc_feature 1..750: note = source = /note="Description of Artificial Sequence: Synthetic coding sequence"
  source 1..750: mol_type = other DNA
atggagaaaggccccgttagagcccctgcagaaaaacccaggggcgctcgctgctcaaacggctttcctgagagagatcccccaaggcccgggccatcgagaccggccgaaaaacccccacgcccggaggccaagtctgcccagcccgcagacggctggaagggagaacgtccacgaagtgaggaggacaacgagctgaacctgcccaacctggctgcagcctatagtagtatcttatccagtctcggcgaaaacccacagcggcagggcttgttgaagaccccatggcgggctgcatcagctatgcagttctttaccaaggggtaccaagaaactatcagtgatgtgctaaatgacgccatcttcgatgaggaccacgatgagatggtgatcgttaaggatatcgatatgtttagtatgtgcgagcatcatctcgtacctttcgtggggaaagtgcatatcggatacctacctaataagcaagttctcgggctaagcaagctggctcgaatcgtggaaatatactctcggagattgcaagtccaagaaagactaaccaagcagattgccgtggcaatcactgaagcgctacggccagcgggagtgggagtggtggttgaagccacccacatgtgcatggtaatgcgcggcgtgcagaaaatgaactccaagaccgtcacatctaccatgctgggtgtttttagagaggaccccaagactcgggaggagttccttacacttatacggagt

SEQ ID NO: 13443 - DNA, 750 bp, synthetic construct
  misc_feature 1..750: note = source = /note="Description of Artificial Sequence: Synthetic coding sequence"
  source 1..750: mol_type = other DNA
atggaaaaaggtccggttcgagcgccggcggaaaaaccgcgaggtgcgcgatgttcgaatggttttccggaacgagatccgccgcgtccgggtccgtcgcgtccggcggaaaaaccgccgcgtccggaagcgaaatcggcgcaaccggcggatggttggaaaggtgaacgaccgcgttcggaagaagataatgaactaaatttaccgaatctagcggcggcgtattcgtcgatactatcgtcgctaggtgaaaatccgcaacgacaaggtttattaaaaacgccgtggcgagcggcgtcggcgatgcaattttttacgaaaggttatcaagaaacgatatcggatgtattaaatgatgcgatatttgatgaagatcatgatgaaatggtaatagttaaagatatagatatgttttcgatgtgtgaacatcatttagttccgtttgtaggtaaagtacatataggttatttaccgaataaacaagtattaggtctatcgaaattagcgcgtatagtagaaatatattcgcgtcgattacaagtacaagaacgtctaacgaaacaaatagcggttgcgataacggaagcgttacgtccggcgggtgttggtgtagtagtagaagcgacgcatatgtgtatggtaatgcgtggtgtacaaaaaatgaattcgaaaacggtaacgtcgacgatgctaggtgtatttcgtgaagatccgaaaacgcgagaagaatttttaacgctaatacgatcg

SEQ ID NO: 13444 - DNA, 750 bp, synthetic construct
  misc_feature 1..750: note = source = /note="Description of Artificial Sequence: Synthetic coding sequence"
  source 1..750: mol_type = other DNA
atggaaaagggtccggtgcgggcgcctgctgaaaagccgaggggtgcaagatgctcaaatggattccctgagcgtgatccgccccgcccaggcccctcgcgcccggccgaaaaaccaccaagacctgaagccaaatccgcacagcctgccgacggatggaagggcgaacggcctagatcggaggaggataacgagttgaacctgcctaacctcgctgctgcttacagctccatcctgtcatccctcggcgaaaatccacagcgccagggactgctcaagacgccgtggcgggctgcgtcggcgatgcaattcttcaccaagggatatcaggaaactatctccgatgtgcttaatgacgccatcttcgacgaggatcacgacgaaatggtcattgtcaaggacattgatatgttcagcatgtgcgaacatcacttggtgcccttcgtcggaaaggtccatattgggtacctgcctaacaaacaggtgctggggctttcgaaactcgcccgcatcgtggagatctactcgcggaggctgcaagtgcaggagcggcttactaagcaaatagccgtggcgatcaccgaagccctgcgtccggcgggcgtgggagttgtggtggaagccactcacatgtgtatggtcatgcgaggtgtgcaaaagatgaacagcaagactgttaccagcaccatgttgggagtgtttcgagaggacccaaagactcgggaggagtttctcaccctgatccgatca

SEQ ID NO: 13445 - DNA, 750 bp, synthetic construct
  misc_feature 1..750: note = source = /note="Description of Artificial Sequence: Synthetic coding sequence"
  source 1..750: mol_type = other DNA
atggaaaagggtcccgtgagagcaccagccgaaaagcccagaggagcccgctgttccaacggctttcctgaacgagatcctccaagaccaggaccatccaggccagcagagaaacctcctcgccctgaagccaaatctgcacagcctgctgatggctggaaaggcgaacggcccaggtcggaagaggataacgagctgaaccttccaaaccttgccgcagcgtattccagcattctttccagcttgggagagaatcctcagcggcagggtctgctgaaaactccttggcgtgcagccagcgccatgcaattctttaccaaaggttaccaagagactatatcagacgtgcttaacgatgcgattttcgacgaggaccacgatgagatggtgattgtgaaggacattgacatgttcagcatgtgtgaacaccatttggtccctttcgtgggtaaggtgcatattgggtaccttcctaacaaacaagttcttggactttccaaacttgcccgcatcgtcgagatttactcaagacggctgcaagtgcaagagaggcttactaaacaaattgcggtggcaataaccgaagcactccgacctgccggtgtgggagtggtggtggaagcaacccacatgtgcatggttatgcgcggcgtccagaagatgaattctaagaccgtgacttcaaccatgcttggtgtgtttcgcgaagatccaaagaccagggaagaatttctcacgctgattcggtcc

SEQ ID NO: 13446 - DNA, 750 bp, synthetic construct
  misc_feature 1..750: note = source = /note="Description of Artificial Sequence: Synthetic coding sequence"
  source 1..750: mol_type = other DNA
atggaaaagggaccagtccgagctcctgccgaaaagccacgtggcgcaagatgcagcaatggctttcctgagagagatccgccccggcccgggccctcgcgcccagccgagaagccgccaaggccagaggctaagagtgcccagcccgctgatgggtggaagggcgagcggcctagaagtgaggaggataacgagctgaatctgccaaatttggccgctgcttacagcagtattctgtcctctctaggagagaacccacagcgccaaggcctgctgaaaactccttggagggcagcctcagctatgcagttcttcactaagggttaccaagaaaccatctccgacgtgctcaacgatgctatttttgatgaagatcacgacgaaatggttattgtcaaagacatcgacatgttcagcatgtgtgagcaccatctcgtccctttcgtgggaaaagtgcatattggttatcttcctaacaagcaggttctaggtctgtccaagctcgctcgtatagtggaaatctattctcggcgcctccaggttcaggagcgtctgactaaacaaatcgcagtggctattacggaggccttgagaccagctggcgtgggcgttgttgtggaggctacacacatgtgtatggtgatgcgcggcgtgcaaaagatgaatagcaaaacagtcacttctaccatgctgggagtctttcgcgaagaccccaagacacgggaggaatttttgaccctaattcgatcg

SEQ ID NO: 13447 - DNA, 750 bp, synthetic construct
  misc_feature 1..750: note = source = /note="Description of Artificial Sequence: Synthetic coding sequence"
  source 1..750: mol_type = other DNA
atggaaaagggaccagtgcgcgctccagccgagaaaccacggggagcaagatgcagtaatggattcccagaaagagatcctccaagacctggaccgtctcgaccggcggagaaaccacctcgaccagaagcaaagtccgctcagccagctgatgggtggaagggagaacgcccacgatcagaggaagacaacgagttgaacttaccaaacttggctgcagcatattcctcgattcttagttcgcttggagagaatccacagcggcaaggcctccttaagactccatggcgagcggctagtgcaatgcagtttttcactaagggatatcaagagacgatttctgatgttcttaacgatgcaatttttgatgaggatcacgatgaaatggtcatcgtgaaagacattgatatgttctccatgtgcgagcatcatctcgtgcctttcgtaggaaaagtgcatatcggatatcttcctaataaacaagttttaggactctcgaaactcgctcgcatagtagagatttactctcggagattacaagtacaagaaagacttactaagcaaatcgctgtcgctattactgaagctcttcgtccagcaggagtcggtgtggttgttgaggctacccatatgtgtatggtgatgagaggagttcaaaagatgaacagcaaaacagttaccagtactatgctcggtgtgttccgtgaagatccgaaaaccagagaagagttcctgacgttaatcagatca

SEQ ID NO: 13448 - DNA, 750 bp, synthetic construct
  misc_feature 1..750: note = source = /note="Description of Artificial Sequence: Synthetic coding sequence"
  source 1..750: mol_type = other DNA
atggagaagggaccggtgcgagcgccggcggaaaaaccacgcggggcccggtgcagcaacggatttcccgagcgcgaccccccgcggcctggtccgtcgaggcctgcagaaaagccccccagacccgaagctaaatccgcacaaccagccgacggatggaagggggagcgcccacgctcggaggaggacaatgaacttaacctgcctaacttggccgccgcgtattcttcgatcttgtcgagcctgggagagaatccacagaggcaaggcctccttaaaactccctggcgtgccgctagcgccatgcagttcttcaccaagggatatcaggaaaccatctcggacgtcctcaatgatgcaatcttcgatgaggatcatgacgagatggtgatcgtgaaagatattgacatgttctcaatgtgtgaacatcatctcgtgccatttgtcggaaaggtgcatatcggatacttgccaaacaaacaggtcctgggcctctcaaagctggcccggatcgtggagatttactcaaggagactgcaggtccaagagcggctgaccaaacagatcgccgtggccatcactgaagccctccgcccggcaggggtgggcgtggtggtcgaagctactcacatgtgcatggtaatgcgtggagtgcagaagatgaacagcaagactgtcacctcaaccatgcttggagttttccgcgaagatcctaaaactcgcgaagaattcctgacgctgatccgaagc

SEQ ID NO: 13449 - DNA, 750 bp, synthetic construct
  misc_feature 1..750: note = source = /note="Description of Artificial Sequence: Synthetic coding sequence"
  source 1..750: mol_type = other DNA
atggaaaaaggacctgtcagagcccctgccgaaaaacctcgaggggcgagatgttccaatggatttcccgaaagagatccaccaaggcctggaccaagtcgacccgccgaaaaaccccccaggccagaggctaaatccgcccagccagcagatggatggaaaggagaacgccctcgatcagaagaagataacgaattaaatcttcctaatcttgcagctgcctactcctcgatcctgtcttcactcggggaaaaccctcagaggcaggggctcctgaaaactccttggcgggctgccagtgcaatgcagttctttacaaaaggatatcaggaaacaataagtgatgtcctgaacgatgctatatttgatgaagatcacgatgaaatggtgatcgtaaaagacatcgatatgttctctatgtgtgaacatcatctcgtcccattcgtgggaaaagtgcatatcgggtatttacctaacaaacaggtattagggctcagtaaactcgctcgcatcgtggagatctattcccgtcgcttgcaggtccaggagcggctcactaaacagatcgctgtagctatcacagaagctctcagaccagcaggggttggagtagtcgtagaagccactcatatgtgtatggttatgcgaggggtgcagaaaatgaactcgaaaactgtgacatccactatgttaggggtattcagggaagatccaaaaactcgcgaggaattccttactctcatcagatca

SEQ ID NO: 13450 - DNA, 750 bp, synthetic construct
  misc_feature 1..750: note = source = /note="Description of Artificial Sequence: Synthetic coding sequence"
  source 1..750: mol_type = other DNA
atggagaagggaccggtgcgcgcgccggccgaaaagccgagaggggcgcgctgttccaacggcttcccagaaagagatccaccaagaccgggaccctctaggcctgcggaaaaaccaccacgcccggaagccaagtcggcacagccggcggacggctggaagggagaacgcccaagaagcgaggaagataatgagttgaacctgccgaaccttgccgccgcgtactcgtcaatcctctcgagcctgggagaaaacccccagagacagggactgttgaaaaccccgtggcgtgcggcatcggctatgcagtttttcactaaaggataccaagaaactatttcggacgttctgaatgatgccatctttgacgaagatcacgacgaaatggtcatcgtaaaggacatcgatatgttctcgatgtgcgaacatcaccttgtaccattcgtgggaaaggtgcacatcggttaccttcctaacaaacaggtgctgggtctgtcaaagctcgcaaggatcgtggagatctattccagacggctgcaagtgcaagagcgattgaccaaacagatcgccgtcgcgatcactgaggctctcaggccggccggagtcggtgtggtggtcgaagccactcatatgtgtatggtgatgcgcggggttcaaaagatgaattcgaaaactgtcacttccactatgctgggcgtgttccgggaggaccctaagactcgcgaagaattcctcaccctcattcgctca

SEQ ID NO: 13451 - DNA, 750 bp, synthetic construct
  misc_feature 1..750: note = source = /note="Description of Artificial Sequence: Synthetic coding sequence"
  source 1..750: mol_type = other DNA
atggaaaaggggccggttcgtgctcccgcagagaagccccgcggcgcgcgctgctccaatgggttcccggagcgagatccaccccgcccgggaccctcccgccccgccgagaagccgcctcgtccagaggctaagagcgcccagccagcggatggctggaagggtgaacgcccccgctccgaggaggacaacgagcttaacctgcccaacctcgctgctgcatattcctctatcctgtcttcgcttggtgagaacccccagcgacagggcctgctgaagacgccgtggagggctgcctcggctatgcaattcttcactaagggttaccaagagaccatctctgatgtccttaacgatgcgatctttgacgaagaccacgatgagatggttatcgtcaaggatatcgatatgttttctatgtgcgagcaccatctcgtccctttcgttgggaaggtgcatatcggttatctgccgaataagcaggtgttgggtctttcgaaattagcgcgcattgtcgagatctacagccgccggctgcaagttcaggagcgactcacgaagcagatcgccgtcgctatcacggaggccttgcgtccggccggtgtaggtgtcgtggtcgaggcaacccatatgtgcatggtcatgcgtggtgtgcagaagatgaactcgaagaccgtcacctctacgatgttgggcgtctttcgcgaggatccgaagacgcgtgaggagtttcttacccttattcgttct

SEQ ID NO: 13452 - DNA, 750 bp, synthetic construct
  misc_feature 1..750: note = source = /note="Description of Artificial Sequence: Synthetic coding sequence"
  source 1..750: mol_type = other DNA
atggaaaagggtcctgtgagggccccggcagagaaaccacggggagctagatgttccaacggattcccagagcgcgacccaccaagaccgggaccatcccggccggcagagaagcccccgcggccggaggcgaagtccgcacaaccggctgatggatggaaaggagaacgaccgagatctgaggaagataatgaactcaatctcccaaatttggccgcagcctactcatcgatactgagctcattgggtgagaacccgcagcgccaagggctcctcaagactccatggagagctgcaagcgcgatgcagttcttcacgaagggttatcaggaaaccatctcggatgtgctgaacgatgccatcttcgacgaagatcatgacgagatggttatcgtgaaggacattgatatgttctcgatgtgcgaacaccacctggtgcccttcgtgggcaaggtgcatatcggttacctcccaaacaagcaggtcctgggactctccaagctcgccaggatcgtggagatctactcacggcggctgcaagtgcaggagaggctgacgaaacagatcgctgtggctattaccgaagcccttagacccgccggcgtcggagtcgtggtggaagccacccacatgtgcatggtcatgcggggagtgcagaagatgaattcgaaaaccgtgactagcaccatgcttggggtgtttcgggaagatccaaagactcgcgaagagtttctgactctgatcagatcg

SEQ ID NO: 13453 - DNA, 750 bp, synthetic construct
  misc_feature 1..750: note = source = /note="Description of Artificial Sequence: Synthetic coding sequence"
  source 1..750: mol_type = other DNA
atggaaaagggtcctgtgagagccccagcagaaaagcctcgcggtgcgcgctgctcaaacggttttccagaaagagatccgccccgtccgggaccaagcagaccagcagagaagccacctagaccggaggcaaaatccgcgcagcctgcagatggatggaagggagaacgcccacgtagcgaagaggataacgagttgaacctcccaaatctggccgcagcctattcttcgatactgtcctcgcttggggaaaatcctcagcggcaaggccttcttaagaccccttggcgggctgcttcagccatgcagtttttcactaagggttaccaagagacgatctcagacgtgctgaacgatgccatttttgatgaagatcatgacgagatggtgatcgtgaaggacatcgacatgttttcgatgtgtgagcatcatcttgtgcctttcgtgggcaaggtgcacataggatacttgccgaacaagcaggtgcttggcctctccaagctggcgcgcattgtggagatctattcccgcagactgcaggtgcaggagcgactgaccaagcagatcgcagtggcaatcaccgaagcccttcgacctgctggcgtcggtgtcgtggttgaagcaactcatatgtgcatggtcatgaggggcgtgcaaaagatgaattccaagacggtcaccagcaccatgctcggagtctttcgtgaggatcctaagactagagaggaatttcttacccttatcagatcc

SEQ ID NO: 13454 - DNA, 750 bp, synthetic construct
  misc_feature 1..750: note = source = /note="Description of Artificial Sequence: Synthetic coding sequence"
  source 1..750: mol_type = other DNA
atggagaaaggaccagttagagcgccagccgaaaagcctcgcggtgcgcgctgctccaacggattcccggaacgagatccgcctaggccaggcccgagcagaccggctgagaagccccctagacccgaagccaagagtgcccagcctgcagatggatggaaaggcgaaagaccgaggtcggaagaggacaacgaactcaaccttcctaaccttgcggccgcctatagctcgatcttgagcagcctgggagaaaaccctcaacgtcaagggctgctgaaaactccatggcgggcggcttcggccatgcagttctttactaagggataccaggagacgatctcggatgtcctgaatgacgcgatctttgacgaggatcacgacgagatggtcatagtgaaggacatcgatatgttctcgatgtgtgaacatcatctggtgccattcgtggggaaggtgcacatcggctacctcccaaacaaacaagtcctcggactgtctaagctggcccgcatcgtagaaatctactcgaggcggctgcaggtgcaggaacggctcactaagcagattgcggtggcgatcactgaggcgctccgccctgcgggggtcggcgtcgtggtggaagccacccacatgtgcatggtcatgcgaggagtgcagaaaatgaattcaaagactgttacctcaaccatgctgggagtgttccgggaggaccctaagacgagagaggaattcctgaccttgattcgctcg

SEQ ID NO: 13455 - DNA, 750 bp, synthetic construct
  misc_feature 1..750: note = source = /note="Description of Artificial Sequence: Synthetic coding sequence"
  source 1..750: mol_type = other DNA
atggagaagggacccgtgagggctccggccgagaagcctaggggagcaagatgctcaaacggcttcccagagagggaccctccgcgcccagggccttcgcgcccagccgaaaagccaccgcgccctgaagcgaagtcggcccaacctgccgatggatggaagggcgaaagacctaggtcggaggaagataatgaacttaacctgccgaacctggccgccgcgtactcctcaatcctcagctcgctgggagaaaaccctcagcggcagggactccttaagaccccgtggcgggccgcatcggcgatgcagttctttactaagggataccaggaaactatctcggacgtcctcaacgatgccattttcgatgaggaccacgatgaaatggtaatcgtgaaagatatcgacatgttttcgatgtgtgagcaccatctggtgccattcgtgggaaaggtgcacatcggctacctcccgaacaagcaggtgctcggcttgagcaagctggcccggatcgtcgaaatctactcccgccgcctccaagtgcaagaacgcctgacgaagcaaattgcggtcgccatcaccgaggctctcagaccagcgggagtcggtgtcgtggtggaagctactcacatgtgcatggtgatgcggggggtgcagaagatgaactccaagactgtgacgtcaacgatgctgggggtgttcagagaggacccgaaaacgcgggaggaattcttgactcttatccgctca

SEQ ID NO: 13456 - DNA, 750 bp, synthetic construct
  misc_feature 1..750: note = source = /note="Description of Artificial Sequence: Synthetic coding sequence"
  source 1..750: mol_type = other DNA
atggaaaagggccccgtcagagccccagcggaaaaacctcgcggcgctaggtgcagcaacggatttccggagagggatcctcctcgcccaggccccagtcgcccggctgaaaaacctccccgccccgaggccaagagcgctcagcctgctgatggctggaagggagagaggcctaggtctgaggaagataacgagctcaatctcccaaatttggctgcagcctattccagcattttgtctagcctgggcgagaacccacagaggcagggcctgttgaagactccctggagagcggcgagcgccatgcagttctttactaagggatatcaggaaactatcagcgacgttcttaatgatgccatttttgatgaagaccatgacgagatggtgatcgtgaaggatattgacatgttcagcatgtgtgaacaccacttggtccccttcgtaggcaaggttcatattggatatctgccaaacaagcaggtgctgggcctctcaaaactggcccgcatcgtggagatatactctagacgcctgcaggtgcaagaacgcctgactaagcagattgccgtggcaataacggaagctctccgccccgctggtgtcggagtggttgtcgaggccactcacatgtgtatggtcatgagaggagttcagaaaatgaacagtaaaactgtgacttccacgatgcttggcgtttttagagaagaccctaagacacgcgaggagttcctcaccctgatccgctca

SEQ ID NO: 13457 - DNA, 750 bp, synthetic construct
  misc_feature 1..750: note = source = /note="Description of Artificial Sequence: Synthetic coding sequence"
  source 1..750: mol_type = other DNA
atggaaaaaggccccgtccgtgcgcctgccgaaaagccccggggagcacgttgtagcaacggttttccagagagagatccgcctagaccaggacctagcagacctgccgaaaaacctccccgccccgaggcaaagagcgctcaaccagccgatggatggaaaggtgaacggcctaggtcggaagaagataacgagttgaatcttcccaatcttgcggcagcctattcgagcatcctgtccagcctgggcgagaaccctcaaaggcaaggattgcttaagaccccctggcgggccgcatcagcaatgcaattctttacgaagggctaccaggaaacgatttctgacgtgctcaatgatgcaatattcgacgaagatcatgacgaaatggtgattgtgaaggatattgatatgttctcgatgtgtgaacaccatcttgtgccttttgtgggcaaagtgcacattggatacctgccaaacaagcaggtgctcggactgtccaaacttgcgaggatcgtggagatttactcgcgcaggcttcaggtgcaggaacgcctgaccaagcagattgccgtggcaatcacggaagcactgcgaccagccggggtcggggtcgtggtggaggcgacccatatgtgcatggtgatgagaggtgtgcagaagatgaattccaagactgtcacttccactatgctgggcgtctttagagaggaccctaagactcgcgaggaatttctgacgctcattagatcc

SEQ ID NO: 13458 - DNA, 750 bp, synthetic construct
  misc_feature 1..750: note = source = /note="Description of Artificial Sequence: Synthetic coding sequence"
  source 1..750: mol_type = other DNA
atggaaaagggtccagtccgtgcgcccgctgagaaaccaaggggggctcgatgttcgaatggattcccagagcgggacccaccacggccaggccccagcaggccagccgaaaaacctcccaggccggaggccaagagcgcccagccagcggacggttggaagggggaacggccaagaagcgaggaagacaacgaactgaatttgccaaacctggctgccgcctactcatccattctgagcagcctgggggaaaatccgcagagacaaggcttgttgaaaacaccgtggcgggcagcctctgcgatgcagtttttcacgaagggttaccaggagaccatctccgacgtcctgaacgacgccatttttgacgaagaccacgacgagatggtcattgtgaaagatattgacatgttcagcatgtgcgagcaccacctagtgcccttcgtcgggaaggtacacatcggctacctgccaaacaagcaggtattgggactttctaaacttgccaggatcgtggaaatatattctcgcagattgcaggtgcaggaaagactgacaaagcaaattgccgtggcaataacagaggctctgcgccctgcaggagttggcgtcgttgtggaggccacccatatgtgtatggtaatgcgcggggttcagaagatgaacagtaaaactgttacgtccactatgctgggagtgttccgtgaggaccccaagacacgggaagaatttttgacactcatcagaagc

SEQ ID NO: 13459 - DNA, 750 bp, synthetic construct
  misc_feature 1..750: note = source = /note="Description of Artificial Sequence: Synthetic coding sequence"
  source 1..750: mol_type = other DNA
atggagaagggtcctgtgagagcaccagcggaaaagcctcgaggagcacgctgctccaatggttttcccgagcgagatcctccgaggccagggccatccagacctgccgaaaaaccgccgaggccggaagcaaagtcggcccagccggctgatggctggaagggtgaaagacctcgctctgaagaagataacgaacttaaccttcccaacctggcggccgcatactcgagcattctgtcgtctctcggagagaacccccaacgccaagggctccttaagaccccctggcgagccgcatcagctatgcagtttttcactaagggttaccaagagactataagcgatgtcctgaacgatgccattttcgatgaggaccatgacgagatggtcattgtcaaagacatcgatatgttctccatgtgtgaacatcacctggtcccttttgtggggaaggtccatattggatacctgcccaacaaacaggtgctgggtcttagcaaacttgcaagaattgtcgagatttacagccgtagactccaggtgcaggagcgccttacgaagcaaattgcagtcgcgatcaccgaagcacttaggccagccggagtcggtgtggtggtcgaagccactcacatgtgtatggtgatgagaggtgtgcaaaagatgaacagcaagaccgtgacgagcacgatgttgggagtgttcagagaggatccaaaaactcgggaggagttcctgaccctgatccgttcg

SEQ ID NO: 13460 - DNA, 750 bp, synthetic construct
  misc_feature 1..750: note = source = /note="Description of Artificial Sequence: Synthetic coding sequence"
  source 1..750: mol_type = other DNA
atggaaaagggaccagttagagcaccagctgaaaaaccaagaggagcaagatgtagtaatggattccctgaaagagatccacctaggcctggtccatcaagaccagctgaaaaacctccaagacctgaagctaaatcagctcaaccagcagatggatggaagggagaacgtccaaggtctgaagaagataatgaattaaatttaccaaatcttgctgcagcatattcatctattcttagttcattaggagagaatccacagaggcaaggacttcttaaaacaccttggagagcagcatcagcaatgcaattttttacaaaaggatatcaagaaacaatttctgatgttcttaacgatgctattttcgatgaagatcatgatgagatggttattgtcaaagatattgacatgttttcaatgtgtgaacatcatttagtaccatttgttggaaaagttcatattggatatttaccaaacaaacaagttttaggtcttagtaaattagctcgtattgtggaaatttactctagaagactacaagttcaagaaagattaactaaacaaattgcagttgcaattactgaagcattgagacctgcaggagttggagtggtagttgaagcaactcatatgtgtatggtaatgcgaggagtacaaaaaatgaattcaaaaactgttacaagtacaatgttaggagttttcagagaggatccaaaaacccgagaagaattcttaactttaataagatca

SEQ ID NO: 13461 - DNA, 750 bp, synthetic construct
  misc_feature 1..750: note = source = /note="Description of Artificial Sequence: Synthetic coding sequence"
  source 1..750: mol_type = other DNA
atggaaaaaggaccagtaagagctcccgctgaaaagccccgaggggctaggtgttctaatggattccccgaaagagatccgcctcggcctgggccaagtcgacctgcagagaaacctcctcgccctgaggctaaatcagcccagccagcagatggatggaagggggaacgaccacgctcagaagaagataacgaactcaaccttccaaacctcgcagcagcatattcctcgatacttagttctctcggggagaatccacagagacaggggcttcttaaaactccatggcgggccgcatctgccatgcaattttttacgaagggatatcaggaaactatctccgatgttctaaacgatgccatttttgatgaagatcacgacgaaatggtgatcgtgaaagacatagacatgttttctatgtgtgaacaccacctcgtcccattcgtggggaaagtccacataggatatcttccaaataaacaggtgttggggctctcaaaattagctcggatagtagaaatctactctaggagattacaagtccaggaacggctaacaaaacagattgccgtcgcaataactgaagccctaaggccagctggggtaggagtggtagtagaagccactcatatgtgcatggtgatgaggggagtgcagaaaatgaattcaaaaactgtgacatctactatgctaggggtgtttagggaggatccaaaaacaagagaagaattcctcacactgatcagatct

SEQ ID NO: 13462 - DNA, 750 bp, synthetic construct
  misc_feature 1..750: note = source = /note="Description of Artificial Sequence: Synthetic coding sequence"
  source 1..750: mol_type = other DNA
atggagaagggccctgtgcgcgcacctgccgagaaaccccgcggagcaaggtgttctaacgggttcccagagagggaccctccccgcccggggccttcccgacctgccgaaaaaccgcctaggccagaggccaaatctgcccagcctgccgacggatggaaaggcgaaagaccgcgctctgaagaggacaacgaactgaatctaccaaatcttgccgctgcctactcgtccatcctctcgtctctaggagagaatccccagaggcaggggctgttaaagactccttggagggcagcaagtgcgatgcagtttttcaccaaggggtaccaagagacaatttcagatgttctaaatgacgccatctttgacgaggatcacgatgaaatggtgatcgttaaggacatcgacatgttttccatgtgtgagcatcacctcgtgcctttcgtgggaaaggttcacatcggatatctgcctaataagcaagtattagggctatctaagctagctaggatagtggaaatctactcgaggcgtctgcaggtgcaggaaaggcttaccaagcagatcgccgttgcgatcactgaagccctacgccccgcaggcgttggggtggtggttgaagccacacacatgtgcatggtgatgcgaggggtacagaagatgaattccaagaccgtcaccagtaccatgttgggggtgtttcgggaggaccctaagacacgtgaggaattcctcactctgatcaggtca

SEQ ID NO: 13463 - DNA, 750 bp, synthetic construct
  misc_feature 1..750: note = source = /note="Description of Artificial Sequence: Synthetic coding sequence"
  source 1..750: mol_type = other DNA
atggaaaaagggccagtgagggcccctgccgagaaaccacggggggcacgctgttctaacggtttcccagaacgcgatccccctcgacctggccctagtagaccagctgagaagccccctcggccagaggcaaaatccgcacagcctgctgacgggtggaaaggggagcggcctcggagcgaggaagacaacgaactgaatctaccaaacctggccgcagcatactctagcatactatctagcctaggagaaaaccctcagagacagggcctgctgaaaacaccctggagagctgcctccgctatgcagtttttcaccaagggttatcaggagaccatttccgatgtgctgaatgacgccatttttgacgaagatcatgatgagatggttattgtgaaggatattgacatgttcagcatgtgcgaacaccacctagtgccattcgtgggcaaggtgcacattggttacctacctaataagcaagtgctgggactctccaagctggcccgcatcgtggaaatctactcccgaaggctgcaggtgcaggagaggctcacaaagcagattgccgttgctattactgaagccctgcggcccgccggagtgggtgtcgtggtggaagccacacacatgtgcatggtcatgcgaggagtgcagaaaatgaacagcaagaccgtgactagcaccatgctgggcgtgtttagagaagatcctaagacacgcgaggaattcttaaccttgattcggtcc

SEQ ID NO: 13464 - DNA, 750 bp, synthetic construct
  misc_feature 1..750: note = source = /note="Description of Artificial Sequence: Synthetic coding sequence"
  source 1..750: mol_type = other DNA
atggagaaaggcccggtgagagcacccgctgaaaaaccgaggggagcacggtgctctaacgggtttcccgagagggatccccctaggcccggacccagcagacctgcggagaagccccctcgccccgaggcgaagtctgcccagcctgcagatggttggaagggggaacggccgcggagcgaggaggataacgagctgaatttacctaacctagccgcagcatattcctcaatactttcctctctgggagagaatccacagcgccagggtctactcaaaacgccctggcgggctgcttcagctatgcagttctttaccaagggttatcaggagaccattagtgacgtcctaaacgacgccatttttgatgaggaccatgatgaaatggttatcgtcaaggacattgatatgttttctatgtgtgaacaccatctggtccccttcgtgggcaaggtccatattggctacttgcccaacaaacaggtgctgggactcagcaaattagcacgaatcgtggagatctacagtagacggctgcaggttcaggagcggcttaccaaacagattgctgtggccataacggaggcattaaggcctgcaggtgttggcgttgttgtggaggccacacacatgtgtatggtgatgcgcggtgtccagaagatgaacagcaagacagtcacttcaacaatgctgggagtcttccgtgaggacccaaaaaccagagaggaatttcttactctcatccggtcg

SEQ ID NO: 13465 - DNA, 750 bp, synthetic construct
  misc_feature 1..750: note = source = /note="Description of Artificial Sequence: Synthetic coding sequence"
  source 1..750: mol_type = other DNA
atggagaagggccctgtgcgcgcgcctgcagaaaagcctcgtggagcaaggtgttcgaacgggtttcctgaacgagatccaccacgccctggaccatcaagaccagcagaaaagccaccaagacctgaggccaagagtgctcaaccagcggacggatggaagggggaaagacctcgctcggaagaagataatgaactcaatctccctaacctcgccgcagcatactcctcaatcctgagctcactgggtgaaaatccacaacgacaaggtctgcttaaaaccccctggcgggcagcgagcgcaatgcagttcttcactaaaggttaccaggaaactatttccgatgtcctgaatgacgcaatctttgatgaagatcatgatgagatggtgattgtgaaggatattgacatgttttccatgtgtgaacatcacctggtaccttttgtcggcaaagtgcatattggttacttgccgaataagcaggtccttggccttagcaagttggctcgcattgttgagatttacagccgccgactgcaggtccaggaaagactcactaagcagatagccgtcgccataactgaagccctgaggcctgccggggtcggtgtggtggtggaagctacccacatgtgcatggtcatgcggggggtgcagaagatgaattcgaaaaccgtgacttcaaccatgctgggtgtgtttagagaagatccaaagactagagaggaattccttacccttattcgttcg

SEQ ID NO: 13466 - DNA, 750 bp, synthetic construct
  misc_feature 1..750: note = source = /note="Description of Artificial Sequence: Synthetic coding sequence"
  source 1..750: mol_type = other DNA
atggaaaaaggacccgtcagagcccctgctgagaaacctcgcggtgcacgctgcagcaacggctttcccgagcgcgatcctcctagaccaggacccagccggcctgccgaaaagccacctaggccagaggcaaaaagcgcacaaccagctgacggctggaaaggcgagcgccccaggtctgaggaagacaacgaactgaacctgccaaaccttgcagccgcatatagcagcatcctctctagcttaggcgagaaccctcagaggcagggactccttaaaacaccttggcgtgctgcatccgctatgcagttttttacaaagggataccaggagaccatcagcgacgtgcttaacgacgccatttttgacgaagaccacgacgagatggtgatcgtcaaggacatcgacatgttttcaatgtgcgagcaccatctggttcctttcgtcgggaaggttcacattgggtacttgcccaacaaacaggtactgggcctgtctaagctggctcggatcgtggagatttatagtcgcaggcttcaagttcaagagagacttaccaaacaaattgcggtcgcgatcacagaagcactgcgtccagctggcgttggtgtggtggtggaagcaactcatatgtgcatggtgatgcgcggcgttcagaaaatgaacagcaagacagtgacctctaccatgttgggagtgtttagggaggatcccaagacaagggaagagttcctgactctgatcaggagt

SEQ ID NO: 13467 - DNA, 750 bp, synthetic construct
  misc_feature 1..750: note = source = /note="Description of Artificial Sequence: Synthetic coding sequence"
  source 1..750: mol_type = other DNA
atggagaaagggcccgtgcgagcaccagcggagaaaccccggggcgcgcgctgttccaatggcttcccagaaagagatcctccgcgcccgggtccttcgcggcctgccgaaaagccccctagacctgaggctaagtcggcccagcctgcggacggttggaagggagagcgtcctaggtccgaagaagataacgagttgaatttgccgaacctggctgccgcgtattcgtcaatcctgtcctcactgggagaaaatccgcaacgccaaggcctgctgaaaaccccatggcgcgctgcatcagccatgcagtttttcactaaagggtaccaggaaacgatctccgacgtcctgaacgacgcgatttttgatgaggaccatgatgaaatggtgattgtcaaggacatcgatatgtttagtatgtgcgaacatcacctggtcccatttgtgggaaaagtgcacatcggttacctgcccaacaagcaggttctcggactctcgaagctggctagaatcgtggaaatctactcgaggagacttcaagtccaggaaagactgaccaagcagatcgctgtggctataactgaggccctgcgccccgccggagtgggagtcgttgtggaggccactcacatgtgcatggtgatgcgcggagtgcagaagatgaactcaaagacggtgacctcgactatgctgggagtgttcagagaggatccaaagactcgggaagagttcctgactctgatccggtca

SEQ ID NO: 13468 - DNA, 750 bp, synthetic construct
  misc_feature 1..750: note = source = /note="Description of Artificial Sequence: Synthetic coding sequence"
  source 1..750: mol_type = other DNA
atggagaagggaccagtgagggcccccgcagagaaacctcgcggtgcaagatgtagcaacggatttccagaaagagatccgccaaggccgggtcctagcagacccgcagaaaagccgccccggcctgaagccaaatcggcccagcctgcagatggatggaagggtgagcggccgaggtccgaggaggataatgaactcaaccttccaaacctggcagcggcatactcctcaattctgtcgtcgctcggagaaaatccgcagcggcaaggacttctcaagacgccttggcgagccgccagcgcaatgcaattcttcactaagggttaccaggagactatctccgatgtgctcaatgacgcaatcttcgatgaggaccatgacgagatggtgatcgtcaaggacatagatatgttttcaatgtgcgagcatcacctcgttccttttgtgggaaaggtgcatatcggctacctccctaacaagcaagtgctgggtcttagcaaactggcaagaattgtcgaaatctacagcaggaggcttcaggtgcaggagcgcttgaccaaacaaatagccgtggcgatcaccgaagcgctgcggccagcaggagtgggagtcgtggtggaagcaacccacatgtgtatggtgatgcggggagtgcaaaagatgaactccaagacggtgacctcgactatgctcggggtctttagggaggaccctaaaactcgggaggaatttctgactctgattcggtcc

SEQ ID NO: 13469 - DNA, 750 bp, synthetic construct
  misc_feature 1..750: note = source = /note="Description of Artificial Sequence: Synthetic coding sequence"
  source 1..750: mol_type = other DNA
atggaaaagggccctgtacgggcacccgcagagaaaccgcggggagcacgatgcagtaatggtttccccgaacgagatcctcctagaccaggaccatcaaggccggccgaaaagcctccgcgccctgaggcgaagtcggcacagccagcagacggttggaagggggagcggccgcggagcgaagaggataacgaattgaacttgcccaaccttgcagcagcgtacagctccatactctcgtcgcttggagaaaacccacagaggcagggcttgcttaagaccccttggagggcagcatcagctatgcagttctttaccaaagggtaccaggagactatctccgatgtcctcaatgacgccatttttgatgaagatcacgatgagatggtgattgtgaaggacatcgacatgttttcgatgtgtgagcatcacctcgtgccctttgttggaaaggtccatataggttaccttcctaataagcaagtcctgggactgtccaaactcgcgagaattgtggaaatctatagcagaaggctgcaagtccaggaacgtcttaccaaacaaattgctgtggcgatcaccgaggcgcttcgccccgccggtgtgggcgtggtggttgaagcaacgcatatgtgtatggtcatgaggggagtgcaaaagatgaatagcaaaactgtgacttcgactatgctgggagttttcagagaagatccaaagacgcgagaggaatttctcaccctgattcgttca

SEQ ID NO: 13470 - DNA, 750 bp, synthetic construct
  misc_feature 1..750: note = source = /note="Description of Artificial Sequence: Synthetic coding sequence"
  source 1..750: mol_type = other DNA
atggaaaagggacctgtgcgggcaccagcagaaaagccacgcggagcgcgctgtagcaacggctttcctgaacgtgatcctcccagacctggtccgagtcggcctgccgaaaaacctcctagacccgaagccaaatcggcacaaccagcagacggctggaaaggtgaacggcccagatcggaggaggacaacgaattgaacctgcctaacctggcagcggcatacagctccatactgtcatccctcggagaaaacccgcaaaggcaagggctgttgaaaacgccttggcgagcagcaagcgcaatgcagttctttactaagggttaccaggagactatctcggatgtcctgaacgacgcgatctttgatgaagatcatgatgaaatggtgatcgtgaaggacatcgatatgttctccatgtgtgagcatcacctggtgcctttcgtgggaaaagtccatattggatacctccccaacaagcaagtgcttgggctctcaaagctcgccaggatcgtggagatttactcgagacgacttcaggtgcaggagcgccttacgaagcagattgccgtcgcaatcactgaagcacttcgaccggcaggagtgggagtggtcgtggaagcaactcatatgtgtatggtgatgcgtggtgtgcagaagatgaactcaaagactgtgacttcaaccatgcttggagtttttagagaggatcccaagactagagaggaattccttacgttgattagatcg

SEQ ID NO: 13471 - DNA, 750 bp, synthetic construct
  misc_feature 1..750: note = source = /note="Description of Artificial Sequence: Synthetic coding sequence"
  source 1..750: mol_type = other DNA
atggagaagggcccagtgagggccccagccgagaaacctaggggggcacgatgctccaacggcttccccgaaagagacccccctcggcctggtccctcaagacctgctgaaaagccccccaggcctgaagctaaatccgcccaacccgcagatggttggaagggagagaggcctagatccgaagaagataacgagctcaacctgcccaacctagccgcggcctactcaagtatcctgagctccctgggggagaacccacagcgccaggggctgctgaagacaccatggcgggctgccagtgcaatgcagttctttactaaggggtaccaggaaacgataagcgatgtgctgaatgatgcgatattcgacgaggaccacgacgagatggtgattgtgaaggatatcgacatgttctctatgtgcgaacatcacttagtgccttttgttggcaaagtgcacatcggctatttgcccaataaacaggtactcggcttgagtaagctggccaggatcgtcgagatttattctcggcgcctacaagttcaggagcgacttacaaagcagatagccgtcgctatcactgaggcactacgacctgcaggggtaggagtcgttgtggaagcgacacacatgtgcatggtgatgaggggggtacagaaaatgaattctaaaaccgttacgagtacaatgttgggcgttttcagagaggatccaaagactcgggaagagtttctgacccttattcgttca

SEQ ID NO: 13472 - DNA, 750 bp, synthetic construct
  misc_feature 1..750: note = source = /note="Description of Artificial Sequence: Synthetic coding sequence"
  source 1..750: mol_type = other DNA
atggaaaagggtccagtccgggccccagcggaaaaacctcggggcgcaaggtgtagcaacggtttcccggagcgcgacccgccgcggccagggccttctcgccccgccgagaagccgcctaggccagaggcaaagagcgcccagccggccgacggatggaagggggaacggccacggtcggaggaggacaacgagctcaacctcccgaacctggcagcagcgtactcgtctatcctgagctcccttggagagaacccacagcgccaaggactgctcaagaccccatggcgcgcggcctccgccatgcagttcttcaccaaggggtaccaggagactatctcggatgtgctgaatgatgcgatttttgatgaggaccacgacgaaatggtgatcgtgaaggacatcgatatgtttagcatgtgcgagcaccatctggtgcctttcgtcgggaaggtgcacatcggatacctccctaacaaacaagtcctgggactctccaagctggctcgaatcgtggaaatctactcacggcggctccaagtgcaagagagacttacgaagcagatcgcagtcgccatcaccgaagctctccggcctgcaggagtgggtgtggtggtcgaagctacccacatgtgcatggtcatgagaggagtccagaagatgaactcgaaaactgtgaccagcactatgttgggcgtctttagggaagatccgaaaacgcgggaggaattcctgaccctgatcagatcc

SEQ ID NO: 13473 - DNA, 750 bp, synthetic construct
  misc_feature 1..750: note = source = /note="Description of Artificial Sequence: Synthetic coding sequence"
  source 1..750: mol_type = other DNA
atggaaaaagggccggtgcgggcccctgccgaaaagccgcgcggagccaggtgtagcaatggtttcccagaacgggatccacccagacctgggccttccaggcccgccgagaagccgccaagaccggaggctaagagcgcgcagccggctgacggatggaagggagaacgccctagatcggaggaggacaatgaactgaacctgccgaatctggccgcagcctacagctcaatcctgagcagcttgggagaaaatccgcagaggcagggactccttaagactccgtggcgcgccgcatctgccatgcaattcttcaccaagggttaccaggaaaccatctccgatgtcctgaatgacgctatcttcgacgaagatcacgacgaaatggtgattgtgaaggatatcgacatgttctcgatgtgtgaacatcacctggtgccgttcgtgggaaaagtgcacattggatacctgccaaacaagcaggtcctgggactgtcgaagctcgcccgcatcgtcgaaatctactcccggcggctccaggtgcaagaacggttgactaagcagatcgcggtggccatcactgaagcacttaggcctgctggcgttggagtggtggtggaagcaacccacatgtgcatggtcatgagaggcgttcagaagatgaattcgaaaacggtgacctccactatgcttggagtctttcgcgaggaccctaagacgcgggaagagttccttaccctgatcaggtcg

SEQ ID NO: 13474 - DNA, 750 bp, synthetic construct
  misc_feature 1..750: note = source = /note="Description of Artificial Sequence: Synthetic coding sequence"
  source 1..750: mol_type = other DNA
atggagaagggccctgtacgcgcccccgcagagaaaccgcgcggggcaaggtgttctaatggtttcccagaaagagatccacctaggccaggaccatcccggcctgccgaaaagccaccgcgccctgaggccaaaagtgctcagccggcagacggctggaaaggcgagcgaccccgcagcgaagaagataacgaacttaatctgcctaacctggccgccgcctattcatctatactgagttctctgggggaaaaccctcagcggcagggactcctgaaaacgccttggcgcgccgcctccgccatgcagttcttcactaaggggtatcaagagaccatctcagacgtgcttaacgatgctatcttcgacgaagaccacgatgaaatggtgatagtgaaagacatcgacatgtttagtatgtgcgagcaccatcttgttcccttcgtcgggaaggttcacattggctacctgcccaataaacaagtgctgggcctgtctaaacttgccaggattgtggaaatttacagcaggaggttgcaggttcaggagcgcctgacaaagcagatcgcggtggctattaccgaagcgctgaggcccgccggggtgggagttgtagttgaggccacacacatgtgtatggtgatgcgcggggtccaaaaaatgaacagtaaaactgtgacctcaaccatgctcggcgtatttagagaggatccgaagactagggaggaatttctgacactcatccggtcc

SEQ ID NO: 13475 - DNA, 750 bp, synthetic construct
  misc_feature 1..750: note = source = /note="Description of Artificial Sequence: Synthetic coding sequence"
  source 1..750: mol_type = other DNA
atggaaaaagggcctgtcagagcccctgcagagaagccgcggggagcccggtgctcgaatggattcccagagcgcgacccaccgcgcccaggaccgtcccgcccggccgaaaagccgccacgccccgaagcgaagagcgctcagccggccgatgggtggaagggcgagcgcccacggtccgaagaagataatgagctcaacttgcccaacctcgccgcggcatactcgtcaattctctcatcgcttggagaaaacccacagcgccaaggcctcctgaaaacgccgtggcgggcagcatccgcaatgcagttcttcactaagggctaccaggaaaccatctcggacgtgctgaacgacgcgatcttcgatgaagaccatgatgaaatggtgatcgtgaaggacattgacatgttttcaatgtgcgagcaccatctggtgccattcgtcgggaaggtgcacattggatacctgccgaacaaacaggtgctcggattgtctaaacttgccaggatcgtggaaatctactcgcgacggctgcaagtccaagagagactgactaagcagattgccgttgccatcaccgaggctcttcgcccggccggcgtgggagtggtggtggaggcgacccacatgtgcatggtgatgcgcggagtgcagaagatgaattcgaagactgtcactagcactatgctcggagtgttccgcgaagaccctaaaacccgggaggaattcctgactctcatcagatca

SEQ ID NO: 13476 - DNA, 750 bp, synthetic construct
  misc_feature 1..750: note = source = /note="Description of Artificial Sequence: Synthetic coding sequence"
  source 1..750: mol_type = other DNA
atggaaaagggtcctgtgcgtgcccccgctgaaaagcctcgaggagctagatgcagtaatggcttccccgaacgagacccccctagaccaggcccgtctagacctgctgaaaagcctcctcgacctgaggccaagtcagcccagccagcggatgggtggaagggggagagacccaggagcgaggaagacaacgaactcaacctacctaatttggcggccgcttacagctcaatactgagctctttgggggaaaatcctcagaggcagggcctgctgaagacaccatggcgagcagcgagtgctatgcagtttttcactaaaggctaccaagagacaattagtgatgttttaaatgatgccatttttgacgaagaccatgatgagatggttatcgtgaaagatattgatatgttcagcatgtgcgaacaccacctggttccctttgtcggtaaagttcacattgggtatctcccgaacaaacaggtgctgggcctgtcgaagttggcgcgaatagtcgaaatttactcccggaggctccaggttcaagaacgacttacgaagcagatcgcagtggctatcactgaggccttgcgcccagctggcgtaggagtggtcgtggaagctacccacatgtgtatggtgatgcgtggcgttcagaaaatgaacagtaagacagtcacgagtaccatgctcggagtcttcagagaggaccccaaaaccagagaggaattcctgaccctgatccgatcc

SEQ ID NO: 13477 - DNA, 750 bp, synthetic construct
  misc_feature 1..750: note = source = /note="Description of Artificial Sequence: Synthetic coding sequence"
  source 1..750: mol_type = other DNA
atggagaagggaccagtccgagcgccggccgaaaagccgcggggcgcgagatgctccaatggattcccagaacgcgatccgccacggcctggcccatcaagaccggcagagaaaccaccccgccctgaggccaaatcggcccagccggccgatggctggaagggcgagcgcccgagatcggaggaggacaacgagctgaacttgccgaacctggccgcggcttacagctcgatcctgtcgtcgcttggggaaaaccctcagcggcaaggcctgcttaagactccttggagggcggcgtccgctatgcagttcttcactaagggataccaggagactatcagcgatgtgctcaatgatgcgatatttgacgaggaccatgatgagatggttatcgtgaaggacattgacatgtttagtatgtgcgaacatcacctggtgcccttcgtgggtaaagtccacatcggttacctgcccaataagcaggtgctgggcctcagcaagttggcgcgcatcgtggagatctactcccgcagactgcaggtgcaggaacgcctcacgaagcagatcgctgttgctattactgaagcccttcggcctgccggagtgggcgtggtggtggaggccacgcacatgtgtatggtgatgcgtggtgtgcaaaagatgaacagcaaaaccgtgacttctaccatgctgggagtgttccgagaagatcccaaaacccgagaagagttcttgactctcatcaggtcg

SEQ ID NO: 13478 - DNA, 750 bp, synthetic construct
  misc_feature 1..750: note = source = /note="Description of Artificial Sequence: Synthetic coding sequence"
  source 1..750: mol_type = other DNA
atggaaaaggggcccgtgcgggccccagccgaaaaaccgcgaggcgctagatgctcgaacggatttccagaacgcgatccaccgcggcctgggccatccagaccagctgagaaaccaccgcgccctgaggccaaatcggctcagccggccgacggatggaagggagagcgcccccggagcgaggaagataacgagctgaaccttccaaacctggcagcggcgtactcctcaatcctgtcgagcctgggcgaaaatccccagaggcagggactgctcaagaccccttggcgtgctgcatcagcgatgcaattctttaccaagggttaccaggaaactatctccgacgtgttgaatgacgccatcttcgacgaggatcacgatgagatggttattgtcaaggacattgatatgttcagcatgtgtgagcatcacctcgtgcccttcgtgggaaaggtgcatatagggtacttgccgaacaagcaggtcctcggcctctcaaagctggccaggatcgttgaaatctacagccggcgccttcaagtccaagaacgattgacgaagcaaatcgcggtggcaatcaccgaagcgctcaggcctgccggagtcggagtggtcgtcgaggctactcacatgtgcatggtgatgaggggggtgcagaagatgaattcgaaaactgtcacctcaactatgctgggtgtgttccgcgaggaccccaaaactcgcgaagagttccttactctgatacgctcg

SEQ ID NO: 13479 - DNA, 750 bp, synthetic construct
  misc_feature 1..750: note = source = /note="Description of Artificial Sequence: Synthetic coding sequence"
  source 1..750: mol_type = other DNA
atggaaaagggacccgttcgagctcccgctgagaaaccaagaggagccagatgcagtaacggattcccagagagagatccgcctagacctgggcctagcagacccgctgaaaaacccccaaggcctgaagcaaagtccgctcaacccgcggacggatggaagggcgaacgccccagaagtgaagaggataatgaactcaatctgcctaatctggccgcagcgtattcctctattctgtcatcgctcggcgagaatccccagcgacaaggcctgttgaaaaccccgtggcgggcagcttccgccatgcagtttttcactaaaggatatcaggaaaccatcagcgacgtgctgaatgacgccatattcgatgaagatcacgatgagatggtcatcgtgaaagatatagatatgttttcgatgtgcgagcatcatctggtcccttttgtggggaaagtgcacattggttatttgcctaataaacaggtgctgggcttaagtaaactggctcgaattgtggaaatctattcccggcgtctgcaagtgcaggagcgtcttacaaaacaaatcgctgtggcgataaccgaagcattgcgccctgccggagtgggcgtcgtggtggaagccacacacatgtgcatggtcatgcgcggagtgcagaagatgaattctaagaccgtcacaagcaccatgttgggtgtgtttagggaggacccgaaaacacgagaagaatttctgacactcatccgatct

SEQ ID NO: 13480 - DNA, 750 bp, synthetic construct
  misc_feature 1..750: note = source = /note="Description of Artificial Sequence: Synthetic coding sequence"
  source 1..750: mol_type = other DNA
atggagaaggggcctgttagggctccggctgaaaaaccacgaggagcgcggtgttccaatggcttccctgaaagagaccccccacggcctggcccatctagacccgccgagaagcctccacgtccggaggccaaatctgcccagcccgccgatggatggaagggcgagcgtcccaggtccgaggaggacaatgagctgaatcttcctaacctggctgcagcgtattcaagtatccttagcagtctgggggagaacccacagcgccaggggttgctgaagaccccgtggcgagcagcatcagctatgcaattcttcaccaagggctaccaggagacaatttctgacgttctcaatgacgccatttttgacgaagaccatgacgagatggtcatagtcaaggacatcgacatgttcagtatgtgcgagcaccatctggtgcccttcgtgggcaaggtccatattggatatcttccaaataagcaggttctgggcctatcaaaactcgcgcggatcgtcgagatttattctcggcggttacaggtccaggaaaggttaacgaagcagatagccgtagctattacagaggctttgcgccccgccggcgtcggggtggtcgttgaggctacccacatgtgtatggtaatgcggggtgtccagaaaatgaactccaagacagttaccagtaccatgcttggggtgtttcgagaagaccctaaaacgcgggaagagttcctgactttgattcgcagc

SEQ ID NO: 13481 - DNA, 750 bp, synthetic construct
  misc_feature 1..750: note = source = /note="Description of Artificial Sequence: Synthetic coding sequence"
  source 1..750: mol_type = other DNA
atggaaaagggccctgtcagagcgccagctgagaaaccacgcggagctcgatgcagcaacggattccctgagcgagacccaccacggcccggaccatcccggcctgctgagaagccccctcgccctgaagcaaagtctgcccaaccagctgatggctggaaaggagaaagacctaggtccgaagaggacaacgaactcaatctgcctaacctggccgcagcatactccagtatcctcagcagtcttggcgagaatccccagcgacagggtcttcttaagaccccctggcgcgctgcttcggcgatgcaattcttcaccaagggttatcaggaaacaatctccgatgttcttaacgacgccattttcgacgaggatcatgacgaaatggtgatagttaaggacatcgacatgttcagtatgtgcgagcatcaccttgtccctttcgtcggaaaggtccacatcgggtacctgcccaacaagcaggtcttgggactgtcgaaactcgcaaggatcgtggaaatatacagcagaaggcttcaagtgcaggagaggctgaccaagcagatagccgtggccataacagaagccctgcgcccagccggggtgggagtggtagtcgaggcaacgcatatgtgtatggtgatgcgtggcgtacagaagatgaattctaaaaccgtgacatcaaccatgctgggcgtattccgagaggatcccaagaccagagaggaatttctgacattgattcggagc

SEQ ID NO: 13482 - DNA, 750 bp, synthetic construct
  misc_feature 1..750: note = source = /note="Description of Artificial Sequence: Synthetic coding sequence"
  source 1..750: mol_type = other DNA
atggaaaaaggccctgtacgtgccccagccgagaaaccacggggggcgagatgttcaaacggattcccggaacgcgaccccccccgccccgggccgagtcgccctgcagagaaacccccgagaccagaagctaagagcgctcagcccgccgatggctggaagggtgaacgccctcggtctgaagaggacaacgagctaaatctgccaaacttggctgcagcttatagcagcatcttatctagcctcggcgaaaatccacagcgacaagggcttctaaagactccatggcgggcagcgtctgccatgcagttctttaccaaggggtaccaggagactatctctgatgtccttaacgatgctatttttgatgaagatcacgacgagatggtgatagtgaaagacattgatatgttcagtatgtgtgagcatcacctggttccctttgtgggaaaagtgcatattggatacttgcctaataaacaggtccttggtttgtccaagctggcgcggatagtggagatttactccaggagactccaggtgcaggaacgtttgactaaacaaatcgccgttgccatcacggaggcccttcgcccagccggggtgggagttgtggttgaagctactcacatgtgcatggtgatgaggggggttcagaaaatgaatagtaagactgttacaagcacgatgttgggggtgtttagagaggaccccaaaacacgtgaggagtttcttaccttaatcaggtcc

SEQ ID NO: 13483 - DNA, 750 bp, synthetic construct; identical to SEQ ID NO: 13479
  misc_feature 1..750: note = source = /note="Description of Artificial Sequence: Synthetic coding sequence"
  source 1..750: mol_type = other DNA

SEQ ID NO: 13484 - DNA, 750 bp, synthetic construct
  misc_feature 1..750: note = source = /note="Description of Artificial Sequence: Synthetic coding sequence"
  source 1..750: mol_type = other DNA
atggagaagggccccgtgcgcgcacccgctgagaaacctcgcggcgcacgatgttccaatggcttccctgagagagaccctccacgaccgggtccttctagacccgcagaaaaaccccctcgacccgaggcaaagtccgcacagccggccgacggctggaagggggagcggccccgtagcgaagaggacaatgagttgaacttgccaaacctggctgccgcctactcaagcatcctctccagtctgggggagaacccacaacgccaggggctcctgaaaaccccttggcgcgccgcttcagctatgcagttttttacgaaaggttaccaggagaccataagcgatgtactcaacgacgccattttcgatgaagaccatgacgaaatggtgatcgtaaaggacatcgacatgttctcaatgtgcgaacaccacttggtgccattcgtaggaaaggtgcatattggatacttgcctaacaagcaagttctgggactgtcgaagcttgctagaatcgtggaaatttactcccggcggctccaggtgcaggagcggctgacaaagcaaattgccgttgccatcacagaggcccttcgcccagctggggtgggtgtggtggtggaggccacacacatgtgtatggtgatgagaggagtgcagaagatgaactcaaagaccgtcaccagcaccatgctaggagtctttcgagaagaccctaaaactcgagaggagttcttgacgcttataagaagt

SEQ ID NO: 13485 - DNA, 750 bp, synthetic construct
  misc_feature 1..750: note = source = /note="Description of Artificial Sequence: Synthetic coding sequence"
  source 1..750: mol_type = other DNA
atggagaaaggcccagtccgcgcaccggcggagaagcctcgaggggctcgctgctccaacggattcccagagcgtgaccctccccgacctggacctagcagaccagccgagaagccacccagaccggaagcgaaatcagcgcagcccgcagatggatggaaaggagagcggccacgctccgaagaggataatgagttgaacctgcctaatttggcggcagcctactcgtccatactctcttctcttggggaaaaccctcaacgccaaggcctgcttaagaccccctggcgagcagcatcagcaatgcagtttttcactaagggttaccaggaaactatttcagacgtgcttaatgatgcaattttcgatgaggaccacgacgagatggtcatagtgaaggatatcgacatgttttcaatgtgtgaacaccatcttgttccctttgtgggcaaggtgcatatcggttacctcccaaacaagcaagtgctcggcctttccaaacttgcaagaattgttgaaatctactcaaggcgcctccaagtgcaggaacggctcacgaagcaaattgccgtggccattactgaggctcttaggccagcaggtgtgggggtcgtggtggaagcaacccatatgtgtatggtgatgcgtggcgtccagaagatgaactcgaaaacggtgacctctaccatgctgggtgtctttagagaagatccaaaaactcgggaagaatttctgacgctgataagaagc

SEQ ID NO: 13486 - DNA, 750 bp, synthetic construct
  misc_feature 1..750: note = source = /note="Description of Artificial Sequence: Synthetic coding sequence"
  source 1..750: mol_type = other DNA
atggagaagggaccagtgagagcccccgccgaaaagccgcggggagcacgctgttcgaatggtttccctgagcgcgaccctcctaggccaggacccagccggcccgcggagaagccgccacgcccagaggcaaagtcggcacaacctgcagatgggtggaagggggaacggccacgctccgaggaagataatgagctgaacttgcctaaccttgctgccgcctatagctcgattctctcctcccttggcgagaatccacaacgacaaggtttgcttaaaactccgtggcgtgccgcatccgcaatgcagttctttactaaaggatatcaggaaactattagcgacgtgctgaacgatgcgatatttgatgaagatcatgatgaaatggtcatcgttaaggatatcgatatgttttcaatgtgtgaacaccacctggtgccattcgttggcaaggtgcatattggatacctgccgaataagcaagtgctgggattgtcgaagctggcgagaattgtggaaatctattctcgcaggctccaggtgcaggaacgacttactaagcagatcgcagtggcaattaccgaagcacttagacctgccggggtcggtgtggtggtggaggcaacccacatgtgtatggtgatgcggggagtgcaaaagatgaactcaaagaccgtcacctcaactatgctgggagtctttagagaggaccctaagaccagggaagagttccttactctcattagatcc

SEQ ID NO: 13487 - DNA, 750 bp, synthetic construct
  misc_feature 1..750: note = source = /note="Description of Artificial Sequence: Synthetic coding sequence"
  source 1..750: mol_type = other DNA
atggaaaagggcccagtcagggcccctgccgagaagccgagaggggctagatgctcaaacggtttcccagagagggatcctccccggcccggaccaagcagaccagctgaaaaacctccacgacctgaggctaagagcgctcagcccgcagatggctggaagggagaaagacccagatctgaggaagacaacgaactgaacctgccaaacttggctgccgcttatagttcaatcctcagttccttgggcgagaatcctcaaagacaaggcctcctcaagactccatggcgtgcggcgtctgcaatgcagtttttcaccaaagggtatcaggagaccatctcagacgtgttgaacgatgctatcttcgatgaggatcacgacgaaatggtgattgtgaaagacatcgatatgttttccatgtgtgaacaccacttggtgccttttgttggaaaagtccatattggatacctccctaacaagcaagtcttagggcttagcaaattagcccgaatagtggaaatttattctagaaggctgcaagttcaagagaggttgaccaaacagatcgctgtagctatcacggaggcgctcaggcctgccggcgtgggggtggtcgtggaggcgacccatatgtgcatggtgatgaggggagttcaaaagatgaacagcaagaccgtcaccagtacgatgcttggagtcttcagagaggaccctaagactcgggaggagtttttaaccctgatccgatct

SEQ ID NO: 13488 - DNA, 750 bp, synthetic construct
  misc_feature 1..750: note = source = /note="Description of Artificial Sequence: Synthetic coding sequence"
  source 1..750: mol_type = other DNA
atggagaagggcccggtccgagcgcccgcagagaagccccggggggccagatgttcaaatggcttcccagagagggatcccccaaggcccgggcctagtcgaccggcggaaaaacccccaagacctgaggcgaagtctgcccagccagcggatggttggaaaggcgagcggcccagatccgaggaagacaacgagctgaacttgccaaacctagccgccgcctattcctcaattttatcaagtctaggagagaatcctcagcgtcagggactgttaaagacgccctggcgggcggcgagtgctatgcagttctttacgaaaggctaccaagagaccatcagcgacgtgttgaatgacgccattttcgacgaggatcatgacgagatggttattgtcaaggacatcgacatgttctccatgtgtgagcaccaccttgtaccatttgtgggcaaggtccacattggctaccttcccaacaaacaggtgttgggcctctccaaattggcccgtatcgtggaaatctactctaggcgactccaggtgcaggagaggctcactaagcagattgccgttgccatcacagaggcacttcggcctgctggcgtcggggttgtcgtagaggccacgcatatgtgtatggttatgcgcggcgtgcagaaaatgaattcgaagaccgtgacaagcactatgttgggggtgttccgtgaagacccgaagacccgcgaggagttcttgaccctgatccgtagc

SEQ ID NO: 13489 - DNA, 750 bp, synthetic construct
  misc_feature 1..750: note = source = /note="Description of Artificial Sequence: Synthetic coding sequence"
  source 1..750: mol_type = other DNA
atggaaaagggaccggtacgagcgccagcggaaaaacctcgtggagccaggtgttctaacggcttccctgagagagatcctcctagaccaggaccctcacggcctgcggagaagccaccaagacctgaggcgaagtcagcacagccggctgatggttggaagggggagcgccctcgcagtgaagaggacaacgagctgaaccttccaaacctggctgcggcttacagtagtattctttctagtttaggcgaaaaccctcagcgtcaaggattgctgaagacgccgtggcgggcagctagcgctatgcaattctttacaaagggctatcaggaaacaatctccgatgttcttaacgatgctattttcgacgaggatcatgacgaaatggtcatcgtcaaagacatcgatatgttcagcatgtgcgagcaccatctcgtgccgttcgtcggtaaagtgcatatcggatatcttcctaataagcaagttcttggtctttcaaaactcgcccggattgtggaaatctatagtagacgcctccaagtccaggaacgactcacaaagcaaatcgctgtcgcaataacagaggctctaagaccggcgggcgtcggagtcgttgtggaagcgacccatatgtgtatggtgatgcgcggcgttcaaaagatgaattccaagaccgtaacatcgactatgttgggtgtctttcgcgaggaccccaagacgcgcgaggagttcctcacactgattcgctca

SEQ ID NO: 13490 - DNA, 750 bp, synthetic construct
  misc_feature 1..750: note = source = /note="Description of Artificial Sequence: Synthetic coding sequence"
  source 1..750: mol_type = other DNA
atggagaagggaccggtgagggccccagcagagaagcctcggggcgcacggtgttcaaatggattccctgaaagggatcctccacgccctggcccatcaagacctgcagaaaaaccccctcgtccagaggcgaaatcagcacagccagctgatggttggaagggtgaaagaccacggtcagaagaggacaacgaactcaacttgcctaacctcgcagcagcatactcgtcaatcctgagctcactcggagagaatccacaacgtcaaggcttgcttaagactccctggcgcgcagcttccgccatgcagttctttactaagggataccaggaaaccattagcgacgtgctcaatgacgctattttcgacgaagatcacgatgaaatggtgatcgtgaaggatattgatatgttctccatgtgtgagcatcatctggtgcctttcgtgggaaaggtccatattggttacctccctaacaagcaggtccttgggctcagcaagctggcaaggatagtcgaaatctatagccggagattgcaggtgcaagaaagactgaccaagcaaatcgcagtggcaattaccgaagcacttcgacccgccggtgtgggtgtggtggtcgaagcaacccatatgtgtatggtgatgagaggagtccaaaagatgaattccaaaactgtgacgtcaactatgctgggagtgtttagggaagatcctaagactcgtgaggagttccttacccttatccgttcg

SEQ ID NO: 13491 - DNA, 750 bp, synthetic construct
  misc_feature 1..750: note = source = /note="Description of Artificial Sequence: Synthetic coding sequence"
  source 1..750: mol_type = other DNA
atggagaagggcccagtgcgggcacccgcagaaaagccgcgcggcgcccggtgtagcaacggatttcctgaacgggatcccccccggcctggacctagcaggcctgctgagaaaccacccaggccggaggcgaaaagcgcacagcccgctgacggttggaagggggagagacctagaagcgaggaagataatgagttgaatctgccaaatctcgccgcagcatacagctcgatcctgagctctctgggggagaacccccagagacaagggcttctgaaaacgccatggcgagccgcatctgcgatgcagttcttcacaaagggataccaggagaccattagtgacgtgctgaatgacgctattttcgatgaggaccatgacgagatggtgatcgtgaaggacattgatatgttttctatgtgtgagcatcacttggtcccgttcgtggggaaagtccacattggctatctgcccaacaaacaggttctgggtctatcaaaactcgcacggattgtggaaatatactcacgccgactacaagttcaagaacgtctgacgaagcagatcgccgtggccatcactgaggcattacggccagcaggagtgggcgtagtggttgaggccactcacatgtgtatggtgatgcgtggtgtgcaaaagatgaactccaagaccgtcacctctactatgctcggcgtctttagagaggatcctaaaacaagggaagagttcctcaccttgatccgctcc

SEQ ID NO: 13492 - DNA, 750 bp, synthetic construct
  misc_feature 1..750: note = source = /note="Description of Artificial Sequence: Synthetic coding sequence"
  source 1..750: mol_type = other DNA
atggagaaggggcccgtgcgtgcccccgcagaaaaacctagaggtgcaagatgttccaacgggttccccgagcgcgaccccccacgcccaggcccatcaagaccggccgaaaagccaccccgtcctgaggcaaagtcggcacaacctgcggacggttggaaaggcgaacgtcctaggtccgaagaagataacgagcttaacttgccaaaccttgctgcagcctactcttctatcctgagtagcctgggggagaaccctcaacggcaggggttgcttaagactccgtggcgagcagcatcagctatgcagttcttcaccaagggataccaggaaactatcagcgatgtgctgaatgacgcgatttttgatgaggaccatgatgaaatggtcattgtgaaggatattgacatgttttccatgtgcgaacaccatcttgtgccctttgttgggaaggtgcatattggttacctgccaaacaagcaggtgcttggactctcaaaactggctagaatcgtggagatttactcgcggcggctgcaggtccaagaacgtctgactaagcagattgcagtggcgatcacggaagcgctgcgcccggccggagtgggcgtggtggtggaagctacccatatgtgcatggtgatgcggggcgtgcagaaaatgaattccaagactgttacttccaccatgcttggtgtctttcgcgaggatcctaaaacgagagaagaatttcttactttgatccggagc

SEQ ID NO: 13493 - DNA, 750 bp, synthetic construct
  misc_feature 1..750: note = source = /note="Description of Artificial Sequence: Synthetic coding sequence"
  source 1..750: mol_type = other DNA
atggaaaaggggccggtgagagccccggccgaaaaacccagaggagcacgctgttcgaatggcttccccgaacgggacccgccgcgccccggtcctagccggccggccgagaaacccccgcgccccgaagccaagtcggcacagccagctgatggatggaagggagaacgaccccggagcgaggaagataatgagctgaatctcccaaatctggccgcagcctacagctcaattctcagctccctgggggagaatcctcagaggcaagggctcctgaaaaccccttggagggcagcctcggctatgcaattctttactaaaggataccaagaaaccatctcggacgtgctgaatgatgcgattttcgacgaggaccatgacgagatggtcatcgtgaaggacatcgacatgtttagcatgtgcgagcatcatctggtgcccttcgtgggaaaggtgcacatcggatacctgccaaacaagcaggtgctgggactgtccaagctggcgcgcatcgtcgaaatctattcccggagacttcaggtccaggaacgcctgactaagcagatcgcggtggccattaccgaagccctgcgcccagctggggtgggcgtggtggtggaggccacgcatatgtgcatggtgatgcgtggagtgcaaaagatgaactccaagactgttacctctaccatgctgggcgtctttcgggaagatccaaaaactcgggaagaattcctgaccctcatccgctcg

SEQ ID NO: 13494 - DNA, 750 bp, synthetic construct
  misc_feature 1..750: note = source = /note="Description of Artificial Sequence: Synthetic coding sequence"
  source 1..750: mol_type = other DNA
atggaaaaaggacccgtgcgcgcaccggccgagaagcctaggggcgctcggtgtagcaatgggttcccagaaagggatccacctcgccccggcccatcccggcccgccgagaagccgcccagacctgaagcaaagagcgcccaaccggccgatggatggaagggtgagcggccccgatccgaagaagacaatgagctgaatttgcccaacctcgccgccgcatattcctctatccttagctccttgggtgaaaaccctcaacggcaggggctactgaagacaccctggagagccgcctccgccatgcagttctttaccaagggttatcaagagactattagcgacgtgctgaatgatgccatttttgacgaggaccacgatgagatggtgattgtgaaggatatagacatgttcagcatgtgtgaacaccatctcgtgccatttgtgggtaaagtgcacattggatacctgccgaataagcaggtacttggtttaagcaagcttgctaggatcgtcgaaatctatagcagaagactccaggtccaagaaagactcacgaaacaaattgcagtggcaatcactgaggccttacgccctgcaggtgtaggggtcgtcgtggaagcaacacacatgtgtatggtcatgagaggcgtgcaaaagatgaacagcaagactgtcaccagtactatgttaggtgtgttccgtgaggaccccaagacacgggaagaattcttgacactgattcggagt

SEQ ID NO: 13495 - DNA, 750 bp, synthetic construct
  misc_feature 1..750: note = source = /note="Description of Artificial Sequence: Synthetic coding sequence"
  source 1..750: mol_type = other DNA
atggagaagggacctgtacgggctccagccgagaagccccggggtgcccgctgcagtaatgggttcccggagcgcgaccccccaagacccggacccagccgaccggcagagaaacctcccaggcccgaagccaagtctgctcagcccgccgatggttggaagggcgagcgacccaggtcagaagaggacaacgagctgaacttgcccaatcttgcagccgcttattcttctatcctgtcaagccttggggaaaatccgcagagacagggactactgaaaacaccctggcgggccgctagcgccatgcagttcttcacaaagggctaccaggaaaccatcagcgacgtattgaatgacgcaatttttgatgaagaccacgacgagatggtgattgtgaaagacattgatatgttctccatgtgtgagcatcacctcgttcctttcgtgggaaaagttcatataggatacttgccaaacaaacaagttctgggactgtccaagttggcgcgcatagttgagatttacagtcgtaggctgcaggtacaggaaaggcttacgaaacaaattgcggtggctatcactgaagccctgagacccgcaggcgtcggagtggtcgtggaagcaacccatatgtgcatggtcatgcggggcgtccagaagatgaatagtaagacggtgacgtccacaatgttgggagtgttccgcgaggacccgaagaccagagaggagttcctgactctgatccgcagc

SEQ ID NO: 13496 - DNA, 750 bp, synthetic construct
  misc_feature 1..750: note = source = /note="Description of Artificial Sequence: Synthetic coding sequence"
  source 1..750: mol_type = other DNA
atggagaagggtcccgtcagggccccagcagagaagccacgcggagcaagatgttcaaacggttttcctgagcgggatcctccccggccaggcccaagcagaccagccgagaagccacccagacccgaagcaaaatcggctcagccggcagatggttggaaaggagaaaggccacgaagcgaagaggacaacgagctgaacctgcccaaccttgctgccgcgtactcgtccatcctcagctcccttggagagaaccctcaacgccaaggccttcttaagacgccgtggagagcagcgtccgcaatgcagtttttcacgaagggctaccaggaaaccatttcggatgtgttgaacgatgccattttcgatgaggatcacgacgaaatggtcatagtgaaggacattgacatgttttcaatgtgtgagcaccatctcgtccctttcgtcgggaaagtccatattgggtaccttccgaataagcaggtgctcggtctttcaaaactggcccggatagtcgaaatctatagcaggcgtctgcaggtgcaagaaaggctcactaaacaaattgccgtggcaattaccgaagcgctccggccagccggggtgggtgttgtggtggaggccacccatatgtgtatggtgatgcgaggtgttcaaaagatgaactctaagactgtgaccagcacgatgcttggcgtctttagagaggatcctaagactcgggaggagtttctcactctcattaggtcg

SEQ ID NO: 13497 - DNA, 750 bp, synthetic construct
  misc_feature 1..750: note = source = /note="Description of Artificial Sequence: Synthetic coding sequence"
  source 1..750: mol_type = other DNA
atggagaaaggcccagtccgagccccagcagagaaacccaggggcgctcggtgtagcaacgggtttcccgaacgggaccctccgcggccaggtccttcacgccccgctgaaaagcccccccggccagaggctaagtccgcacagccagctgatggatggaagggagagagacctcgatccgaggaggacaacgaactgaatctacccaatttagctgcggcgtattcctccatcctttcttccctcggagaaaatcctcaacgtcagggcctgctcaaaactccatggcgcgcagcctccgccatgcagttcttcacaaaaggttaccaggagacaatctccgacgtcctgaatgacgccatcttcgacgaagaccatgatgagatggtaatagtgaaggacattgatatgttctccatgtgtgagcatcatctggtgccctttgtcggcaaagttcacatcggctatctgcctaataagcaggttctcggcctgtccaagctggctagaatcgtcgagatatattcacgccgcctgcaagtgcaggaacgcctgacaaaacagatcgctgttgccatcacggaggcactgagacctgccggtgtcggcgtagtggttgaagcgacgcatatgtgtatggtgatgaggggtgtgcaaaagatgaactctaaaacagttactagtaccatgctgggggtttttagagaagatccgaagacacgggaggaattcctcaccctcattcggtca

SEQ ID NO: 13498 - DNA, 750 bp, synthetic construct
  misc_feature 1..750: note = source = /note="Description of Artificial Sequence: Synthetic coding sequence"
  source 1..750: mol_type = other DNA
atggagaagggacccgttagggcccctgcagagaaaccaaggggcgccaggtgtagtaatggtttccctgagagggatccaccccgccccggcccttctaggccagccgagaagccaccaaggcccgaggctaaatccgctcagccagcagatggttggaaaggtgaaaggccacgcagtgaggaggacaacgaactgaacctgcctaaccttgccgcagcctatagcagtatcctttcctcattgggcgagaaccctcagcgtcaaggactgctcaagactccctggcgtgcagctagtgccatgcagtttttcaccaaaggctatcaggagaccatctctgacgtacttaacgacgctatcttcgacgaagaccatgatgagatggtaatcgtcaaagatatcgacatgttcagtatgtgtgagcaccatcttgtcccattcgttggtaaggtccacatcggttacctgcccaacaaacaggtgctgggtctgagcaagctcgctcgcattgtcgagatctattctcgtcgtctgcaggtgcaggagaggctgacaaaacagattgctgtagctataaccgaagccttgcgtcccgccggtgtaggtgtcgtggtggaggccacacatatgtgcatggtaatgaggggcgtgcagaaaatgaacagcaagacagttaccagcaccatgctgggcgtcttcagggaagacccaaaaaccagggaggagttcctgaccttgattaggtcc

SEQ ID NO: 13499 - DNA, 750 bp, synthetic construct
  misc_feature 1..750: note = source = /note="Description of Artificial Sequence: Synthetic coding sequence"
  source 1..750: mol_type = other DNA
atggaaaagggaccagttcgggcccccgctgaaaaacctcggggtgcccggtgctcaaatgggtttccagaacgcgatcctcccagaccggggcctagccgcccagcagagaaacctccgaggcccgaggccaagtctgcgcagccagccgatggctggaaaggcgaaaggcctcggtcagaggaggataatgagctcaatctccccaatctggccgccgcgtacagcagcattcttagctccctcggcgaaaatccccaacgccagggcctgctgaagacgccttggcgagccgcatcagcaatgcagttctttacaaaggggtatcaagagacaatttctgacgtactgaacgatgccatttttgacgaggaccacgatgagatggtgatcgttaaagacattgatatgttctctatgtgcgaacaccacctggtcccatttgttgggaaagtccacattggttaccttccgaataagcaggtgttaggactgtctaagctcgcaagaatcgtcgaaatctattccaggagactacaggtgcaagaacggctaaccaagcaaatcgccgtagcaatcacagaagcactccggcctgctggcgtgggcgtggtggtggaagctacacacatgtgcatggtgatgcgcggagtccagaaaatgaacagtaagactgtgacatcaacaatgctaggtgtttttagggaagacccaaaaactagggaggagtttcttacgcttattcgttcc

SEQ ID NO: 13500 - DNA, 750 bp, synthetic construct
  misc_feature 1..750: note = source = /note="Description of Artificial Sequence: Synthetic coding sequence"
  source 1..750: mol_type = other DNA
atggaaaaggggccagtgagggcgcccgctgaaaaacctaggggtgctagatgctcgaatggattccctgagcgcgatcctcctagaccgggaccaagtagaccagccgaaaaacctcctcgccctgaagctaaaagcgcgcaaccagctgatggttggaaaggtgagagaccccgttcagaggaagataatgaacttaacttacctaatctagcagccgcatacagttcaattttatcctccttgggtgaaaacccacagaggcaaggattgctcaagactccatggcgggcagcttctgcaatgcagttctttaccaaaggatatcaggaaactatttctgacgttttgaacgatgcgattttcgacgaagatcacgatgaaatggtgattgtaaaagatatcgacatgttctctatgtgtgagcatcatctggtaccatttgtcggcaaagtccacattggttacctccctaataagcaggtgttgggtctatcaaaattggcaaggatcgtggagatctattctagacgtctccaggtccaggagaggttaacgaagcagatcgcggtcgctattactgaagccttgcgtccagctggcgtgggtgtggtggtggaggctacccatatgtgtatggtaatgagaggagtgcaaaagatgaactctaagacagtgacttccactatgctaggagtttttagggaagatccgaagaccagggaagagttcctaactctgataagaagc

SEQ ID NO: 13501 - DNA, 750 bp, synthetic construct
  misc_feature 1..750: note = source = /note="Description of Artificial Sequence: Synthetic coding sequence"
  source 1..750: mol_type = other DNA
atggaaaagggaccggtacgcgcacccgccgaaaaaccccggggggcccgctgcagcaacggctttcctgaaagggatcctccacggccaggcccctcacgcccagctgagaaaccaccaagaccggaagctaagtcagcgcagcccgcggatggatggaagggcgagcgcccgcggtcggaagaggataatgaactgaacctgcccaacctggccgccgcctactcgtcaatcctcagcagcctcggagaaaatccgcaaagacaaggactcctcaagactccctggcgcgccgcttccgccatgcaattcttcacgaaggggtaccaagagactatctcagacgtcttgaacgacgcgatctttgacgaggaccatgacgagatggtgatcgtcaaggacatcgatatgttctcgatgtgcgaacaccatctggtgccgtttgtgggaaaggtgcacattggatatctgccaaacaaacaggtcctcggcctgtctaagttggccagaatcgtcgaaatctactcccggcggctccaagttcaggaaaggctcactaaacagatcgccgtggctattactgaagcactccggccagcgggcgtgggagtcgtggtggaggccacccatatgtgtatggttatgcggggagtgcagaaaatgaacagcaagaccgtgactagcaccatgctgggggtgtttcgcgaggacccaaagacccgggaggaatttctgactctcatccgaagc

SEQ ID NO: 13502 - DNA, 750 bp, synthetic construct
  misc_feature 1..750: note = source = /note="Description of Artificial Sequence: Synthetic coding sequence"
  source 1..750: mol_type = other DNA
atggagaagggacccgtccgcgctccggcagaaaaaccaagaggagcccggtgttccaacggattcccagaacgcgaccctccccggccgggcccgtcccgcccggccgaaaagcctcctagaccggaagctaagtcggcgcagcctgcggatggatggaagggagaaagaccgagaagcgaagaggataacgaactgaacctcccaaatctggcagccgcttactcttccatcctgtcgtccctgggcgaaaacccacaacggcaggggctgctcaagaccccatggagagccgcaagcgcaatgcagttctttactaagggatatcaagagactatctcggacgtgctgaacgatgcgatcttcgacgaggaccatgatgagatggtgatcgtgaaagacatagacatgttctcgatgtgtgaacatcacctggtgccattcgtcggaaaggtgcatatcggttacctcccaaacaagcaggtgctcgggctttcgaagctcgctcgcatcgtggagatttactccaggcggctgcaggtgcaggaaagactcaccaagcagatcgccgtggcgatcactgaggcactgcgccctgctggtgtgggagttgttgtggaagcgacccatatgtgcatggtgatgcgtggagtccagaaaatgaattcaaagaccgtcacctccaccatgctgggcgtgttcagggaggacccaaagacccgagaagaattccttacgcttattcgctcc

SEQ ID NO: 13503 - DNA, 750 bp, synthetic construct
  misc_feature 1..750: note = source = /note="Description of Artificial Sequence: Synthetic coding sequence"
  source 1..750: mol_type = other DNA
atggaaaaaggtccggtcagagctcctgccgagaaaccacggggagcacgttgttcaaacggattcccggagagggacccccctcgtccaggccctagtcggcctgcggagaagccgcctcggccggaagcgaaatccgcccagcccgcggatggctggaaaggggagaggccgcgttccgaagaggacaatgagttgaatctgccaaatttagccgctgcttactcttctatcctgtctagcctgggtgaaaatccccagcgtcagggattgctgaaaactccctggcgcgcagctagcgcgatgcaatttttcaccaagggctatcaagaaaccatttccgacgtgcttaacgatgcgatcttcgacgaggatcatgatgagatggtcattgtgaaggatatcgatatgttttcaatgtgcgagcaccatctggtgccatttgttgggaaggttcacatcggatatcttcccaataaacaggtgctgggtttatctaagttggcacgaatagtggaaatttactcccggagattacaagtccaggagaggttgacaaagcagatcgcagtggctatcacagaggccttgcggccagccggggttggggttgtcgttgaggccacgcacatgtgtatggtgatgaggggcgtccaaaaaatgaacagcaagacggttacatctaccatgttgggtgtgttccgggaagatccaaaaacccgagaggagtttttgacccttatccgatcg

SEQ ID NO: 13504 - DNA, 1278 bp, synthetic construct
  misc_feature 1..1278: note = source = /note="Description of Artificial Sequence: Synthetic coding sequence"
  source 1..1278: mol_type = other DNA
atgggagagccaggccagtctccctccccgcggagttcgcatggttcccctcctacattgagtacgctgacgttgctcctgttactctgtggccacgctcactctcagtgtaagatcctgagatgtaatgcagaatacgtcagcagcaccttgtccctgcgtggaggcggatcttccggcgcacttcgcggcggcgggggcggcggccgtggcgggggcgttgggtctggtggcctctgccgggcattgagatcttacgcattatgcactcgcaggactgcccgaacatgccgtggtgatctggcatttcattccgcggtccatggaattgaagacctgatgattcagcataattgtagccgccagggacctacggcccctcccccacctcgagggcccgctctccccggagcaggctctgggctacctgcccctgacccctgcgattatgaaggtcggttttctcgactccacggaagaccccctggatttcttcattgcgcctccttcggcgaccctcacgtacggtcctttcatcaccatttccatacttgtagagtacaaggcgcttggccattgctggataacgacttcctgttcgtccaggccacatcatctcctatggccttgggtgctaatgccacagctacgaggaagttgaccattatttttaagaatatgcaggagtgcatcgaccagaaagtgtatcaggccgaggtggataatttgccagtggcttttgaagacggcagcatcaacgggggagatcgacccggcggctccagccttagtattcagacggcaaatcccggaaaccacgttgagatacaagccgcatacatcgggaccacaataataattagacagactgccggacagttgagtttttcaattaaagtggcagaggatgtggcgatggctttttccgcagagcaggacttgcagctgtgtgtgggaggttgtcccccctcccagagactatctcggtccgaaaggaacagacggggagcaataacaatcgacacggccagaagactttgcaaagaggggcttccggttgaggatgcatactttcactcgtgcgtatttgatgttctcatctcaggggacccaaacttcaccgtcgcagcacaggcagcgcttgaagacgcacgggcatttttgccagatctagagaagctgcatctgttcccaagcgatgctggggtgccactcagttctgcgactttgttagcccctcttctctccggtttatttgtcctatggttgtgtatacag

SEQ ID NO: 13505 - DNA, 1278 bp, synthetic construct
  misc_feature 1..1278: note = source = /note="Description of Artificial Sequence: Synthetic coding sequence"
  source 1..1278: mol_type = other DNA
atgggagagcctggacagtcccctagcccgagatcatcccatggctctccgccgaccctttccacgctgaccctgctgctgctcttgtgtggacatgcccacagtcagtgcaagattctgagatgcaatgccgagtatgtgtcctcaacactgtctctcaggggggggggatctagcggtgcactcaggggaggggggggagggggcaggggtggcggcgtcggaagcgggggcctgtgcagggctctgagaagttatgccctgtgtaccaggcgcaccgcacgcacatgtcgcggggacctcgccttccactctgccgtgcatgggattgaggacctgatgattcagcacaactgcagccggcagggccctacagcacctccccctcccaggggacctgctctgcccggagcaggttctggccttcctgccccggatccctgtgactacgagggcagattttcaagacttcacggcagacctcctggatttctgcactgcgccagcttcggggaccctcacgtccggagtttccaccatcatttccacacatgccgggtccagggagcctggccgctgctcgataatgacttcctgtttgttcaggccacttcctcaccaatggctttgggtgctaacgccaccgccacaagaaagctgactattatttttaagaacatgcaggagtgcatagaccaaaaagtataccaggccgaggtcgacaacttgccggtggccttcgaagacggaagcatcaacgggggcgaccggcccgggggcagttcattgtccatccaaaccgccaaccccggcaaccatgttgaaattcaggccgcttatattgggacaacaatcattatccggcagacagccggtcagctttcctttagcatcaaagtggccgaggacgttgcaatggcattttctgccgaacaagaccttcagctttgcgtggggggatgcccaccctcacaacgcctgtcacggtctgagaggaacaggagaggggcaattactatcgacactgcacggaggttgtgcaaggagggcctccccgtggaggatgcctacttccatagctgtgtgttcgacgtgcttatcagcggtgacccaaattttaccgtcgccgcccaggctgccctggaagacgcccgcgcattcctgccagatctggagaaattgcatctgtttccgtctgacgcaggcgtgccgctgagctctgccaccttgctggcaccccttctgagcggactttttgttctctggctgtgtattcag

SEQ ID NO: 13506 - DNA, 1278 bp, synthetic construct
  misc_feature 1..1278: note = source = /note="Description of Artificial Sequence: Synthetic coding sequence"
  source 1..1278: mol_type = other DNA
atgggcgaacccggccagtcaccttcgccacgatcctcacacggctctccgcccacgttgagtacgttaaccctactgctactgctgtgtggacacgcgcactcgcagtgcaaaattctgcggtgcaacgctgagtacgtgtcgtccaccctttcactcaggggaggcggttcctctggagcgctgcgcggggggggaggaggcggcaggggaggaggcgtagggagcggcggtctttgtcgggccctgagaagttatgcactatgcacccggcggacggcgagaacctgccgaggagacctggccttccacagcgctgtccatgggatagaagacctgatgattcagcacaattgctcacggcaaggtccaacagcacctccccccccacggggtccggccctgcccggcgcagggtcagggctgccagctcctgatccatgcgactacgaagggaggtttagcaggttacacggacgtccaccaggatttcttcattgcgcaagttttggcgatccacacgtcaggtccttccatcaccattttcatacctgtagggtccagggggcctggccgcttctcgacaatgacttcctatttgtgcaggcaacctcatctcccatggcgttaggtgccaacgctaccgcgacacgtaagttgacaattatcttcaagaatatgcaggaatgtatagatcagaaggtttaccaagccgaagtcgataacctaccggtggcgtttgaagacggctctattaatggcggagaccggccaggcgggagctctctatcaatccagaccgctaacccgggtaaccacgttgagattcaggctgcctacatcggcacgacgattatcattaggcaaacagccggacagctgagcttcagcatcaaagtcgctgaggacgtggccatggctttttcagcggaacaggacctgcagctttgtgtgggcggatgtcccccttcacagcgcttaagccgatcagaaaggaacaggcgtggcgctataacaattgacaccgcccggcgtctgtgcaaagaggggcttcccgtagaggacgcatactttcactcatgcgtgtttgatgtgctgatctctggtgatcccaatttcacggttgctgctcaggctgcacttgaagatgccagggctttcctccccgacttggagaagctgcacctctttcctagcgatgctggggtgcccttgtcatctgccaccttgctcgctcctctcctttccggacttttcgttctctggctgtgcattcag

SEQ ID NO: 13507 - DNA, 1278 bp, synthetic construct
  misc_feature 1..1278: note = source = /note="Description of Artificial Sequence: Synthetic coding sequence"
  source 1..1278: mol_type = other DNA
atgggcgagccgggccagtccccgtccccacggagttcacacggtagcccgccgaccctgagcaccctgacgctgctgctactgttatgcgggcatgcccacagccaatgtaagatccttcgctgtaacgcggagtatgtttcatcaaccctctctcttagaggcggcggcagctctggtgcgttgcgtgggggcggcggtggcggccgcggtggcggcgttggaagcggagggctgtgccgcgcgctgcgtagctacgctctctgtacccgtcgaactgcgcgcacctgccgcggcgatttggccttccattccgctgtccacggcattgaggatctgatgatccagcataattgttctaggcagggtccgacggcccctccgcctcctagaggccctgctctgccgggcgctggtagcggactgccggcccctgatccatgtgactatgagggtcggttcagccgcttgcacggtcgcccgcctggttttcttcactgtgcaagcttcggggaccctcacgttcgctcgtttcatcaccacttccacacctgccgtgtccaaggtgcgtggcccctgctggacaacgacttcctgtttgtccaggcaacatcgagccctatggcgctgggcgcaaatgcgactgctacccgcaaactgaccattatcttcaagaatatgcaggagtgcatcgaccaaaaagtatatcaagccgaggtggataacctgccggtcgcatttgaagacggctcaattaatggtggcgatcgcccaggcggcagctccctgagcatccagactgccaaccctggcaatcacgtcgaaatccaggccgcttatattggcactacgataattattaggcaaacggcgggccaattgagcttctctattaaagttgccgaagatgtggctatggctttttcggcggagcaggacctccagctgtgcgtgggcggatgtcctccgagccagcgcctgtcccgcagcgaacgcaatcgtaggggtgctatcacaatcgacacagcaaggcgcctctgcaaggaaggtctgccagtggaggatgcctatttccacagctgcgtgtttgacgttctcatcagcggcgacccgaacttcaccgttgcggcacaagcagccctggaggatgcaagggctttcctgcccgatctcgagaaactccacctattcccaagcgatgccggcgtgccgctgagctcggctactctgctggcgccgttgctgagcggtctgtttgtgctgtggctgtgtatccag

SEQ ID NO: 13508 - DNA, 1278 bp, synthetic construct
  misc_feature 1..1278: note = source = /note="Description of Artificial Sequence: Synthetic coding sequence"
  source 1..1278: mol_type = other DNA
atgggggaacccggtcaaagcccctcccctcgttcctcacatggatctcctccaactctgtcaaccctcacgctgcttcttctgctttgcgggcacgcccactcacagtgtaagattctgcgctgtaatgcggaatacgtctcgtccactctctccttgcgtggcgggggttcctcgggagcacttcgcggaggaggagggggaggtcggggaggtggagtgggttcagggggactctgtagggccctgcgcagctacgcattgtgtaccagaagaaccgcaaggacttgtcggggagatctcgcctttcactcggcagtgcatggtatcgaagatttgatgatacaacacaactgttcgagacagggcccaactgcacctcctcctcccagaggcccagcactccctggggcaggaagcggactgcccgctcctgatccatgtgactacgaggggcggttcagccgccttcacggccggcctcctggttttcttcattgcgcgtccttcggggatccccatgtgcggtccttccatcatcactttcatacctgccgtgtccaaggcgcgtggcctttgctggacaatgacttccttttcgtacaggccacttcgtccccaatggcacttggtgcgaatgcaactgctacccgcaagctgactatcatctttaagaatatgcaagagtgcatcgaccaaaaggtgtaccaagcagaagtggataatctgcctgtggcattcgaagatggttccatcaacggcggcgaccgcccaggtggatccagcctttcgatccagaccgccaacccgggtaaccatgtcgagatccaggccgcctacattggaaccactatcatcattagacaaaccgcaggacaactttccttttcgattaaagtggctgaagatgtggcgatggctttttcggcggaacaagatctgcaactttgtgtgggagggtgccctccgtcacaacggctcagcagatcagaacgcaatagacgaggagcgattactatcgatacggctcgtcgcctttgtaaggagggattgcctgtggaggatgcatactttcattcgtgtgtgttcgatgtgctgatcagcggcgatccaaactttaccgtggcggcacaggcagcacttgaagatgcacgggcttttctcccagacctggaaaaacttcacctgttcccttcagacgctggggtgccactgtcctcggcgaccctcctggcgcctctccttagcggactcttcgtgttgtggctgtgcattcag

SEQ ID NO: 13509 - DNA, 1278 bp, synthetic construct
  misc_feature 1..1278: note = source = /note="Description of Artificial Sequence: Synthetic coding sequence"
  source 1..1278: mol_type = other DNA
atgggagaaccaggacaatcaccaagcccaagatcatcacatggaagtccaccaaccttatcaacactgactctattgttgttgttgtgcggacacgcacattcacaatgtaagatattgagatgtaatgcggaatatgtgtcctctactctttcacttaggggaggaggatcttcgggagcattgcgtggagggggggggggtggaaggggtggtggtgtgggatcgggaggactgtgccgggccctcagatcttacgcgttatgtactcgtcgcactgcccggacctgtcggggagacctcgcattccactcagcggtacacggaatagaagacttgatgattcaacacaattgctctcgacaaggaccgacggcgccgccaccgccacgcggaccagccctccctggagcaggttcgggactgccagctccggacccatgcgattacgagggacgtttctctcgactgcacggacgtcccccaggatttcttcactgtgctagctttggtgatccgcacgtgcggagttttcatcatcacttccatacttgcagagttcaaggagcgtggcctcttcttgacaatgattttttgttcgttcaggctacatcatctccaatggcactcggtgcaaatgcaacagctaccaggaaattgactattatttttaaaaatatgcaagaatgtatcgatcagaaagtgtatcaggcagaagttgacaatctcccagtggcgtttgaagatggatcaattaacggaggcgatcgacctggaggatcatctttaagtattcagaccgccaatccgggaaaccatgtagaaattcaggcggcttatatcggaaccactatcattatccgacaaactgctggtcaactttcgttcagcatcaaggtggctgaggacgttgcgatggctttttcggcggagcaggacttgcagttgtgcgttggggggtgtccaccaagtcaaagactcagccgatccgaaagaaatcgtaggggggccataacaatcgacaccgccagaaggttgtgtaaggaaggactcccagtggaagacgcatattttcattcctgtgtgtttgatgtattgatttccggtgatccgaatttcacagtggcggcccaagcagcactagaagatgctagggcgttccttccagatctagaaaaactccacctcttcccatcagacgctggagtgccactttcttcagcaacattgcttgcccctttgctgtccggcttattcgtcttatggctgtgcatccag

SEQ ID NO: 13510 - DNA, 1278 bp, synthetic construct
  misc_feature 1..1278: note = source = /note="Description of Artificial Sequence: Synthetic coding sequence"
  source 1..1278: mol_type = other DNA
atgggtgagccaggacaaagccctagcccccggtcgtcgcatggatccccacccactctgtccaccctcactctccttctgctgctttgtggacatgcgcactcgcaatgcaagattctgcggtgcaacgccgaatacgtgtctagcactctttctcttagaggaggtggctcctcgggtgcactcagaggcggcggaggtggtgggaggggaggaggtgtggggtcgggaggactctgtcgggcactgagatcatacgcgctgtgcactagaagaacggcccggacgtgtcgtggtgacctcgcctttcatagcgctgtgcatgggatcgaggatcttatgatccagcataactgtagtcgccagggcccaactgcacccccacctccgagaggcccagcactgcctggcgcagggagcggcctgcctgcgccggatccttgtgattacgaaggacgcttttcacggttgcacggccgtccgcctggcttcctgcattgcgcctcgtttggtgacccgcacgtcagatcgtttcatcatcatttccacacttgcagagtgcaaggagcttggcccttgcttgataatgacttcctctttgtacaagccacctcgtctccaatggcactgggtgcaaacgccaccgccacccgaaaacttaccatcattttcaagaacatgcaggaatgtatcgatcagaaagtgtatcaagcagaggtcgataatctgcctgtggcgtttgaagatggaagcattaatgggggagacagaccaggaggaagcagcctttcgattcagactgcgaatccaggtaaccacgtggaaattcaggcggcatacattgggaccactataatcataaggcagaccgcaggccagctcagcttttccattaaggtggcagaggacgttgcaatggcattcagcgcagaacaagatttgcagctttgcgtcggaggatgtcctccttctcaacggctctccagatcggagcgtaatcgacggggagcgattacgatagacactgcccgtaggctgtgtaaagagggccttccagtggaagatgcatactttcattcctgtgtgtttgacgttctgatctctggtgaccctaactttactgtggcagcccaagcggctctggaagatgccagggcttttctgcccgatctggaaaagctgcacttgtttccatctgatgcaggcgtgccactttcgtccgcaactctgctcgcacctctcctgtcaggcctgttcgtgctgtggctgtgcattcaa

SEQ ID NO: 13511 - DNA, 1278 bp, synthetic construct
  misc_feature 1..1278: note = source = /note="Description of Artificial Sequence: Synthetic coding sequence"
  source 1..1278: mol_type = other DNA
atgggggaaccagggcagtccccttctccccgctcttcacacgggagtccaccaaccctgtcgactctgacactcctgctcctgctgtgtggccatgcacacagccagtgcaaaatcttacgctgtaatgccgagtacgtttcctcaacactgtctctacgggggggcggctcctctggagccctgaggggaggcggaggcgggggccgtggggggggagtcggaagtggggggttatgccgagcactcaggtcttacgcgctttgcacgcgacgtaccgcacgaacgtgtcggggtgatttagcctttcacagtgccgttcacggtatcgaagacttgatgatccagcataactgtagcaggcagggccctaccgctccacctccacctagagggcccgccctgcctggggccggatctgggctcccagcaccggacccctgcgattatgagggaagattctcacggctgcacgggaggcccccaggctttttacattgcgcctcatttggggatccacatgtcagatctttccaccaccatttccatacctgccgtgtccaaggggcatggcccctgctggataatgattttctattcgtccaggctacatcttcgccaatggccctcggagcaaacgctactgccactcggaagctcacaatcatatttaagaacatgcaggaatgcatagaccagaaggtctatcaggcagaagtggataacctgcctgtcgcgtttgaggacggcagtataaatgggggcgaccgcccgggcgggagttcactgagcatacaaacggccaatccaggtaaccatgttgaaatacaggctgcgtatatcggtaccacgattattatcagacagacggccggccagctgtccttctcgatcaaggttgctgaggatgttgctatggcatttagtgcagaacaagatctgcagctatgcgttgggggctgcccgcctagccagcgcctgagccgcagcgaacgaaacagacgtggcgcaatcaccattgacaccgcaagacgcctatgcaaggaaggcctccccgtcgaagatgcctacttccatagttgtgtttttgacgtcctgatttccggcgatccaaacttcacggtagcagcccaggccgccctggaggacgcccgcgcctttctcccagatctggaaaagctgcaccttttcccatccgatgcgggggtgccactgtcttctgccacacttctggctcctctactgtccgggttgtttgtcttgtggctgtgcatccag

SEQ ID NO: 13512 - DNA, 1278 bp, synthetic construct
  misc_feature 1..1278: note = source = /note="Description of Artificial Sequence: Synthetic coding sequence"
  source 1..1278: mol_type = other DNA
atgggggaacctggacagagtccttcaccgagaagctctcacgggtctccccctaccctaagcacccttactctcctgctcctgctgtgcggccacgcccatagtcagtgcaaaatcctcagatgcaatgccgaatatgtgagctccacactctcacttcgcggaggcggatcatcgggagctctgcggggcggcggtggcggtggacgaggtggaggggttggaagcgggggactttgtcgagcgctcagatcatatgccctgtgtacccgacgaactgctcgcacttgtaggggggatctggcttttcactccgcagttcacgggattgaggacctgatgattcagcacaattgctccagacagggccctactgccccacctccacctcgaggacctgcactccctggcgccggtagtggcctgccagctcccgacccttgcgactacgaaggccggttctcacggttgcatgggcggcctcctgggttcttgcactgcgcctccttcggcgaccctcatgtgcgttccttccatcatcacttccacacatgcagagtgcaaggagcctggcctctcttggacaacgattttctgtttgtgcaggccaccagctcccctatggccctcggagcaaatgccacagcaacccgcaaacttactattattttcaaaaacatgcaggaatgtattgaccaaaaagtttaccaggctgaagtggacaaccttcctgttgcctttgaggacggatccattaatggtggagacaggccaggagggtcctctctgtccatacagacagcaaaccccggaaatcatgtggaaatccaggccgcatacattgggactaccattattataaggcagactgccggccaattgtccttcagtataaaagtggccgaagatgtcgccatggccttcagtgctgaacaggacctccagttatgtgtcggaggctgcccaccttcccagcggctctcacgaagcgagagaaacaggcggggagcgattacaattgatactgctcgccgtctgtgtaaggaggggctgcctgtggaagatgcgtactttcatagctgcgtttttgatgtgctaatctctggcgatccgaatttcaccgtcgccgcccaggccgcccttgaggacgccagggcttttctccctgacctcgaaaaattgcatttgttcccttcagacgcaggtgtgcccttaagttccgctacactgttggccccactgctaagtggactctttgtgctgtggctctgcattcaa

SEQ ID NO: 13513 - DNA, 1278 bp, synthetic construct
  misc_feature 1..1278: note = source = /note="Description of Artificial Sequence: Synthetic coding sequence"
  source 1..1278: mol_type = other DNA
atgggtgaacctgggcagtcgcccagcccaagatccagccatggctcccctcctaccctttcgactttgacccttctgttgctgctttgcgggcacgcacattcgcaatgtaagatcctgagatgcaatgcagaatacgtgagttccactctttcacttcgcggaggaggttcgtccggtgctcttcggggcggtggaggtgggggaagaggagggggagtgggttcgggaggactgtgtcgggccctcaggtcatacgcactttgtacgaggagaaccgcacgaacttgcagaggagatctggcctttcacagtgcagtccatggcatcgaagatctgatgatccaacataattgttccagacagggaccaactgccccgcctcccccacgtggcccagcacttccgggtgcagggtcaggactgcctgcaccagacccgtgtgattatgaaggaagatttagccgactgcatggtcgacctccgggattccttcactgtgcctcgttcggagatcctcatgttcgctcctttcatcatcacttccacacctgccgcgtgcagggcgcgtggcccctcctggataatgattttctgtttgtccaagcgacctcgagcccaatggcacttggagcaaacgcgactgcaacccgcaaactgactatcatctttaagaacatgcaggagtgcatcgatcagaaagtgtaccaagcggaggtggataacctcccggtggcctttgaagatggaagtatcaatggaggcgatcggcccggcggctcgtcgctgtcaatacaaactgccaatccaggcaaccacgttgaaattcaagcagcgtacattggcaccacgataatcataagacagaccgccgggcaactctcgttttcaattaaggtcgcagaagatgtcgctatggcattttcggcagaacaggatctccaactctgtgtgggtggatgtcccccatcccagcgtctgagcaggagcgagagaaacagacggggtgcaattaccattgatactgcccgccgcctttgtaaggagggtctgccagtggaggacgcctacttccattcgtgcgtgttcgatgttcttatttccggggaccctaacttcaccgtcgcagcacaggccgcacttgaagatgcgcgggcctttctgccagatctggagaaacttcatcttttcccgtcagatgcaggggtgcctctctcgagcgctactctcctggcaccactgctctcaggtttgtttgtgctttggctgtgcattcaa

SEQ ID NO: 13514 - DNA, 1278 bp, synthetic construct
  misc_feature 1..1278: note = source = /note="Description of Artificial Sequence: Synthetic coding sequence"
  source 1..1278: mol_type = other DNA
atgggtgaacctggacagtcaccttcgccacggagctcacatggctcgccaccgactctctccaccctgacccttctcttgctcctctgcggacatgcccattcgcagtgtaagatccttcggtgcaatgcagaatacgtctcctcgacgctgtcactgcgcggtggagggtcgtccggagcactccgcggaggtgggggtggaggtcgtggcggaggcgtgggttcgggcggactttgcagagctctgaggtcatatgccctgtgcacgcggcggaccgctagaacttgccgcggcgacctcgctttccacagcgccgtgcacggaatcgaagatttgatgatccaacacaactgctcccgtcaggggcccaccgcaccacctccgccgagggggccggcactcccgggggccggcagcggactgccagctccggatccttgtgattacgagggacggttcagccgcctgcacgggcggcctcctgggtttctccactgcgcttcattcggagatcctcatgtgagaagttttcaccatcatttccacacttgtagagtccagggtgcctggcccttgctggacaatgactttctgttcgttcaggctacttcctcacctatggccttgggagctaacgcaactgcgactcgcaaattgaccatcatcttcaagaacatgcaggagtgcattgatcaaaaagtgtaccaagcagaagtggacaacttgccggtggcgttcgaggacggatccatcaacggaggagataggcccggcggctcgtccctctcgatccagactgcaaatccgggcaaccatgtggaaatccaggcggcctacatcggaactaccatcatcatcagacagaccgccggccagctgtcgttttcaattaaggtggccgaggacgtggccatggcgttttcagcggagcaagatctgcagttgtgcgtgggagggtgcccgccgtcccagcggctgagccgctctgagcggaatcgccgcggagccatcacgatcgacaccgcccggagactgtgcaaggagggtctgcctgtggaagatgcatacttccattcctgtgtgttcgatgtcctcatatctggcgatccgaacttcaccgtggccgcccaagctgcgctggaagatgcccgggcgttcctgccagatctggaaaagctccacctgttcccatcagacgctggtgtgcctctgagctcggccactctcctcgccccgctcctctcgggactgttcgtgctgtggctgtgcatccaa

SEQ ID NO: 13515 - DNA, 1278 bp, synthetic construct
  misc_feature 1..1278: note = source = /note="Description of Artificial Sequence: Synthetic coding sequence"
  source 1..1278: mol_type = other DNA
atgggtgaacctggtcagagcccctcgccaagatcatcgcatggcagccctcccacgcttagcactcttacccttcttctgctgctttgtggtcatgcacattcacaatgtaagattcttcgttgcaatgcggaatacgtgtcctcaaccctgtcacttaggggcggtggcagctccggcgcactcaggggtggaggaggtggagggagaggaggcggggttggctctgggggtctttgtcgcgcacttagatcctacgcactttgcaccaggcgaaccgcccgcacgtgtaggggcgatctggcattccactcggcagtccatggtattgaagatctgatgattcagcacaactgttcgaggcaggggccaactgctcctcccccaccgcggggacctgcgctcccgggggcggggtcgggactgcctgctccggatccttgtgactacgagggcaggttctcccggctgcatggacgcccacccggatttctccattgcgcatcgtttggcgatcctcacgttaggtcgtttcatcatcatttccatacgtgtagagtgcaaggagcatggccgctgctcgataacgactttctgtttgtccaagctaccagctcccctatggcgcttggagcaaatgcaactgccacccggaaacttaccattatcttcaaaaacatgcaagagtgtattgatcagaaggtgtaccaggcagaagtcgataaccttcctgtggcatttgaagatggttcaatcaatggcggggacagacctgggggttcctccctgtcgattcaaactgctaatccaggtaatcatgtcgaaattcaggcagcttacattggcaccaccatcatcattaggcagactgcaggacaactttccttttctatcaaggtggcagaagatgtggccatggcattttcggccgaacaagatctgcagctgtgtgtggggggatgtccacccagccaaagattgtcgcgatcagagcgcaacagaaggggagccattactattgataccgcaaggcgactgtgcaaggagggactccctgtggaggatgcgtactttcactcctgtgtgtttgacgtgctcatttcgggtgatcctaactttactgtggctgcccaggcagctttggaggatgcacgcgcattccttcccgacttggaaaagctccacctctttccttcggatgccggagtgccactgtcatctgcaactctgctggctccactgctttccggcctgtttgtgctctggctgtgcatccag

SEQ ID NO: 13516 - DNA, 1278 bp, synthetic construct
  misc_feature 1..1278: note = source = /note="Description of Artificial Sequence: Synthetic coding sequence"
  source 1..1278: mol_type = other DNA
atgggcgaaccaggacagtccccttcaccgcgcagctcacacggaagcccgccgaccctttctactttgacactgttactcctcctctgtggccatgctcattcccaatgcaaaatattaagatgtaatgcagaatatgtgagtagtacgcttagcttgcgtggaggtgggtcttccggggcacttcggggcggtggaggtggcggacgcggcggcggcgtcggatctggaggcttatgtagagctctgcgctcgtatgcgctctgcacaagaaggacggctaggacgtgtagaggagatcttgcctttcattcagctgtccacgggattgaagatttgatgattcagcacaactgttcacgccagggcccgactgctcctccaccgccacgtggaccggcgttaccgggtgcagggtcaggccttccggcgccggacccctgtgattatgaaggacggtttagccgccttcatgggcgcccgccagggttcttgcattgcgcatcttttggcgatccgcatgtccgtagctttcatcaccattttcatacgtgcagggtccagggtgcttggccgcttctggataatgactttttgtttgtacaggcgacatctagcccaatggccttaggggcaaatgcgacggcaacaagaaaattaacaataattttcaagaacatgcaagagtgcattgatcagaaagtataccaggcagaagttgataatctccctgtggcttttgaggatggctccattaatggaggcgataggcctggtggatcttctctgagtatccagacagcaaatcccggtaaccatgtcgaaattcaagctgcttatatcggaacaacgattatcattagacagacagctggacagttaagttttagcatcaaggttgctgaggatgtcgcgatggcattctcagccgaacaggacctgcaactgtgcgtagggggttgtccgccgtcccagagattatccaggtcggaacggaatcgccgaggtgccattaccatcgacacggcccgcaggttgtgtaaggaaggcttgccggtagaggacgcatactttcattcttgtgtttttgatgtcttgatttccggagatccgaattttactgttgctgcacaggcagcgttggaagatgccagagctttccttccggatcttgaaaagttgcatctgtttccttctgatgcgggcgttccgctcagtagtgcgactctgctggcccctctcttgagcggcctttttgtcttatggctttgtatccaa

SEQ ID NO: 13517 - DNA, 1278 bp, synthetic construct
  misc_feature 1..1278: note = source = /note="Description of Artificial Sequence: Synthetic coding sequence"
  source 1..1278: mol_type = other DNA
atgggggagcctggccaaagcccgtcccctcgatcttcccacggcagcccccctactctgagcactttaacactcttgcttctcctctgcggtcacgcccactctcagtgtaagattttgaggtgcaatgctgagtatgtgtccagtaccctgagcctgagaggaggagggtcatcaggtgccctccgtggcggtggaggaggtggaaggggtggcggcgttggaagcggcggactctgtcgagcactgcgcagctatgccctttgcacgcgaagaaccgcccggacttgcaggggcgatctggccttccactcagctgtgcacggtattgaagatctgatgatccagcacaattgttctagacagggacctacggctccccctccaccccgaggacccgccctgcctggcgccggttctgggctgccagcacccgacccttgcgactatgagggacgcttctctaggctacacgggagacctcctgggttcctccactgtgcctctttcggcgatccacacgtgagatctttccaccaccattttcacacatgtagagttcagggtgcttggcctcttcttgataacgattttctgtttgtgcaggccacttcctccccaatggccctaggagccaacgcaacagccactcgaaaactgacaatcatctttaagaatatgcaagagtgtatcgaccaaaaggtgtatcaggctgaagtagacaacctgccagtcgcctttgaagatggatcaattaatgggggcgatagaccgggcggctcctcactcagcatccagacagcaaatcctggcaatcacgttgaaatccaggccgcatacatcggcaccacaataataattcgacagaccgcaggtcaattgagcttttctattaaggttgctgaagatgttgcaatggctttctctgccgagcaagacctgcagctatgcgtaggcggatgtcccccttcgcagaggttgtccaggagcgagcggaaccgaaggggcgctattactattgataccgctcgacgcctgtgcaaggagggactgcctgtggaagatgcatacttccattcttgtgtgttcgacgtgcttatctccggtgaccctaactttaccgtggctgcgcaggctgccctggaagatgcgagagcatttctgcctgacctggagaaattgcatctgtttccaagtgacgccggcgtgcccctcagttcagcgaccctgttagctcctctcctgtccggccttttcgtactttggctctgcatacaa

SEQ ID NO: 13518 - DNA, 1278 bp, synthetic construct
  misc_feature 1..1278: note = source = /note="Description of Artificial Sequence: Synthetic coding sequence"
  source 1..1278: mol_type = other DNA
atgggggagccaggacagtctccatcccctcggagcagccatggcagccccccaaccctcagcactttgacattgctcctgttattatgcggccacgcccacagccagtgcaaaatccttcgctgtaacgccgagtatgtgtcaagcacgttgtctctgcgaggaggaggtagcagtggcgcactccgaggaggcggaggaggcggtcgcggtgggggagtgggaagtgggggactgtgtcgcgctctgcggagctatgcactgtgtacccggcgcaccgcgcgtacctgtcgaggggatctggcattccatagtgcggtgcacggaatcgaagacctaatgattcagcacaactgttcccggcagggtcccactgcacccccgccaccacggggcccggcactgcccggtgccggatctggtcttccagctccggacccctgcgattacgaggggagatttagtcgcctacacggccgcccccctgggtttttgcactgcgcttcttttggggaccctcatgtaaggtcctttcaccaccacttccacacctgccgggtgcagggagcctggcccctattggataatgacttccttttcgttcaagccaccagctcccctatggctcttggagcaaacgccacagccacaagaaaacttacaattattttcaaaaacatgcaggagtgtattgaccagaaggtgtatcaagctgaggtggataacttaccagtcgcttttgaagatggctccatcaatggcggtgacagaccaggaggttcctcattaagcatacagacagctaacccgggcaatcatgtggagattcaagcagcatatattggaacaacaattataatccgtcagaccgccggccagctatctttctcaatcaaggtcgccgaagatgttgccatggcgtttagcgcagagcaggatctccaactgtgtgtcgggggttgtccaccttcacagcgactatccaggtccgaaagaaaccgtcgaggcgctataacaatcgacaccgcaagacgcctgtgtaaagaaggattgcctgtggaggacgcctacttccactcttgtgtcttcgacgtgctgatctcgggcgaccccaattttacagtcgcggcccaggcagcgctggaagacgccagggcctttcttcctgacctggagaagttgcatctctttccgtccgatgccggcgtgcccctatcctcggccacgttactcgctcctctgctcagcggcctttttgttctgtggttgtgtattcag

SEQ ID NO: 13519 - DNA, 1278 bp, synthetic construct
  misc_feature 1..1278: note = source = /note="Description of Artificial Sequence: Synthetic coding sequence"
  source 1..1278: mol_type = other DNA
atgggtgaaccaggacaatctccgtcgccccgaagctcccacggatcaccaccgaccctgagcactctgacgctgctgctgctcctgtgcggtcatgcacactcgcaatgtaaaatcctccgctgcaacgccgaatacgtctcgtccaccctctcactcagaggaggcggatcgtcaggcgcgctgcgcggaggaggagggggaggacggggaggaggggtcggatcaggaggactctgccgcgcactgagatcctacgccctgtgcacgcgccgcactgcccgcacttgccgcggagatctggctttccactcggccgtgcacggaatcgaggaccttatgatccagcacaattgctcacggcagggaccaaccgctccgcccccgccgcgcggacctgcgctcccaggggcgggctcaggacttcccgcaccagacccgtgtgactacgaaggcagattctcgcgcctgcatggacggccgccaggtttccttcactgcgcatcgttcggtgacccacatgtccgctctttccaccaccatttccacacctgtcgtgtgcagggcgcctggccgctgctcgacaatgacttcctcttcgtgcaggctacctcaagcccgatggctctcggagctaatgccaccgccacccgcaagctcactatcatcttcaaaaacatgcaggaatgcattgatcagaaagtgtaccaagccgaagtggacaatctgccagtggccttcgaagatggctcaatcaacggaggagataggccgggaggctcgtccctgtccattcagactgcaaacccgggtaaccacgttgaaatccaggctgcgtacatcggaactaccatcattatccggcagaccgccggacaactctcattttccatcaaggtggcagaggatgtcgcgatggcgttttcggcggaacaagacttgcaactgtgcgtcggcggttgcccgccgtcccagcgcctctcccggtccgaacgcaaccgccggggcgcgatcactatcgacaccgcacggcgcctctgtaaggaaggcttgcccgtggaggatgcatacttccactcctgcgtgttcgacgtcctgatcagcggagatccaaatttcacggtggcggcacaagccgctctggaggacgctagggccttcctgccagatctggaaaaactccacctttttccttccgatgccggggtcccactgtcatcggcgacgctgctggctccgcttctgtccgggctgtttgtgctctggctctgcatccaa

SEQ ID NO: 13520 - DNA, 1278 bp, synthetic construct
  misc_feature 1..1278: note = source = /note="Description of Artificial Sequence: Synthetic coding sequence"
  source 1..1278: mol_type = other DNA
atgggggaaccaggccaatcaccatcaccccggagttcccatggttccccacccaccctcagcacgctcacccttctgctgctcctgtgtgggcacgcccattcacagtgcaagatactgaggtgtaacgctgaatatgtgagctctaccctgagtctgcgcggcgggggcagctctggcgccctgcgcggaggtggcggcggcggacgcggtggtggtgttgggtccgggggtctgtgcagagcactgaggtcctatgctctttgcacccgaaggactgctcgaacctgtcgaggcgatctggcctttcattccgcggtgcatggcatcgaggacttgatgatacaacacaattgttcccgacaggggccaaccgctcctcctcccccccggggacccgccctcccaggtgcaggatccggactgcccgctcctgatccctgtgactacgaagggcggttttcacgactgcatggaaggccacccggttttctccactgcgcatcattcggagatccgcatgtcagaagcttccatcaccatttccacacatgccgggtgcaaggtgcctggccactgctggacaatgattttttgttcgtgcaggcgacgagctctcctatggcactgggggcgaacgccaccgctacaagaaagctgacaatcatttttaagaacatgcaggagtgcatcgaccagaaggtttatcaggccgaagtagataacctgcctgtcgcgttcgaagacggctccataaatggcggagaccgaccggggggttctagcctgtcaattcaaaccgcaaacccaggaaaccacgtcgaaatccaggcagcctatatcggcaccaccatcatcatcaggcagacggcgggccagctttctttttcaattaaggtggctgaggatgtggcaatggctttcagtgcagaacaggatttgcagctgtgcgtgggcggatgccctccctctcaacggcttagccgctccgaaaggaaccgccgcggcgctataaccatagacaccgcccgccgactttgtaaggagggtctgcccgtggaagatgcatacttccattcatgcgtgttcgatgttctcatctctggagaccctaacttcactgtggctgcacaagcagcattggaggacgcgagagcgttcctgcccgaccttgagaagctccatctgtttccttccgatgcgggcgtccccttgtcctctgccaccctcttggctcccttgctgagcggcctgtttgtgctgtggctgtgcattcag

SEQ ID NO: 13521 - DNA, 1278 bp, synthetic construct
  misc_feature 1..1278: note = source = /note="Description of Artificial Sequence: Synthetic coding sequence"
  source 1..1278: mol_type = other DNA
atgggagaaccgggccaatcgcccagccctcgctcatctcacggctcaccgccgacgctgtccactcttaccctcctcctgctcctctgcggacacgctcactcccagtgcaagatcctgcgctgtaacgccgaatacgtcagctcgaccctctcgttgcggggagggggatcgtcgggcgccctgcggggcggaggcggaggaggccgcggaggaggagtgggtagcggcggactttgtagggcactgcgctcatacgccctgtgcacccggcggacggcgagaacgtgcaggggagatctggcttttcactcagccgtccacggaattgaggacctcatgatccagcataattgctcccgccagggacctaccgcacctccaccacctcggggtccagcgctgcccggggctggcagcggactgccggcaccggatccgtgcgattacgagggacggttctcacggttgcacggacgacctccgggcttcctgcattgcgcatcattcggagatccgcatgtgagatctttccaccaccacttccatacgtgcagggtgcaaggagcctggcctcttctcgacaacgactttttgttcgtgcaggcgacttcgagtcccatggccctgggggccaacgccactgccactcggaagctgactatcatctttaagaatatgcaggaatgcatcgaccaaaaggtctaccaggccgaggtcgataatctgccggtggcgttcgaagatgggtcgatcaatggtggggacaggccggggggatcgtccctgagcatccagaccgcgaacccaggaaatcacgtcgagatccaggcggcctacatcggaaccaccatcatcattagacaaacggcaggacagctgtcgttttccatcaaggtcgcggaagatgtggccatggcgttctccgctgaacaggatctgcagctttgcgtcggagggtgccccccgtcgcagcgtcttagcagatccgaaaggaaccggcgcggggctattactatcgatactgcacggagactttgcaaggagggacttccagtcgaagatgcgtactttcattcctgtgtgttcgacgtgctgatctcgggcgaccccaatttcaccgtggcagcgcaggcagcgctcgaagatgctagagcatttctgcctgatctggagaaactgcacttgttcccctccgatgctggagtgcccctctcgagcgccaccctgctcgcgccgctgttgtccggactgttcgtcctctggctctgtatccag

SEQ ID NO: 13522 - DNA, 1278 bp, synthetic construct
  misc_feature 1..1278: note = source = /note="Description of Artificial Sequence: Synthetic coding sequence"
  source 1..1278: mol_type = other DNA
atgggagagccaggccaatccccgtccccgagatcgtcacacggctcgccacccactctgtcgacgctcactctgcttcttctgctctgcggacacgcgcacagccagtgcaagatcctcaggtgtaacgcggagtacgtcagctccaccctctccctgcgcggagggggtagctccggcgcgcttagaggaggagggggaggaggacgcggcggcggagtcggatcgggtgggctctgccgggccctgcgctcctacgccctctgcactcgccgcaccgcccggacctgccgcggagatctggccttccactcggcggtgcatggaatcgaggacctgatgatccaacataactgctcacgacaggggccgacggcgccgccgcctccgcggggaccagccttgccgggtgcaggaagtggactgccggcaccagacccttgcgactacgaaggcagattttcaaggctgcatgggcggcctccaggatttttgcactgtgccagcttcggcgatcctcacgtgcgctcatttcatcaccacttccacacgtgtcgggtccaaggagcttggccgctgctggacaacgacttcctgttcgtgcaggcaacttcgtcgccgatggctctcggcgctaatgcgactgcgaccagaaagctgaccatcattttcaagaacatgcaggaatgtatcgaccaaaaagtttaccaggccgaagtggacaacctgccagtcgcgttcgaagatggatctatcaatggcggtgatcggcccggaggaagctcgctctccatccagaccgccaatccaggaaatcatgtggagattcaggccgcttacatcggcactaccatcatcatcagacaaaccgccggccaactttcgttctcaattaaagtggctgaggacgtggctatggccttcagcgccgagcaagacctgcagctctgtgtaggaggttgccccccttcacagaggctctctcgctccgagcgcaacagacggggcgcgatcactatcgacaccgcccgtcggctgtgcaaggaaggtctgccagtggaagatgcatatttccattcctgcgtctttgacgtgttgatttcaggggatcctaactttactgtggcagcgcaggccgcacttgaagatgcccgcgcattcctgccggatctggaaaagctgcacttgttcccgagcgacgctggggtgccgctgtcgtccgccaccctgctcgcacccttgctgagcggactcttcgtgctgtggctctgcatccag

SEQ ID NO: 13523 - DNA, 1278 bp, synthetic construct
  misc_feature 1..1278: note = source = /note="Description of Artificial Sequence: Synthetic coding sequence"
  source 1..1278: mol_type = other DNA
atgggggaacctggacagtcgccttctccccggtccagtcatggatcccctcccacactgtccactcttacactccttctcctgctatgtggacatgctcattctcagtgtaaaatcctgaggtgcaacgcagaatatgtctcatctactctttctctgcgcgggggaggaagttcgggagcccttagaggggggggggggggaggacggggaggaggggtcggatcaggaggactctgtagggctctgcggtcctatgccctctgcactagacgcacagcaagaacatgtagaggggacttagccttccattctgcagttcatgggatcgaagatctcatgattcagcacaactgttcccgccagggaccgacagccccacctccacctagagggcctgccctcccaggggccgggagtgggctgcccgcccctgatccatgtgattatgaaggaaggttctctcggctgcacggaagacctccaggattccttcattgtgcatctttcggggatccacacgtcagaagtttccatcaccacttccacacttgccgggtccagggagcctggccactcctcgacaatgacttcttgttcgtacaggcaacaagttcacccatggcacttggggccaacgcaacggctacacggaaacttacaatcattttcaaaaacatgcaggaatgcatagaccagaaagtgtaccaggccgaagtagataacctcccagtcgcgttcgaggatgggtcaatcaatgggggggatcggccaggggggtctagtctctcaatccagactgctaatcccgggaatcatgtggaaatccaggcggcatatatcggaactacaataataatcagacaaactgcagggcagctatcattttctatcaaagttgccgaggatgtggcgatggctttttcggcagaacaggatctacagttgtgcgtcggaggatgccctccttctcagagactctcccggtctgaaagaaacagacggggagccatcacaatagatacagcccggagactgtgcaaagaagggctgcctgtggaagatgcttacttccactcctgcgtttttgatgtcttgatctctggagatcctaattttactgttgccgcacaggccgccctagaagacgctcgggcattcctccccgatctggaaaaactgcacctgttcccatccgatgcaggggtccccctctcatcggctacattactcgcaccactcctctccggattattcgtcctctggctctgcatacag

SEQ ID NO: 13524 - DNA, 1278 bp, synthetic construct
  misc_feature 1..1278: note = source = /note="Description of Artificial Sequence: Synthetic coding sequence"
  source 1..1278: mol_type = other DNA
atgggagaacccggtcaatctccaagtcctagatcatcacacggatcgccccccacactgtcaaccctcacacttctgttgctactatgtggacatgcacactcgcagtgtaagatcctccgctgcaacgccgagtatgtatcctcgacgctgagtttacgggggggtggctcgtctggcgcgctgcgtggtggcggcggaggtggcagaggaggtggcgtggggagcggcgggctctgcagagcattacgcagctatgcattgtgcacgagacggacggctagaacttgtagaggagatcttgcgttccatagcgccgtccatgggatcgaggacctaatgattcagcacaactgtagcaggcagggacctacggctcccccaccaccacgcggacccgctcttccaggagcaggatccggtctgcctgcacctgacccatgcgactacgaaggtaggtttagtcgcctgcacggcaggccccccggctttcttcattgtgcttcttttggagatccacacgtcaggagttttcatcatcattttcatacatgccgcgtacagggtgcttggcccctcctggataatgattttctgttcgtgcaggcaacatctagtccaatggctctgggcgcgaatgccacagccacgcgtaagcttactattattttcaagaatatgcaggagtgtatcgaccagaaggtgtaccaggcggaagtggataaccttcctgtggcatttgaggacggatcgattaacggcggagacaggcctggggggagcagccttagtattcagactgcaaatccagggaatcacgtcgagattcaggccgcctatattgggactaccatcatcattcggcaaactgcaggccagctgtccttttcgatcaaggtagccgaggatgttgccatggcgttttctgcggagcaagatctgcagttatgcgtgggcggctgtcccccctcccaacgcctgtccagatccgagcgaaatcggagaggagctatcaccatcgataccgcccgccggttgtgtaaagagggtctgcccgtggaggatgcatacttccactcgtgtgtgtttgatgtcctgatctcaggagatcctaactttaccgtcgctgcgcaggccgccctggaagatgctagggcctttcttccggatctggagaaactgcacctgttcccctcagatgccggcgtacctctctctagcgccacgctcctagcccccttgctcagtgggctgtttgtactgtggctctgtattcag

SEQ ID NO: 13525 - DNA, 1278 bp, synthetic construct
  misc_feature 1..1278: note = source = /note="Description of Artificial Sequence: Synthetic coding sequence"
  source 1..1278: mol_type = other DNA
atgggtgaaccgggtcaatcgccgtcgccgcgatcgtcgcatggttcgccgccgacgctatcgacgctaacgctactattattattatgtggtcatgcgcattcgcaatgtaaaatattacgttgtaatgcggaatatgtttcgtcgacgttatcgttacgtggtggtggttcgtcgggtgcgctacgtggtggtggtggtggtggtcgtggtggtggtgttggttcgggtggtttatgtcgtgcgttacgttcgtatgcgttatgtacgcgtcgtacggcgcgtacgtgtcgtggtgatttagcgtttcattcggcggtacatggtatagaagatttaatgatacaacataattgttcgcgtcaaggtccgacggcgccgccgccgccgcgaggtccggcgctaccgggtgcgggttcgggtttaccggcgccggatccgtgtgattatgaaggtcgtttttcgcgactacatggtcgtccgccgggttttttacattgtgcgtcgtttggtgatccgcatgttcgttcgtttcatcatcattttcatacgtgtcgtgttcaaggtgcgtggccgttactagataatgattttttatttgtacaagcgacgtcgtcgccgatggcgctaggtgcgaatgcgacggcgacgcgaaaattaacgataatatttaaaaatatgcaagaatgtatagatcaaaaagtatatcaagcggaagttgataatctaccggtagcgtttgaagatggttcgataaatggtggtgatcgtccgggtggttcgtcgttatcgatacaaacggcgaatccgggtaatcatgttgaaatacaagcggcgtatataggtacgacgataataatacgtcaaacggcgggtcaattatcgttttcgataaaagtagcggaagatgtagcgatggcgttttcggcggaacaagatttacaattatgtgttggtggttgtccgccgtcgcaacgattatcgcgttcggaacgtaatcgacgtggtgcgataacgatagatacggcgcgtcgattatgtaaagaaggtctaccggttgaagatgcgtattttcattcgtgtgtatttgatgtactaatatcgggtgatccgaattttacggtagcggcgcaagcggcgttagaagatgcgcgagcgtttttaccggatttagaaaaattacatctatttccgtcggatgcgggtgtaccgctatcgtcggcgacgctattagcgccgctattatcgggtctatttgtattatggttatgtatacaa

SEQ ID NO: 13526 - DNA, 1278 bp, synthetic construct
  misc_feature 1..1278: note = source = /note="Description of Artificial Sequence: Synthetic coding sequence"
  source 1..1278: mol_type = other DNA
atgggcgagcctggtcagtcaccgtcaccgcgcagcagccatggatctcccccaacgctcagcactctcacactgctcctgctcctttgcggacacgcccactcccagtgcaagatcctgcgctgtaatgccgaatatgtgtccagtactctcagcctgaggggcggtggcagttctggcgcactgaggggcggtggcggcggcggtaggggaggaggagtcggaagtggaggcctctgtagagccctgagaagctacgctttgtgtaccagaaggaccgctcgcacatgtaggggcgatctggcattccacagcgcagttcacggtatagaggacctgatgatccagcacaattgcagtagacagggacccaccgctccacctccacccaggggacctgcgctccccggtgccggctctggtcttcctgccccagatccatgcgattacgagggaaggtttagcagactgcacggcagaccgccgggttttctgcattgcgcgagcttcggcgatccacacgtcaggagtttccaccaccacttccacacatgtagagttcagggagcttggccgcttttggacaacgacttcctgtttgtccaggctacgtctagccccatggctctgggtgcgaacgctacagcaactcgcaagcttacaattatcttcaagaacatgcaggaatgcatagaccagaaggtatatcaggcggaggtggacaacttgcctgttgcgtttgaggatggttctataaacggcggagatagaccgggcggcagcagcctgtcaatccaaactgccaatcctggaaatcatgtggaaatccaggccgcttacattggtaccacaataataatcaggcagaccgctggccagctctctttttcaataaaggtggccgaagatgtggccatggccttttcagctgaacaggacctccagctgtgcgttggaggttgcccgccttcacaacgcctcagtagatccgagcgcaatcgcagaggcgccattaccatcgacacggccagaaggctgtgcaaggagggtctgccagtagaagacgcttactttcactcatgcgtttttgacgtgctcatctccggagatcccaacttcactgtagctgcccaagccgccctggaggacgcgagggcgtttctcccagacctggagaaattgcacctcttcccctctgacgctggagtcccccttagctctgctaccctgttggccccgctgctctccggcttgttcgtcctgtggctctgcatccaa

SEQ ID NO: 13527 - DNA, 1278 bp, synthetic construct
  misc_feature 1..1278: note = source = /note="Description of Artificial Sequence: Synthetic coding sequence"
  source 1..1278: mol_type = other DNA
atgggcgaacccgggcaatccccgagtccgcgttcctcccacggctcccctccaaccttatccacactgacactcttgctcctgctctgcggccacgcacacagccaatgtaagattctgaggtgtaacgccgagtatgtgagttcgactctcagcctgaggggagggggctccagcggcgccctgagaggagggggagggggagggaggggtgggggcgtaggcagcggaggtttgtgccgtgctctgcgatcatacgctctgtgtacacgccgcaccgcccggacctgtcgtggggatctggcttttcactccgcggtgcacggcatcgaggatctgatgatccagcataattgttcgcgccagggccctactgctccgcctcctccacgcgggcccgctctgccgggtgctgggagtggcctcccagcgcctgacccctgcgattatgagggacgcttttcacgcctgcacgggagaccgcccggctttctccattgcgcaagttttggagatcctcatgttagaagttttcatcatcacttccatacatgtagggtgcagggcgcctggcctctactggataacgacttcttgttcgtgcaagcgacctcaagtccgatggctctgggagccaacgcaactgccacaagaaaactgactattatctttaagaatatgcaagagtgcattgatcagaaggtgtaccaggccgaggtcgacaacctgccagttgccttcgaagatgggagcatcaatggaggggaccgccccggagggtcttccctgtcaattcagacagccaacccaggaaatcacgtggagatacaggcagcttacatcggaactaccatcataattaggcaaactgccgggcagctctcgttctctataaaggtcgcagaggacgtcgcaatggccttctccgcagagcaggacctgcagctgtgcgtaggtggatgccccccatcccagcgcttaagtcggagcgagcggaatcgtaggggcgccatcacgatagacactgcaaggcggttgtgcaaagagggtttgccagtagaggacgcctatttccattcctgtgtcttcgatgtgctgatatccggggaccccaacttcacagtcgccgcccaggcggcattagaagatgcccgagcgtttctgcccgatctggagaaactgcatctatttccctctgatgctggggtgcccctgagctcggccaccttactagccccactgttatcagggctctttgttctgtggttgtgtatacag

SEQ ID NO: 13528 - DNA, 1278 bp, synthetic construct
  misc_feature 1..1278: note = source = /note="Description of Artificial Sequence: Synthetic coding sequence"
  source 1..1278: mol_type = other DNA
atgggagagcccggtcaaagtccaagcccgaggtcttcacatggcagtcctcctacgctgtctactctcacgcttctgctgctgctatgtggccatgcacacagtcagtgtaaaatcctgagatgtaatgctgagtacgtgtcttcgacactctccttgagagggggtgggagttcaggcgccctaagagggggaggcggcgggggtagaggagggggcgtcggcagcgggggcctgtgtcgagcgcttcggagttacgcattatgtacgcgtaggaccgccagaacctgtagaggcgacctcgcgtttcattccgctgtccacggaatcgaggacctgatgatccagcacaattgctccaggcagggaccgactgcccctccgcccccgcgagggcctgcccttcctggggccgggagcggacttcccgctcccgatccctgcgattatgaaggccgtttctcaaggctccacggtaggccacctggtttccttcactgcgccagctttggggacccacatgtccggagttttcaccaccattttcatacctgtagagtgcagggcgcctggccactgctcgacaatgatttcctgtttgtccaggccacttcttcacccatggcactgggagccaatgccacggccacacgcaagcttaccatcatttttaaaaatatgcaggagtgcatagaccagaaggtgtatcaggctgaggtggataatctccccgtcgccttcgaggatggaagtattaatggcggcgacagacccggaggcagttcactgagcatccagactgctaacccgggaaaccacgtcgaaatacaggccgcctatattggaaccacaatcattattcggcagactgccggccagctctctttttccatcaaagtggccgaagatgtggctatggcgttttcagccgagcaggacctacagctgtgtgtcggggggtgtcccccatcgcaacgcctgtcccgctctgagcgcaatagacggggggccatcacaatcgacaccgctcgcagattgtgcaaggaaggtttgcccgtagaagacgcatacttccatagctgcgtctttgacgtcttgatctcaggcgatccaaatttcaccgtggcggcgcaggctgcccttgaggacgcaagagctttcctgcctgatctggagaagttacacttgtttccatccgatgccggggtgcccctgagcagcgctaccctgctcgcccccttattgagtggactcttcgtcctgtggctctgcatacag

SEQ ID NO: 13529 - DNA, 1278 bp, synthetic construct
  misc_feature 1..1278: note = source = /note="Description of Artificial Sequence: Synthetic coding sequence"
  source 1..1278: mol_type = other DNA
atgggtgagcccggccagtctccgtcgcctcgctcttcgcatggctcccccccgaccctgtcgaccctcactttactacttctgttatgcggtcatgcacactcacagtgcaagatcctgagatgtaacgccgaatacgtgtcatctactttaagcctccgcggtggggggtcttctggcgcactgcgcggaggaggcggcggtgggagaggcggtggagttgggtcaggaggcttatgcagagcattacgtagttacgccctgtgtactcgtcgaacagcaaggacctgtcgcggcgacctggccttccactccgctgtgcatggcatcgaagacctgatgattcagcacaactgttcccgccagggccccacagcgccgccaccacctagaggaccagcgttgcctggtgcagggagcggcctgcccgcccccgatccctgtgattatgagggaagattcagcagactccatggacggcccccgggtttcctccactgcgcctctttcggggatccacacgtcagatcctttcatcaccatttccatacctgtcgcgtgcagggagcctggccgctccttgataatgacttcctattcgtgcaggccacctcctcccctatggctctcggggcaaacgctacagcgacacggaagttgacgatcatcttcaaaaacatgcaggagtgcatcgaccagaaggtctatcaggccgaagtggataatttgcctgtggctttcgaggacgggtcgattaatgggggggacaggccaggaggctcttccctctccattcagactgccaatccaggaaatcacgtcgagatacaggcagcatacatcggcaccacaatcataattcgccaaaccgccggccaactgtccttttctataaaagtggctgaggacgtagcaatggccttctctgccgagcaggatctccagttgtgtgttggcggctgcccgccatcacagcgattaagcagaagcgaaagaaaccgtagaggagccattacaatcgataccgcaaggagactctgcaaagaaggattaccagttgaggacgcctatttccactcctgtgtgtttgacgtccttatcagtggcgatcctaactttacagtggcagctcaagccgcgctcgaggatgcgcgcgcctttttacccgacttagagaagcttcaccttttcccttctgacgccggagtccctttgtcatcggctacactgcttgccccactactgagcggcttgtttgtgctatggttatgcatccaa

SEQ ID NO: 13530 - DNA, 1278 bp, synthetic construct
  misc_feature 1..1278: note = source = /note="Description of Artificial Sequence: Synthetic coding sequence"
  source 1..1278: mol_type = other DNA
atgggtgagccaggccagtctcccagccctaggagctctcacggcagcccaccaaccctgtccacactcacactgctgctgttgctgtgcggacacgctcatagtcagtgtaagatactaagatgcaatgctgagtacgtttcctctacattgtctctgcggggaggaggaagttcaggggctctccgggggggaggcggcggaggccggggaggaggggtgggctcaggaggactctgtagggctctaagaagttacgccctgtgtacacgccgcaccgctcggacatgccgcggagaccttgcttttcactccgcggttcacggaatcgaggacctaatgattcagcataactgtagcagacagggccctaccgctcctccacccccgcggggtcccgcgttgcccggtgcaggaagtggcttgccggcacccgatccatgcgattacgaaggacgcttttctagacttcacggtaggccacccgggttccttcattgcgcttctttcggagatccacacgtgaggagcttccatcatcacttccatacctgccgggtgcagggcgcttggccactcctggacaacgacttcctgttcgtgcaggcaacctcttcgccaatggcactcggcgccaatgccaccgctacccgtaagttgacaatcatctttaaaaacatgcaagaatgcattgatcaaaaagtgtatcaagctgaggtcgataacctgcctgtggcattcgaagatggcagcatcaatggcggcgatagaccaggaggctccagcctgagcatccaaaccgctaacccaggtaaccacgtagaaatacaggctgcgtacatagggacgacaatcatcataagacagacagccgggcagctgtcctttagcatcaaggttgccgaagacgttgcaatggcctttagcgccgagcaggacctccagctttgcgtgggaggctgcccccccagccaaagactttcaaggtccgaacgtaataggaggggcgctatcacaatcgacactgcgcgcaggctgtgcaaagagggactgccggtggaggacgcctattttcacagttgcgtctttgacgtattaattagcggcgatcctaactttaccgtggccgctcaggccgcgttggaggatgcaagggcttttctgcccgatctcgaaaaattacatcttttcccaagcgatgctggcgtccccttgtcttctgcaaccctgctcgcacctctgctgagcgggctgtttgtcctctggttgtgcatacaa

SEQ ID NO: 13531 - DNA, 1278 bp, synthetic construct; identical to SEQ ID NO: 13512
  misc_feature 1..1278: note = source = /note="Description of Artificial Sequence: Synthetic coding sequence"
  source 1..1278: mol_type = other DNA

SEQ ID NO: 13532 - DNA, 1278 bp, synthetic construct
  misc_feature 1..1278: note = source = /note="Description of Artificial Sequence: Synthetic coding sequence"
  source 1..1278: mol_type = other DNA
atgggcgagcctggacagtcccccagccctaggtctagccatggcagtccgcctacactgtccaccctaaccttactcctgctgttatgcggccatgcccacagccagtgtaagattcttcgatgtaacgcagaatacgtgagctcaacccttagtctccggggcggcggctccagtggggcactaaggggcggtggcgggggtggccgagggggcggcgtcggaagcggagggctctgtcgtgccctgcgctcttacgcattatgcacgcggagaaccgctcgaacgtgtaggggggatctggcattccacagcgccgtgcatggtatcgaagacctcatgattcagcacaactgcagccgccaggggcccactgcaccacccccaccgaggggaccagcacttcccggagcaggctctggcttgcctgcgcctgacccctgtgactatgaagggcgattcagtagactgcatggccggccccccggctttctccactgtgcatcgttcggcgaccctcatgtccggagcttccatcaccactttcatacgtgccgtgtgcagggggcctggcccttgctggacaatgacttcctgtttgttcaggccacatcctccccgatggcactgggcgctaacgctacagccactagaaagctgacaatcatttttaagaatatgcaggagtgtatagaccagaaggtttatcaggcagaggtggacaatctgccagtcgcctttgaagacgggagtattaacggcggcgatcggcctggcggctcaagtctctccatccagaccgcaaaccccggaaatcacgtagagatccaggcagcatacatcggcactacaataatcatccgacaaacggcgggccagctgtcgtttagcatcaaagtggccgaagatgtggctatggccttttcagcagagcaagatttgcagctgtgcgtgggtggatgcccccccagccagcgcctctctcgtagcgagcgaaaccgcaggggcgctattacgatcgacacagccagacgactctgcaaggaagggctgccagtggaggacgcgtacttccacagttgcgttttcgatgtgttgataagcggagaccctaacttcacggtggccgcacaagcagccttggaagatgcacgcgccttccttcccgatctagaaaagctccatctcttcccatctgatgccggggtgcctctctccagtgccactttgctggcccccttgctttcgggcctgtttgtcctgtggctctgtattcaa

SEQ ID NO: 13533 - DNA, 1278 bp, synthetic construct
  misc_feature 1..1278: note = source = /note="Description of Artificial Sequence: Synthetic coding sequence"
  source 1..1278: mol_type = other DNA
atgggtgaaccaggacagtccccgagtcctcgatcttcccatggtagccctcccaccttatcgacactcactcttctgctgttgctgtgtggccatgctcattctcaatgtaagatactgagatgtaacgctgagtatgtcagctccacgttgagcctgaggggagggggcagcagcggggccctgagaggaggcggcggaggaggaaggggcggaggagttggctcaggaggcttgtgccgagcacttaggtcctacgctctgtgcacaaggcgcaccgctcgtacctgcagaggcgacctcgcattccattcagcagtccacggaattgaggatcttatgatccaacacaattgcagtcggcagggccctacagctcctcctccaccaagaggccctgctttgcccggcgcagggagtggactccccgcaccggatccctgtgactacgaaggtcgttttagtagactccatgggcgacctccaggttttttacactgtgcatcctttggggacccacatgtcaggtccttccatcatcatttccacacttgtcgcgttcagggggcgtggcctctcctcgataacgattttctctttgtccaggctacctcaagtcctatggctctcggggccaatgcaaccgctactagaaaactgacaatcatatttaaaaacatgcaagagtgcatagaccaaaaggtctaccaggccgaggtggataacctgcctgtggctttcgaggacggatcaattaatggcggagatagaccagggggctcctcgctcagcatacagactgcaaacccagggaaccacgtggagatccaggctgcgtacatcggtaccactatcatcatcagacagacagccggccaattgtcatttagtattaaagttgcagaggatgtggcaatggcattttcggcagagcaggatcttcaactctgcgtcggaggatgtcccccttcacaaagactgagccgcagtgaaaggaacaggcgcggcgccatcacaattgacactgccaggagactctgtaaagagggcctccctgtggaggatgcttacttccatagctgtgtgtttgacgtgcttatttccggagacccgaacttcaccgtggcggctcaagcggcactggaagacgcccgtgcattcttgcctgatctcgaaaagctgcatctttttccaagcgacgccggcgtgccactttcctctgcaacactccttgccccccttctgtcaggccttttcgtcctctggctttgtatccaa

SEQ ID NO: 13534 - DNA, 1278 bp, synthetic construct
  misc_feature 1..1278: note = source = /note="Description of Artificial Sequence: Synthetic coding sequence"
  source 1..1278: mol_type = other DNA
atgggggagcctggccagtcgccatccccccgttcatcacatggtagccccccaacactaagcacgttaacgctactgctcctgctgtgcggacatgcacactctcagtgcaaaatcttacggtgtaatgccgaatacgtctcttcaacattaagcctccgcggcgggggaagctctggcgccctgcggggcgggggcgggggaggaagaggcggaggcgtggggagtggcgggctgtgccgggccttgcgaagctatgcgctctgtactcgacgcactgctaggacttgtagaggagacctggcttttcacagcgctgtccatgggatcgaggatctcatgattcaacacaattgctctcgccagggtccaaccgccccccctcccccccggggccctgcgttacccggcgctggctcagggctccccgcaccggacccctgcgattacgaaggccgctttagtcgacttcatggcaggcctcccggttttctgcattgcgcgagcttcggagatccacacgttcggtcttttcaccatcattttcacacatgtcgtgtgcagggcgcgtggccactgcttgacaacgattttctctttgtacaggcaacatcttcccccatggcgctgggggcaaacgctaccgccacacggaagttgaccatcatcttcaaaaatatgcaagagtgcatcgaccagaaggtgtaccaagctgaagttgataatctgcctgtggcctttgaggacggaagcattaacggaggcgaccggcccggggggagctcactgtcaattcagactgcaaaccccggaaaccatgtggaaattcaggctgcctacattgggactaccattataattcgccaaaccgccgggcaactatcctttagcattaaggtagctgaagatgtcgccatggccttctccgccgagcaggatctgcagctatgcgtcgggggatgtccacccagtcaacggctgtctaggagcgaacggaataggaggggagcgataacgattgacaccgctcgccgtttgtgtaaggaagggctgcctgtggaagacgcttatttccattcctgtgtgtttgatgtgctaatcagtggggatccgaactttaccgtcgccgctcaggccgcgctggaggacgcccgggccttcctgccagatctggagaaactgcatctattcccctcagacgccggggtacctctgtcaagtgccactctgcttgcgcccctgttgagcggcctgtttgtgttatggttatgcatacag

SEQ ID NO: 13535 - DNA, 1278 bp, synthetic construct
  misc_feature 1..1278: note = source = /note="Description of Artificial Sequence: Synthetic coding sequence"
  source 1..1278: mol_type = other DNA
atgggtgaacccggccaatcgccgagcccccgtagctcgcatgggtcaccgcctaccctgtcaaccttgacccttcttctgcttttgtgcgggcatgcacattcccagtgtaagatacttcgctgtaacgctgaatacgtgtcatcaactctttcccttcgcggcggtggatcatctggtgctcttagaggaggagggggaggaggtcggggcggaggagtcggaagcgggggcttgtgcagggcacttaggtcgtacgcactctgtacgagacgaaccgcacggacctgccggggcgacctcgcatttcacagcgccgtgcatggaattgaagatctcatgattcagcataattgttccagacagggacctactgcacccccaccaccacgcggaccagccctcccgggggcaggatccgggctgcctgccccggacccatgtgattacgaagggcgtttttctcgactccacggtcgtccaccaggttttctgcattgcgccagctttggtgaccctcatgtgcggtcgttccaccaccatttccacacttgtagggtccaaggtgcatggccacttctggataacgatttccttttcgttcaggcaacgtcgtcccctatggctctcggtgcaaacgcaaccgccacccgcaagttgaccatcattttcaaaaacatgcaagaatgtattgaccagaaagtgtaccaagcagaagtcgataatctcccggtggcatttgaggatgggtcgattaacggtggagatcgcccaggcgggagcagcctctcgattcaaactgcaaatcccgggaaccacgtcgaaatacaagcggcgtacatcggtaccaccatcatcattagacaaaccgcaggacaacttagcttttccatcaaggtggcagaggacgtggctatggcattctccgctgaacaggatcttcagctttgtgtcggaggatgccctccatcccaaaggttgtcacgttccgaaaggaatcgccgaggggcaataactatagataccgcacgacggctgtgtaaggagggcttgcctgttgaggacgcatatttccattcgtgtgtgtttgatgttttgatctcaggagatccaaactttaccgtcgccgcacaagcggcccttgaggatgcccgagcctttctgcccgatctggagaagctgcaccttttcccatcagatgccggcgtgccgctgtcctcagcaactctgctcgcgcctctgctgtcgggactgtttgtgctgtggctttgtattcaa

SEQ ID NO: 13536 - DNA, 1278 bp, synthetic construct
  misc_feature 1..1278: note = source = /note="Description of Artificial Sequence: Synthetic coding sequence"
  source 1..1278: mol_type = other DNA
atgggcgaaccaggacaaagcccctcccctaggtcgagccatgggtcaccgccaactctgtccaccctcacgttgctgctgctgctctgtggacacgcacattcgcagtgtaagatccttcggtgtaacgccgaatacgtgagttcaaccctgtcgctccgcggagggggttcctcaggtgcgctgaggggaggtggtggcggaggcaggggaggcggggtggggagcggaggactgtgccgcgctctgagatcctacgccctgtgtaccagacggaccgcgcggacctgcaggggcgatcttgctttccattcggctgtccacggaatcgaagatcttatgatccagcataattgttcacgccagggcccaaccgccccgccaccaccacgcggcccggccctgccaggtgcgggaagcggactgcctgcaccagacccgtgcgattacgaaggacggttctcgcgcctccacgggaggcccccgggcttcctgcactgcgctagctttggggacccccatgtgcggtccttccaccaccatttccacacttgccgcgttcaaggagcctggccactcctcgacaatgacttcctgttcgtccaggccacgtcatccccgatggcattgggtgcaaacgcaacggccactcggaagctgaccattatcttcaagaatatgcaggagtgcatcgatcaaaaggtgtaccaagcagaggtcgataacctgccagtggcgttcgaggatggttcgatcaacggaggggaccgcccggggggttccagcctcagtattcaaaccgcaaacccgggcaaccacgtggagatccaggcagcctacattggcactactatcatcattcgccaaactgcgggacaactgtccttctccatcaaggtcgccgaagatgtcgctatggccttctccgcagaacaagacctccaactttgcgtcggaggatgccctccgagccaacgcctctcccgctccgaacggaaccgcaggggggcgatcactattgatactgcccggcgactgtgcaaggaaggcttgcctgtcgaagatgcgtacttccactcgtgcgtgtttgacgtcctgatctcaggcgatccgaatttcaccgtggctgctcaggccgccctggaagatgcgcgggcgtttctgccggatctggaaaagctgcacctttttccgtcagacgcgggggtgcctctctcgtccgcgactctcctcgctccgctgctgtccggactgttcgtgctgtggctctgcatccag

SEQ ID NO: 13537 - DNA, 1278 bp, synthetic construct
  misc_feature 1..1278: note = source = /note="Description of Artificial Sequence: Synthetic coding sequence"
  source 1..1278: mol_type = other DNA
atgggcgagcctggccagagtccaagccctcgaagctcccacggcagcccccccacactatctacactcactctgctgctgctcctctgcgggcatgcgcattcgcagtgtaaaatcctcagatgcaacgcggagtacgtttcctctacactgtctttgagaggcggaggcagctccggtgctttaaggggcggggggggaggcgggagagggggtggtgtcggcagcggcggcctctgcagggctctccgcagctacgccctgtgcaccaggaggaccgcaagaacgtgcaggggcgatctggcctttcacagtgctgtccacggcatagaggatcttatgatccagcataattgcagccggcagggacccacggcacccccaccacccaggggacccgctcttccaggtgcagggagcggcctgcctgcccctgacccctgtgactatgaagggagattttctagactgcacgggcgcccgccaggttttctgcactgtgctagctttggtgatcctcacgtgcgaagttttcatcatcacttccacacatgtcgagttcagggcgcctggcccctgctagataacgattttttatttgtccaggcaacatcctctcccatggccctgggtgctaacgccacagccacacgaaagctgaccattatttttaagaacatgcaagaatgcatcgatcaaaaggtttatcaggccgaggtagacaacctgccggtggcctttgaggacggctctataaacggcggcgacaggccaggagggtcctcactgtccattcagaccgcgaaccccgggaatcatgtggagatccaggctgcatacatcgggacaacgatcatcatccgacagaccgctggccagttgagtttctcaatcaaggtggccgaggacgtggctatggctttttcggcagaacaggacctccagctgtgcgttggcggatgcccacccagccagaggctgtctcgatcagaacgtaatcgaagaggcgccatcaccatcgacactgctagacgattgtgcaaggaaggccttccggtcgaggatgcctacttccatagttgtgtttttgacgtgctgataagtggggatccaaactttaccgtggctgcccaggccgccctggaggacgctcgagcgtttctccccgacctggaaaaactgcaccttttcccgtctgacgccggtgtgccattgtcgagcgccaccttactcgcccctctcttatccggcctgttcgtgttgtggctgtgtatacag

SEQ ID NO: 13538 - DNA, 1278 bp, synthetic construct
  misc_feature 1..1278: note = source = /note="Description of Artificial Sequence: Synthetic coding sequence"
  source 1..1278: mol_type = other DNA
atgggcgagcccggccaatcacccagtccaagatcatcccatgggtccccaccgacgctctccaccttgacactactgctgttactatgtgggcacgcacactcacaatgcaaaatccttcggtgtaacgcagaatacgtgagcagtacgctgtccctccgtggcggaggatcctcaggggcactgcgtggggggggagggggcggacgaggcggaggcgtgggaagcggcggactgtgtcgagccttgaggagttatgccttgtgcacgcggcgcacagcgaggacttgccggggggatttggcattccactccgccgtgcacgggatcgaggacctcatgattcagcacaactgctctaggcaggggccgacagccccccctcctcctcggggccccgcactgcccggagccggatcaggtctgcccgcacctgatccgtgcgattacgaagggcggttttcccgccttcacggtcggccaccaggctttctacactgcgctagcttcggcgaccctcatgtcagaagcttccatcaccacttccacacctgtagagttcagggagcctggcctctgcttgacaacgactttctttttgtgcaggccacttcatcacccatggctcttggagcgaacgctacagcgacacgcaagctgaccatcattttcaaaaacatgcaggaatgtatagaccagaaagtgtatcaggctgaagtcgacaaccttcccgtggccttcgaggacggcagcattaacggcggcgaccgacccggcgggtccagtctgagtatccagaccgcgaatcccggcaaccacgtagagattcaggcggcgtacatcggcacaacaatcattatccggcaaacagcaggacagttaagtttcagtatcaaggtggccgaagacgtggctatggcatttagtgccgagcaggaccttcagctgtgcgtggggggatgcccaccctcccagagactcagtaggtccgagagaaacagaagaggggctatcaccatcgatactgcacggaggctgtgcaaagagggcctcccagtcgaggatgcatattttcattcttgcgtgttcgatgtgctgatttcaggcgatcccaattttaccgttgccgcacaagctgccctggaagacgcccgagctttcctgcccgatttagagaaacttcaccttttcccctctgatgccggagttcctctgtcatccgctacactgctcgcacccctgctgtctggtctatttgtcctctggttatgcatccag

SEQ ID NO: 13539 - DNA, 1278 bp, synthetic construct
  misc_feature 1..1278: note = source = /note="Description of Artificial Sequence: Synthetic coding sequence"
  source 1..1278: mol_type = other DNA
atgggagaacccgggcagtcaccgtccccgcggagctcccatggatccccccccacacttagtactctgacactgctgctcctgttgtgcggacatgcacactcccagtgtaagattctaagatgtaacgcagaatatgtgtcttccactctgtccctgaggggcggcggatcctctggtgccctcagaggcggcgggggaggtggcagaggggggggggtgggctcaggtggactgtgtagggccctgcgaagctacgcactctgcacacggagaactgctcgaacctgccgaggggacctggcctttcattccgcagtgcacggtatagaggatctcatgatacagcataattgttcacgccagggtcctacagctcctcctccaccccgcgggcctgcgctgcctggtgccggatccggcttgcctgcacccgatccctgcgattacgaggggcggttcagtcgtctccatgggaggcctccaggctttctgcactgcgcctctttcggtgacccgcacgtgcgcagctttcaccaccacttccacacatgtcgcgtgcagggagcctggcccctgctggataatgactttctctttgtccaggctacatcttctccaatggcgttgggagccaatgccactgcaacccgcaagctgaccatcatcttcaaaaacatgcaggaatgcattgaccagaaggtgtatcaggcagaggtggacaatctgcctgtggccttcgaggatggaagcatcaacggtggagaccgcccaggaggcagttccctttccatccagacggccaaccctggaaatcatgtagaaattcaggcagcttacatcggcacgaccattattatcaggcagacggcaggacagttaagctttagtatcaaagttgcagaggatgttgcaatggccttctctgctgaacaggatttgcagctgtgcgtgggtgggtgccctccctcccagaggcttagccgttcggaaaggaatcgtagaggtgctataaccatagataccgcgcgacgcctgtgtaaggagggcctgcctgtggaagacgcgtatttccattcatgcgtgtttgatgtgcttatcagtggtgaccctaactttactgtcgccgctcaagccgcgctcgaggacgctcgtgcctttttacccgatcttgaaaagctgcacctgtttcccagtgacgccggggtcccgctgtcctctgccacactcttggcccctctgctctctggcctgtttgtgttgtggttgtgcatacag

SEQ ID NO: 13540 - DNA, 1278 bp, synthetic construct
  misc_feature 1..1278: note = source = /note="Description of Artificial Sequence: Synthetic coding sequence"
  source 1..1278: mol_type = other DNA
atgggtgagcctggacaatctccatcacctcggtcaagccacggatcgcccccaaccctgtcgacccttaccctgctgctgctcctgtgcggacacgcacattcgcaatgcaaaatccttcggtgtaatgcagaatacgtctccagcactctgtcgctgcgtggcgggggatcctcaggagcactgagaggtgggggaggtggtggtagaggtggcggagtgggctcggggggtctttgtagagcgcttcggtcgtacgcgctttgtacgcggcgcactgcaagaacctgccggggtgatctggcattccactccgcagtccacggaatcgaggatctcatgatccagcacaattgttcaaggcagggtcctaccgcccctcccccaccacgtggacctgccctgccaggagcaggatccggtctgccagcgcccgacccttgtgactacgaaggtcgcttttcgcgcctgcatggtagacctccaggatttctgcattgtgctagctttggagatccccacgtccggtcctttcaccatcattttcatacctgccgcgtgcaaggcgcctggccactgcttgataacgatttcctctttgtgcaggctacctcatcaccaatggcacttggtgcgaacgctactgcaacccggaagctgaccattatcttcaagaatatgcaagaatgcatagaccaaaaagtgtaccaggcagaggtggacaatttgccagtggcctttgaggacggttccattaacggaggggatcgtcccgggggctcgtcactttccattcagaccgcgaaccctggaaatcatgtcgaaattcaggcagcttacatcggtaccactattatcatccggcaaaccgcaggccagctgtccttcagcatcaaggtcgcagaagatgtggcaatggcgttctccgctgagcaagatctgcaactgtgtgtgggcgggtgtcctccatcccagcggttgtccagatcggaacgaaacagacggggcgccatcaccattgacaccgcccgtagactttgcaaggaaggactgccagtggaggacgcttactttcattcctgtgtctttgacgttcttatttccggtgatccgaatttcacggtcgcagcccaagccgcattggaagatgcacgcgcgttcctccctgatcttgagaaacttcatcttttcccttcggatgcaggagtgcccctgtcctcggcaactttgcttgctccccttctgagcggtcttttcgtgctgtggctttgtattcaa

SEQ ID NO: 13541 - DNA, 1278 bp, synthetic construct
  misc_feature 1..1278: note = source = /note="Description of Artificial Sequence: Synthetic coding sequence"
  source 1..1278: mol_type = other DNA
atgggagaaccagggcagtccccatctcctcggtcatcgcacggttcccccccgaccctatctacattgacactgctgctgctcttatgtggacacgcccactcacaatgcaagatactgaggtgcaacgccgaatacgtctcttcaaccctgagcttacggggcggcggcagtagcggggccctcagggggggaggagggggtgggcggggcggcggggtcggtagcggaggcttgtgtagggccctgaggtcctatgcactgtgtacccggaggaccgcaaggacgtgtagaggcgatctagcttttcacagtgcagtccatgggattgaggaccttatgatccagcacaactgcagtcgccaaggcccaaccgccccacctcctccccggggcccagccctacctggcgccggctctgggctcccagctcctgacccatgcgattatgagggccgtttttcacggttgcatggaagacctccagggtttctccattgtgcctctttcggcgatccccacgtgcggagcttccaccaccactttcacacctgcagggtacagggggcatggccgctccttgacaatgacttcctgttcgtgcaggctaccagctcaccaatggcattgggcgccaatgctacagctactcgtaagctgacaataatatttaaaaacatgcaggagtgtatcgatcagaaagtgtatcaggccgaggtggataatctgcctgtcgcctttgaagacggctccataaatgggggagatagaccgggagggtcttcgttgtccattcaaaccgcaaacccaggaaatcacgtggagatccaggccgcatatatcggaaccacaattataatccggcagaccgcgggccagctgagcttttccatcaaggtggccgaagatgtggccatggctttctctgccgaacaggatttacagctctgcgtgggcggatgccctccatcacagcggttgtcccgatcagagcgtaatcgtcgcggtgcgataactatcgatacagctcgtagactctgtaaggaaggcctgccagtggaggatgcctactttcattcttgtgtgttcgatgttctgatctccggcgacccaaatttcacagtggccgcccaggcggccctagaggacgccagagcctttcttcctgatttggagaagctgcacctgtttccctccgatgctggggtgccactctcatctgctacactgctcgcccccctcctttctgggctgttcgtactgtggctctgcatccag

SEQ ID NO: 13542 - DNA, 1278 bp, synthetic construct
  misc_feature 1..1278: note = source = /note="Description of Artificial Sequence: Synthetic coding sequence"
  source 1..1278: mol_type = other DNA
atgggggagcctggccagtcccctagtcctcggagctctcatggaagcccgccaaccttgagcaccctgacactgttgctgctgctttgcggacatgcccacagccagtgtaagattctcaggtgcaatgccgaatatgtgtcatcaacgttatccctgcgaggcgggggttcctccggggctctgcggggagggggcggaggaggccggggggggggcgttggctccggcgggctctgtagggcattgcgctcctacgccctgtgtacgagacggaccgctcggacttgtcgcggcgacttggccttccactctgccgttcacggtatagaggacctgatgattcagcacaactgcagccgccaggggcctaccgcccctcccccccctcgcggacccgctcttcctggggctggaagtggcctgcccgctccggatccctgtgactatgaaggaaggttctctagactgcacggcagaccccccggttttctgcattgcgccagcttcggggatccgcacgttagatcgttccatcaccacttccatacctgtcgcgtccagggggcctggccgctccttgacaatgacttcctctttgtgcaagccacaagttcaccgatggccctcggagcaaacgccaccgctactcgcaagctgacaataattttcaaaaatatgcaggaatgcatcgatcaaaaagtttaccaggccgaggtggataaccttccagtagcgttcgaagatggcagcattaacggcggggaccgcccaggcggctcttccctatcgatccaaactgctaaccccggcaatcatgtggaaattcaggcagcctacattggaacaaccatcattatacggcagaccgcaggacaattatctttttccattaaggttgcagaagacgtggctatggctttcagtgccgagcaggatctccagctctgcgtagggggatgtccccccagccaacggctgtctcgaagcgagaggaatcgtcgaggcgccattactatcgatacagctcggagactatgcaaagaggggctgccggtcgaagacgcgtacttccattcgtgcgtgtttgatgtgctaataagtggcgacccaaacttcaccgttgccgcacaggccgctctggaggatgctcgggcctttctgccagatctcgaaaaattgcacttgtttccatctgacgcaggtgtgccactttccagtgctactctgctggcaccgctgctgagcggcttgtttgtactttggctttgcatacag

SEQ ID NO: 13543 - DNA, 1278 bp, synthetic construct
  misc_feature 1..1278: note = source = /note="Description of Artificial Sequence: Synthetic coding sequence"
  source 1..1278: mol_type = other DNA
atgggcgagcccgggcagtcgccatcacccagatctagccatggtagccctcccacgctgtcaaccctaactttgctgttgctgctgtgcggtcacgcccatagccagtgtaaaatacttcggtgcaacgccgaatacgtgtcctccactctctcacttcgggggggcggcagcagcggagctcttcgcgggggaggcggaggcgggagagggggaggcgtggggagcgggggcctgtgtcgagccctgagatcgtacgcactctgtacgaggcggacagcccgcacatgtagaggcgacctggctttccattcggccgtccatgggattgaggacctcatgatacagcataactgttcgaggcagggtcccaccgctccccctcccccccgtggaccagcgttgccaggagcagggtcaggactgcctgcccccgacccctgcgattatgaagggagattttccaggcttcatggccggccccccggattcttacactgtgccagtttcggagatccacacgtgagatcgtttcatcaccacttccacacgtgtagggtccaaggggcatggcctctgctcgataatgattttcttttcgtgcaggccacctcgagcccaatggcgctgggtgccaacgccacagccactagaaagttgactattatattcaaaaatatgcaggagtgcattgaccagaaggtgtatcaagcggaggtggataatctgccggtcgcctttgaggatggctccattaacggtggggaccggccaggaggatccagtctgtctatccagacagctaatcccggaaaccatgtcgaaatccaggcagcttatattggaacgacaattattatcaggcagactgctggacagctcagcttctctattaaggtggccgaggacgtggctatggctttttctgccgaacaggatttacagctgtgcgtggggggctgcccaccgagccagcggttaagtaggtccgaacggaatcgacgtggcgcaattaccatagacaccgcacgccggctttgtaaggagggcctgcccgttgaggatgcgtatttccactcttgtgtatttgacgtgctaatcagcggggaccccaatttcaccgtagcagcacaggccgcgctcgaagatgcacgagcatttctcccagatcttgaaaagctgcatcttttcccatccgacgcgggggtccccctctcatcggctaccttgctagctccattgcttagtggactcttcgtgttatggttgtgtattcaa

SEQ ID NO: 13544 - DNA, 1278 bp, synthetic construct
  misc_feature 1..1278: note = source = /note="Description of Artificial Sequence: Synthetic coding sequence"
  source 1..1278: mol_type = other DNA
atgggagagccaggtcaatccccttccccgcggagcagtcacggatctccgcccacgctgtcaactctcactctgctccttctcctgtgcggacatgctcattcccaatgcaaaattcttcggtgtaacgctgaatacgttagcagcaccttgtcgttgaggggaggagggtcatccggagccctccgaggaggaggtggaggaggacgcgggggtggcgtcgggtcgggcggactctgccgcgcgctgcggtcgtacgcactctgtactcgcagaactgccaggacttgcagaggggacctggctttccatagcgcagtacacggcatcgaagatcttatgattcagcataactgttcgaggcagggaccgaccgcccctccgcccccgaggggtcctgcactgccaggagcaggctccgggctgccggccccagatccctgcgactacgagggacggttctcaagactgcacggcaggcccccgggttttctccactgcgccagcttcggcgatccacacgtcagatccttccaccaccattttcacacttgcagggtgcaaggggcatggcctctccttgacaacgacttcctgttcgtgcaagcaacctcatcaccgatggctctgggcgcaaatgcaaccgctactcgcaaactgaccattatcttcaagaacatgcaagaatgcatcgaccaaaaggtgtaccaggccgaagtggacaacctgccggttgcgttcgaggatgggtcaatcaatggcggagatcgtccgggaggctcctcgttgtcgatccagactgcgaatcccggcaaccacgtggaaatacaggcggcgtacattgggaccaccatcatcatccggcagacggccgggcagctctccttctccataaaggttgcggaggacgtggccatggctttcagcgccgagcaagatctgcagttgtgcgtcggcgggtgcccgccgagccagcgactgtcaagaagtgagcgtaatcggagaggtgcaatcaccatcgacactgcaagacgcctgtgcaaggaaggactcccggtggaagatgcctatttccattcatgcgtgtttgacgtgctcatctcgggcgatccgaacttcaccgtggcagcccaggcagctttggaggacgctcgggcctttctgccagacctggagaagctgcatttgtttccctcggacgccggagtgccactgtcgtccgccacccttctggctccgttgctttcgggcctgtttgtgctgtggctgtgtatccag

SEQ ID NO: 13545 - DNA, 1278 bp, synthetic construct
  misc_feature 1..1278: note = source = /note="Description of Artificial Sequence: Synthetic coding sequence"
  source 1..1278: mol_type = other DNA
atgggagagccgggccaatcaccttcaccgcggagtagccatggttcgcctccgaccctgtccacgctgaccctcctccttctcctgtgcgggcacgctcactcccagtgtaagatcctccgctgcaacgccgaatacgtgtcgtcgaccctctccctgcgcggaggaggctcatcgggagcactgcgagggggaggcgggggcggccgcggcggcggcgtcggatccggcggattgtgtcgcgcgctgcggtcatacgccctgtgtactagacggactgcacgcacctgcagaggagatcttgcctttcacagcgcggtgcatggcatcgaggacttgatgatccagcacaattgctcgaggcaaggtcctaccgctccgccgccaccaaggggaccagctctgccgggtgcaggatccggactgccagccccggatccctgcgattacgagggacggttctcccggctgcatggaagaccgcctggctttctgcactgcgcctccttcggcgatccacacgtgaggagtttccaccatcatttccacacttgtcgcgtgcagggagcctggcctttgctggataatgattttttgttcgtccaggccacgtccagccccatggccctgggagccaacgccaccgccactcggaagttgaccattatcttcaagaatatgcaagagtgcattgaccaaaaagtttatcaggcggaagtagataacctccccgtggctttcgaggatggaagcatcaatggtggggacagaccgggtggatctagcctcagcatccagactgccaacccgggcaaccatgtcgaaatccaggcggcctacataggaactacgatcatcattcggcagacggcggggcaattgtccttcagcatcaaggtagcggaagacgtcgctatggctttcagcgcggaacaagatctgcagctctgcgtgggtggctgcccaccgtcccaacgcctctcgaggtcagaacgcaacaggagaggagccatcaccatcgacactgcccggcgcctgtgtaaagagggtctgccggtggaagacgcgtactttcattcgtgtgtgttcgacgtgctgatctcgggggaccctaacttcaccgtggccgcacaggccgcgctggaagacgcgagggcctttctgccggacctggaaaagctgcacctctttccgtcagacgccggagtgccgctttccagcgcaaccctccttgctccgctgctgtccggcctgttcgtgctctggctctgtatccag

SEQ ID NO: 13546 - DNA, 1278 bp, synthetic construct
  misc_feature 1..1278: note = source = /note="Description of Artificial Sequence: Synthetic coding sequence"
  source 1..1278: mol_type = other DNA
atgggcgagcctggtcagtccccatcacctagaagctcgcatgggagccccccgacgctgtcaacgctcaccttgcttctgctgctctgtggacatgctcattcacaatgcaagattctgcgttgcaatgcagaatacgtgtcgtcgaccctgtcgctgcgtggaggcggctccagcggcgcacttcgtgggggaggaggaggaggtcgcggtggaggagtgggctccggtggactctgtcgcgcactccggagctacgccctctgcactcgccgcactgcacggacttgtcgtggagatctggcatttcattcggcagtgcacggaattgaagatcttatgatccagcataattgttcaagacaaggacctactgcaccgcccccaccacgcggtcccgcgctccctggagccggctcaggcctccctgcacctgatccgtgcgattacgaaggacggttttcgaggctccatggtcgaccgccaggattcctccattgtgccagcttcggagatccacacgtgcgatcattccatcaccactttcatacctgtagggtgcaaggagcgtggccactgctggataatgactttctgttcgttcaagctacttcgtcaccgatggccttgggagccaatgcaaccgccacgaggaagttgacgatcatctttaagaacatgcaggaatgtattgatcaaaaggtgtaccaggcggaggtggataaccttccagtcgccttcgaagatgggtccataaacggtggagatagaccaggcggatcgtcactttcgattcaaactgcaaacccaggaaatcacgtggagattcaagccgcatacattggaactaccatcatcatccgacagaccgcaggacaactgtcattctcgattaaagtcgcagaagatgtggcaatggcattcagcgcagaacaggacctgcaactgtgtgtcgggggttgtcctccatcccaaaggctttcgcgatcggaaagaaatcggagaggggcaatcacgattgacaccgctcggagactgtgcaaagagggtttgcctgtggaagatgcgtactttcatagctgtgtatttgacgtgctcatttcgggtgaccccaactttacggtggcggcccaggcagcactggaagatgccagagcatttctgccggatctcgaaaaacttcatctgtttcccagcgatgcaggagtccccctttcgtcagcaacccttcttgccccactcctttcaggcttgtttgtcctttggttgtgcattcaa

SEQ ID NO: 13547 - DNA, 1278 bp, synthetic construct
  misc_feature 1..1278: note = source = /note="Description of Artificial Sequence: Synthetic coding sequence"
  source 1..1278: mol_type = other DNA
atgggagagcccggtcagtcaccatcgccacgatcatcacatggatcaccgccaactctctcaaccctgaccctgcttctcctgctctgcggtcatgcccacagccaatgtaagatcctgcgctgcaacgcagagtacgtttcctcgaccctctcacttcggggcggaggaagctcaggagcactgcggggaggaggcggagggggacgcggcggaggagtgggaagcggagggctgtgtagagccctcagatcatatgccctgtgcacccgccgtaccgccaggacgtgcagaggtgacctggcattccattccgccgttcacggaatagaggacctcatgatccaacacaactgctcgaggcagggaccaaccgcgcctcctccgcctcgcggacccgcattgcctggcgctggctccggccttcccgcaccggacccgtgcgattatgagggccggttctcgcgcctgcacggcaggccccctgggttcctccactgcgcgtccttcggagatccgcatgtacgttcgtttcaccaccatttccacacgtgccgcgtccagggcgcatggccgctcctcgacaacgacttccttttcgtgcaggccacctcttcgcctatggcactgggagctaacgcaactgcgaccagaaagctcaccatcatcttcaagaatatgcaagaatgcattgaccaaaaagtgtaccaggccgaggtggacaacctgccggttgcctttgaggacggatcgatcaatggaggcgatcggcctggaggaagctccctcagcatccaaactgccaaccctggcaaccacgtcgagatccaggccgcctacatcggaactaccatcatcatccgccaaaccgcaggacaactgtcattttccatcaaggtggccgaagatgtcgcaatggcgttctcggcagaacaggatctgcagctctgtgtcggaggatgcccgccttcacagcgcttgagccgctccgaacggaacaggcggggtgctatcactatcgacactgcaaggcggctgtgcaaagaaggactgcctgtggaagatgcgtacttccattcctgcgtgttcgacgtgctcatcagcggtgacccaaatttcactgtggcagcacaggctgcgctcgaggacgcgcgggcctttctgccggatctggaaaaacttcatctgttcccatccgacgccggcgtgccgctgtcgtcggccaccctgttggcgccgttgctgagcggcctcttcgtgctctggctgtgcattcag

SEQ ID NO: 13548 - DNA, 1278 bp, synthetic construct
  misc_feature 1..1278: note = source = /note="Description of Artificial Sequence: Synthetic coding sequence"
  source 1..1278: mol_type = other DNA
atgggagaaccaggccaatccccttcgcccaggagctcgcacggaagcccgcctactctttcgactcttacgctcttgctgcttctctgtggtcacgctcactcgcaatgtaagattctgcgttgcaatgcggaatatgtgtctagcactctgagcttgcggggaggtggttcgtccggtgcgctgcggggtggtgggggtggaggccgcggaggaggagtaggatcagggggactgtgtagggcactccgttcgtacgcactgtgtactcgtagaaccgcccggacctgccggggggatcttgcatttcattccgcagtccatggtattgaggacttgatgatccaacataattgcagcagacagggacctactgcccctccaccaccgaggggacctgcacttcctggggcgggctccggactgccggcgccagacccgtgtgattacgagggtaggttttcgagacttcatgggaggccgccaggatttctgcattgtgcctcatttggtgatcctcacgtccggagctttcaccaccattttcatacctgtagagtccagggcgcctggccactccttgataatgatttcctcttcgtgcaagcgactagctcacccatggcacttggggccaacgccactgcaacccgcaaactgaccatcattttcaagaacatgcaagaatgtatagatcagaaagtctaccaggccgaagtcgataacctgccagtggcattcgaggatggatcgataaacgggggtgatcggcctggtggttcgagcctgtctattcaaaccgcaaacccaggaaatcatgtggagattcaggccgcttacattggaaccaccatcattatccgccagactgctggacagctctcgttttcgatcaaggtggctgaggatgtggccatggccttctccgcggagcaggaccttcagctctgcgttggcgggtgccctccttcccagagactctcgcgatctgaacgcaacagacgcggagcaatcactattgatacggcacgtagactttgcaaagaggggcttccagtcgaggacgcatacttccattcgtgtgtgtttgatgtcctgatctccggtgatccgaacttcaccgtcgcagcccaagctgcactggaggacgcacgtgctttcttgccagacctggagaagttgcatctgtttcccagtgatgcaggtgtgcccttgagcagcgcgacgctgctggccccgcttctgtcaggcctttttgtgctgtggctttgtatacag

SEQ ID NO: 13549 - DNA, 1278 bp, synthetic construct
  misc_feature 1..1278: note = source = /note="Description of Artificial Sequence: Synthetic coding sequence"
  source 1..1278: mol_type = other DNA
atgggtgagcccgggcagagcccgtcaccacggagtagccacggaagccctcccacattgtcaactctcactttactgctgctgttgtgtggtcacgcgcactctcagtgtaagattctgagatgcaatgctgaatatgtttcctcaactctgtcactgcggggtggcggatcctctggtgcgctgcggggcggcggggggggagggcgcgggggtggcgtcggtagcggagggttgtgtcgggccctgagatcttatgcactatgcactaggaggacggctagaacctgccgcggagatctggccttccactccgccgtccacgggatagaagatcttatgatacagcacaattgctcacgacagggccccactgcgcccccaccgccccgagggcctgccctcccgggcgctgggtccgggcttcccgcacctgatccctgtgattacgaaggtcgcttcagccgtcttcatggtaggccaccgggttttctgcattgcgcaagctttggcgatccacatgttcggtccttccatcatcacttccacacatgtcgcgtccagggggcgtggccattgctggacaacgacttcctttttgtacaggccacaagctctccgatggccttaggtgcaaacgccaccgccaccaggaagttgactattatcttcaagaacatgcaagagtgtatagaccagaaagtctaccaggccgaagtggacaatttaccagttgcttttgaggatggcagcatcaatggaggggacaggccgggtggatcatctctcagcatccagacagccaaccctggaaatcacgttgaaatacaggccgcatatattgggacaacaataatcattcgtcagacagccgggcaattgagcttcagcatcaaagtcgcagaggacgtcgctatggccttctccgcagagcaagatctgcagctctgcgtgggcggttgccctcccagtcagcgtttgagccgaagcgagaggaatagaagaggagccataactatagatactgcacggcgtctttgcaaagaaggattgccagtcgaagacgcctatttccactcttgtgtgtttgacgtgctgatctccggtgatccgaattttacagtggccgcgcaggccgccctggaggatgcacgggcatttctccccgatcttgaaaagctgcatctttttccaagcgacgcaggcgtgccgctgtcctctgccactctcctggcacccctactgtccgggctgttcgtcttgtggctgtgtatacaa

SEQ ID NO: 13550 - DNA, 1278 bp, synthetic construct
  misc_feature 1..1278: note = source = /note="Description of Artificial Sequence: Synthetic coding sequence"
  source 1..1278: mol_type = other DNA
atgggcgagccgggtcaatccccatctccacgctcttcgcatggctccccaccaactctgagtactctgaccctgcttcttcttctttgtggccatgcccactcgcagtgtaagattcttagatgcaacgcagaatacgtgtcctccactctctcattgcgaggcggtggatcgtcaggtgcactgagaggcggagggggtggagggcgcggcggaggtgtcggatcgggaggtctgtgtagggcactgcggtcctacgcactctgcaccagacggactgcacgcacttgtagaggggatttggccttccattcggccgtccacggcattgaggacctgatgattcaacataattgctcacgtcagggcccaaccgcacctcctccccctcgaggaccggcactgcctggcgcaggctcgggacttcccgcccccgacccttgtgattatgagggtcgcttttcgagacttcacggacgccccccaggttttctgcattgcgcatcatttggagatccacatgtgcgctctttccatcatcactttcatacttgccgcgtgcaaggtgcctggcccctgctggataacgactttctttttgtgcaggcgacctcctcgcctatggcactcggggcgaatgcgactgcaacccgaaagctcaccatcattttcaagaacatgcaggaatgcattgatcagaaggtttaccaagcggaagtggacaacctccccgtggcattcgaagatggcagcatcaacgggggcgaccgtcccggggggtcgtcgctttccatacaaaccgccaatcccgggaaccatgtggaaatacaggcagcctacattggtactactattatcattagacaaactgcaggccaactgtcctttagcattaaggtcgcagaggatgtcgccatggcgttctccgccgaacaggacctccaactttgtgtcggaggatgccctcctagccaaaggctgtcacggtcggaaaggaaccgtagaggtgcaatcaccattgacactgcgcgcaggctctgcaaagaagggctcccagtcgaggatgcatacttccatagctgtgtgtttgacgtgctgatttcaggtgaccctaactttaccgtggcggcacaagcagcactcgaagatgcaagagcattccttcctgacctggagaagctgcacctgttcccctcggacgcaggagtgccgctgtccagcgccactctcctggcaccacttctgtctggtcttttcgtgctgtggctctgtatccaa

SEQ ID NO: 13551 - DNA, 1278 bp, synthetic construct
  misc_feature 1..1278: note = source = /note="Description of Artificial Sequence: Synthetic coding sequence"
  source 1..1278: mol_type = other DNA
atgggggaacccgggcagtcaccctctccaagaagtagtcacgggtctcctcccacactctccacactgacattactcttactgctctgtggacatgcccactcccagtgcaagatcctgcgctgcaacgctgaatatgttagttccacactaagtcttcggggaggaggatcttctggagccctccgaggaggagggggaggaggacggggagggggggtgggatctgggggattgtgtcgggccctgaggagttatgctttatgcacacggagaactgcacggacttgtagaggagatctcgccttccactccgctgttcacggaatcgaagatttaatgatacagcataactgcagtcggcagggacctacagccccaccacccccccgagggccagctctgcccggagctggatctgggctccctgctcctgatccctgtgattatgaagggaggttctctcgactgcacggaagacccccagggttcctacattgcgcctcttttggagatcctcatgtgagatctttccaccaccactttcatacatgtcgagtacagggggcttggccattattagataacgatttcctcttcgttcaggcgacttcatccccaatggccttaggagctaatgccacagctacaagaaaactaacaataatatttaaaaatatgcaagaatgcatagatcagaaagtttaccaggcagaagtcgataatctacctgtggcttttgaagacgggagtattaacgggggggatcgccccggagggagttccctgtcaatacagacggcgaatccaggaaatcatgtggaaatccaggctgcatatatcggaactactataatcatcaggcagacagcagggcagctctcattttctataaaagtggctgaagatgtagcaatggccttttccgcagaacaggatctacagctttgcgtggggggatgtccaccctcccagaggctctctaggagtgaacgaaatagacgcggagccataacaatagatacagcccgtagactctgtaaagaaggacttcctgtggaagatgcttattttcactcatgcgtgtttgatgtcctaatatctggagatcccaactttacagtggctgcacaggctgctctagaagatgcccgggccttcctcccagatttagagaaactccacctatttccctctgacgctggggtcccactttcctctgccacactgcttgcacctcttctttctggattattcgtactatggttatgcatccag

SEQ ID NO: 13552 - DNA, 1278 bp, synthetic construct
  misc_feature 1..1278: note = source = /note="Description of Artificial Sequence: Synthetic coding sequence"
  source 1..1278: mol_type = other DNA
atgggtgagcccggacagtccccttcccccaggtcaagtcatggtagccctcctaccctctctaccctcactctcttgcttttgctgtgcggacatgcccatagccaatgcaagatcctgaggtgtaacgctgaatatgttagctccaccctctctcttcgtggcggcggttcttctggcgctttgcgtggtggaggcggcggtggtagaggcggtggcgtgggatcaggtggcctgtgtagggctctccgcagttacgctttgtgtactagaaggaccgctcgcacatgtaggggtgatttggccttccatagcgctgtgcacggtatcgaagatctgatgatacagcacaactgttctcgtcagggtcccacagcccctccaccaccacgtggccctgccctgcccggagccggatccggcctgcctgccccagacccctgcgactacgagggaaggttctcccgtctccacggtcgtccacctggattcctccactgtgcctcctttggcgacccccatgttcgctcttttcatcaccactttcacacctgccgcgtccagggcgcctggcctttgctggacaacgacttcctctttgtccaggctaccagctctcccatggccctgggcgccaacgccactgccaccagaaagctcactataatcttcaagaacatgcaggagtgtattgaccagaaggtctatcaggctgaggtggataacctgccagtcgctttcgaggatggaagcatcaatggtggagaccgcccaggcggtagttcactgtccatccaaactgcaaacccaggcaaccatgtggagattcaggctgcttatatcggtaccactatcatcatcaggcaaacagcaggtcaactgagcttcagtatcaaagtagctgaggacgtcgctatggcttttagcgctgagcaagatctgcaactctgcgtcggcggatgtcccccctcccagcgcctgagccgttccgaacgcaatcgcaggggagccataaccattgacactgcacgccgtctctgcaaagaaggcttgccagttgaggacgcttatttccattcatgtgtctttgacgtccttatctcaggtgatcccaattttacagttgccgcccaagcagcattggaagatgctcgcgcttttctgcctgatctggagaagttgcatctcttccccagcgacgctggagtgcccctctcatcagctacattgctggcacccctgctgtcaggcctctttgtactttggctctgtatccag

SEQ ID NO: 13553 - DNA, 1278 bp, synthetic construct
  misc_feature 1..1278: note = source = /note="Description of Artificial Sequence: Synthetic coding sequence"
  source 1..1278: mol_type = other DNA
atgggggaacctgggcaatccccaagccctcgaagctcccacggttcgccacccaccttgtcaacactgaccttgctcctcttgctttgtggccacgcacactctcaatgtaaaatcctgcgctgtaatgccgaatacgtctcttccacactgtctttacgcgggggcggatctagcggcgcccttcgaggcggcggaggggggggccgcggaggcggcgtgggctctggcggcttatgtagggccctgcggtcgtacgcgctgtgtacccgcagaacggccaggacatgcaggggagacctggcatttcacagcgccgtccacgggatagaagatctcatgattcaacataactgtagccgtcaagggcccacagccccccctcctcctcggggacccgcccttcctggcgcaggtagtgggctgcccgccccagatccctgtgactacgagggccggttttcccggctgcacggtcgacccccgggatttttacactgcgcgtcatttggggacccacatgtccggtcatttcaccaccatttccatacctgcagagtccagggggcttggccgttactggacaacgattttctgtttgtgcaagcaaccagttcaccgatggcgctgggtgccaacgccaccgcgactcgtaagctgactattatcttcaaaaacatgcaggagtgcatagatcagaaggtgtaccaggcagaggttgataacctgcccgtggctttcgaggacggcagtataaacggaggtgatagacctgggggcagtagcctctctatacaaactgctaatccaggtaatcatgtggaaatccaggccgcatatataggcaccaccatcatcatccggcagaccgccggccagttgtctttttctatcaaagttgcggaagacgtggccatggctttctccgctgaacaagatcttcagttgtgtgtgggtggttgtcctcccagtcagcgtttatctcggagtgaacgcaatcggcgcggtgccatcaccatagatactgctagacggctgtgcaaggagggattaccagttgaggacgcctatttccactcttgcgtgttcgatgtgcttatttctggagatcccaatttcacagtcgcagctcaagcggccctcgaagacgcacgggccttccttcccgatcttgagaagttacatctctttccttccgacgctggcgtaccgttgagttctgccacactgctggcccccctgctctctggcctgttcgtactgtggctgtgtatacag

SEQ ID NO: 13554 - DNA, 1278 bp, synthetic construct
  misc_feature 1..1278: note = source = /note="Description of Artificial Sequence: Synthetic coding sequence"
  source 1..1278: mol_type = other DNA
atgggagagccgggccagtcaccttcgccaagatccagccatggaagcccgccgactctctccactctcactctgctcctcttgctgtgcggccatgcccatagccaatgcaagattctccggtgcaacgccgagtacgtgtcatcgactctgtctctccggggcggcggatcgtcgggagcactgcgcggcggagggggaggtggccgcgggggaggagtgggatctggtggcctctgccgcgccctgcgctcgtacgccctgtgtacccgcagaacggcgcggacctgccgcggggatctcgcctttcactccgcggtgcatggaatagaagatttgatgatccagcacaattgtagccggcagggaccgactgccccacccccaccacgcggacccgcgttgcctggcgcaggctccggactccccgctccagatccgtgcgactacgagggaaggttcagcagactgcatggtcggccgcccgggttcctccactgcgcgagcttcggtgacccgcacgtgagatccttccaccaccatttccacacttgccgggtgcagggtgcctggcccctcttggacaacgacttcctgttcgtgcaagcgacgtcatccccaatggctctgggagcaaatgccaccgcgacgcggaagttgactatcatctttaagaacatgcaggagtgtatcgaccaaaaggtgtaccaggcggaggtggacaatctgcccgtggccttcgaggacgggtcaatcaacggaggagatcgccctggaggcagctcactgagcatccaaaccgcaaaccctggaaatcacgtggaaatccaggcagcttacatcggcaccaccatcatcattcgtcaaactgccgggcaactgtctttctcgatcaaagtggccgaagatgtcgccatggccttctcggccgaacaggacctgcagctgtgcgtgggtggatgccccccgtcccagagactctcaagaagcgaaagaaatagacgtggagcaatcactatcgacacggcccgcagactttgcaaagaaggactgccagtcgaagatgcgtactttcattcttgcgtgttcgatgtccttatctcaggagatccaaacttcactgtggctgcacaggcggcactggaggacgctcgggccttcctgccggaccttgagaagttgcatttgtttccatccgatgcaggagtcccgttgtcgtccgccactttgttggcaccgctcctttccggcctcttcgtgctgtggctgtgtatccag

SEQ ID NO: 13555 - DNA, 1278 bp, synthetic construct
  misc_feature 1..1278: note = source = /note="Description of Artificial Sequence: Synthetic coding sequence"
  source 1..1278: mol_type = other DNA
atgggcgagccagggcagtcaccaagccctcggagttctcatggctcaccgccaactctgagtacgctgacgttgctgctgctcctgtgtgggcacgcccacagccaatgtaaaattcttcgctgcaatgccgaatatgtgtcctccaccctgtccttgcgggggggaggatcttcaggtgcgctccggggtggagggggaggggggagaggcggaggcgtcggctctggcgggctgtgccgggccctgcgctcctatgccctctgcactagacggacggcaaggacgtgtagaggtgatttggctttccactctgctgttcacggcattgaagaccttatgattcagcacaattgtagtaggcaaggaccaacggctcctccccctccacgcggtccagctctcccgggcgccggctccgggctgcccgccccagatccctgcgactacgaggggaggttcagtagactccatggacgaccccctgggttccttcattgtgccagctttggagacccgcacgtcaggtcttttcaccaccacttccatacctgccgagtccaaggagcttggcccctgttggacaacgatttcctgtttgttcaggctacgtcatcccctatggcgctgggagcaaacgccacagcgacccgcaaacttactatcattttcaagaatatgcaggagtgtatagatcaaaaggtgtaccaggcagaggtcgacaatttgcccgtggcctttgaagatggaagcatcaatggaggcgatcgcccgggaggttctagcctcagcatccagaccgcgaaccccggaaatcacgtagaaattcaagccgcctacattggcaccacgattattattcgacaaaccgccggccagctcagcttctccattaaagtggccgaggatgtggctatggcctttagtgcggagcaggacctgcagctgtgtgtaggggggtgtcccccaagccagcggttgagccgctctgagcgcaaccgccgcggagctattaccatagataccgccaggagattgtgcaaggagggactgcccgtggaggacgcttacttccattcctgcgttttcgacgttctcatctcaggggaccccaactttaccgtggctgcccaggccgccctggaagatgcccgggcctttctgccggacctcgaaaagctgcacctcttccctagtgatgccggcgtgcccctgtcctccgcaaccctcctggcccctctgctgtccggcctttttgtcctgtggttgtgtattcag

SEQ ID NO: 13556 - DNA, 1278 bp, synthetic construct
  misc_feature 1..1278: note = source = /note="Description of Artificial Sequence: Synthetic coding sequence"
  source 1..1278: mol_type = other DNA
atgggagaaccaggacaatccccctcgccaagatcatcccacggcagcccacccacgctctccactctcactctgcttttgctgctgtgcgggcatgcccattcacaatgcaagatcctccggtgcaacgcagaatacgtgtcgtccactctgtcgctgagaggaggaggctcctccggagctctgagaggcggaggagggggaggcaggggcggtggagtgggatcaggtggtctttgccgggccctgcggtcgtacgctctttgtacccggcgcactgcacgcacttgccgcggcgatctcgcctttcacagcgcggtgcatggcatcgaggatctgatgattcagcacaactgctcccggcaagggcctactgcgcccccgccaccacgcggtcccgcccttccgggagcgggatcgggactgcccgcaccggacccatgcgattacgaaggccgcttcagcagactgcacgggcgccctccgggattcctccactgcgcctcatttggcgaccctcacgtccgcagcttccatcaccacttccacacttgccgcgtccagggtgcttggccgctcctggacaacgactttctgtttgtccaggcaacttcgtccccgatggcgctcggagcgaatgcgaccgcaacccgcaaactgaccatcatcttcaaaaacatgcaggaatgcatcgaccaaaaggtgtaccaggccgaggtggacaatctgccagtggcattcgaagatggctccattaacggcggggatcgcccagggggaagctcgttgagcatccaaactgcgaaccctggtaaccacgtggaaatccaggctgcctacatcggcactactattatcatccggcagaccgccgggcaactctcgttctcgatcaaggtggccgaggacgtggcaatggcattctccgccgagcaagatctgcagctgtgtgtgggaggctgtccgccttcccagaggctgagcaggtccgaacggaaccggcgcggggccatcaccatcgacaccgcgcgtcgcctctgcaaggagggactgccggtagaggatgcgtatttccactcctgcgttttcgatgtgttgatctccggggacccaaactttactgtggccgcacaggccgcgctggaagatgcgcgcgctttcttgccagacctcgagaaattgcacctgtttccctccgacgcaggcgtcccgctttcgtccgccactctgctcgcaccgctcctctccggattgttcgtgctctggctgtgtattcaa

SEQ ID NO: 13557 - DNA, 1278 bp, synthetic construct
  misc_feature 1..1278: note = source = /note="Description of Artificial Sequence: Synthetic coding sequence"
  source 1..1278: mol_type = other DNA
atgggcgagcctgggcaaagccctagtcctcgttctagccatggctctccgcctacactaagcaccctcactctcctgctattactgtgtgggcatgctcactcacagtgcaagatcctccgttgcaacgccgagtacgtgagtagcacccttagcctgcgggggggaggaagtagtggtgcgctgcgcggcggcggcgggggggggagagggggcggagttgggtctggagggctgtgtagggcactcaggagctatgctctttgtactcgtcgaactgcacgtacctgtcgcggggacctggcttttcatagcgcagttcatggtatcgaagatttgatgatacagcataattgtagccgtcaaggcccaacggcaccccctccaccacgaggccccgctctgccaggcgcagggagtggcctaccagcaccggatccttgcgactacgaaggcagatttagtcggctccacggtcgccccccaggttttctgcactgcgcaagcttcggggatcctcacgttcgatctttccaccatcatttccatacatgccgggttcagggagcatggcctctcctggataacgattttctgttcgtgcaggcaacgagcagccccatggcattgggcgcaaatgccacagccacccggaaacttacaataatattcaagaatatgcaggagtgtattgatcagaaagtgtaccaggctgaggtggataacctgcctgtcgcctttgaagatggtagcatcaacggtggtgacaggcctggcgggtcctcgttgtcaatacagaccgccaatccgggaaaccatgtggagattcaggcagcctatataggtaccaccattatcattcgtcaaacagccggccagctctcgtttagtattaaggtagcagaggatgtggcaatggcattctccgctgagcaagacctgcagttatgcgtgggggggtgccctccttctcagcgactaagtcgatctgaacggaacagacggggcgccattaccatcgataccgctcgtcgcttgtgcaaagaaggtctgcccgtagaagacgcatattttcatagctgtgtatttgacgtattaatatccggtgacccaaatttcactgtggccgcccaggcagcactggaagatgccagagcattcctccccgatctggaaaagctccatctgtttccttcagatgccggcgtccccctttcttccgcaaccctgttggcacccttactgtctggtttgtttgttttgtggctctgtattcaa

SEQ ID NO: 13558 - DNA, 1278 bp, synthetic construct
  misc_feature 1..1278: note = source = /note="Description of Artificial Sequence: Synthetic coding sequence"
  source 1..1278: mol_type = other DNA
atgggggagcccggacagagcccttccccacgttcatcacatgggtccccacctacattgtcaacactgactctccttttactgctctgtggtcatgcgcattcccagtgcaagatacttcggtgtaacgccgagtacgtaagtagcacgctgtcgctcagagggggggggtcgagcggcgctctaaggggtggaggtgggggagggaggggcggtggcgtcgggtccggaggcctctgcagggccctgcggtcctatgctctgtgcactagacgcacagcccggacctgcaggggcgatttggcctttcactccgcagtacacggaatcgaggacctgatgattcagcataactgcagtcgccaggggccaaccgctcctcccccccccaggggtccggcactgccgggtgcgggaagcgggctaccagctccggacccatgtgactatgagggtcggttcagccgccttcatggccggcctccagggttcctccactgtgcttccttcggcgacccacacgtaaggtccttccatcaccacttccatacatgccgggtgcagggagcctggcctctattggacaacgacttcctgtttgtccaggccacatcttcaccaatggcccttggcgccaatgccacggcaacacggaagctgacaatcatttttaaaaacatgcaagaatgcattgatcaaaaggtgtatcaagctgaagttgataacctccccgtagctttcgaagatgggtccatcaatggcggcgacaggcctggcggctctagtctctccatacagacagcaaatcctggcaatcacgttgagatccaggccgcatatattggcacaactatcatcatacgtcaaacagccggtcagctgtccttcagcattaaggtggccgaggacgtggccatggcatttagcgccgagcaggatcttcaattgtgcgtgggtgggtgccctccttctcaaaggctcagccgctctgagagaaatcgtcgaggggccatcacaatcgacactgcacgaaggctgtgcaaagagggactaccagtggaggacgcctactttcattcatgcgtgttcgacgtgctcatttccggagatccgaactttactgtcgccgcgcaggcagcactggaagatgcaagggcctttctccccgatctggagaaattgcatctgttcccctcggacgcaggggtgcctttgtcctcagccacccttctggctcctctgttgagtggcctgttcgtattgtggctctgtattcag

SEQ ID NO: 13559 - DNA, 1278 bp, synthetic construct
  misc_feature 1..1278: note = source = /note="Description of Artificial Sequence: Synthetic coding sequence"
  source 1..1278: mol_type = other DNA
atgggcgaaccagggcagtcaccgtcgccacggtcctcgcacggttccccacctactctttccacccttaccctcctgctgttgctgtgcggacacgctcatagccaatgcaagatcctgagatgcaatgccgaatacgtgtcatcgacgttgtcattgcggggtggagggtcgtctggagccctccgcggcggcggaggtggaggacggggaggtggcgtgggttcgggcggactgtgcagagccctgaggtcctacgcgctctgtactagacgcaccgcacgcacctgccgcggcgacctcgccttccattcggccgtccatgggattgaggaccttatgatccagcacaactgctccaggcagggacctactgccccaccacctccacgcggaccggcgctccccggcgcgggcagcggactgccggcgccagatccctgcgattatgaaggacggttttccagattgcacggccgcccgccaggcttcctccattgcgcatcgttcggtgacccgcacgtcaggtccttccatcatcatttccacacctgcagggtgcagggagcctggccactgcttgacaacgatttcctgttcgtccaagccacttcctcacctatggccctgggagccaatgccaccgccacccgcaagctgactatcatcttcaaaaacatgcaagagtgcatcgatcagaaggtgtatcaggccgaggtggacaacctgccggtagcctttgaagatggatcaatcaacggtggagatagacctggaggctcttctctttcaattcagaccgcgaacccggggaaccatgtggaaatccaagctgcctacatcggaactactatcatcattcgccagaccgccggacaactctcgttctccatcaaagtggctgaagatgtcgctatggcgttttccgcggaacaggatttgcaactgtgtgtgggtggatgccctccgagccaacggctgtcacgctcggaaagaaacaggcgcggagcaatcactattgacactgcacgtcgcctctgcaaggaggggctgccagtggaagatgcttacttccactcctgcgtgtttgacgtgctgatctcgggtgaccctaatttcacggtggccgcgcaggccgcgctggaggacgctagagccttcctgccggatctcgagaaacttcatctcttcccatccgacgccggggtgcccctgtctagcgctaccctgcttgcaccgctcctgagcggcctcttcgttctctggctctgtatccag

SEQ ID NO: 13560 - DNA, 1278 bp, synthetic construct
  misc_feature 1..1278: note = source = /note="Description of Artificial Sequence: Synthetic coding sequence"
  source 1..1278: mol_type = other DNA
atgggggagcctgggcagtctccaagccctaggagctcacacggatcccctccgacgttgtccactctcactctcctgctccttctgtgtggacacgcacactcacagtgcaaaattctgcgctgtaatgcggaatacgtgtcgtcgaccctctcgttgcgagggggagggtcgtctggcgcactcagaggtggaggaggaggtggacgaggaggtggcgtcgggagcggtggactgtgcagggcccttaggtcgtacgcactgtgcactcgtcggacggcacgaacctgtcggggcgatctcgcctttcatagtgctgtgcatggtatcgaagatctgatgattcagcataattgcagcagacagggtcctaccgcccctccacctccaagggggccagctctgcctggagcaggatccggcctgcctgcaccagacccatgtgattacgagggtcgctttagccgccttcatggtagacctccaggatttctgcattgcgcctcgtttggcgacccacatgtgagatcgtttcaccatcactttcacacctgtagggtgcaaggtgcatggccgctgttggataacgatttcctgttcgtgcaggcaacctcaagcccaatggcactgggagccaatgcgaccgcgaccagaaagctgaccatcattttcaagaacatgcaagaatgtatagatcaaaaagtgtaccaagcagaagtcgacaaccttcccgtcgcatttgaagatggttcgattaatggtggtgatcgccctggaggttccagcctctcgatccagaccgcaaaccctgggaatcatgtggagatccaagcagcctacatcggcacgaccattatcattcgacaaaccgcgggacagctctcgttttccataaaggtggccgaagatgtcgcaatggccttcagcgcggaacaggatcttcaattgtgcgtgggcggatgccctccgtcgcaaagactctccagatcagaacgcaatcggcggggagccatcaccattgacaccgcgagacgcctgtgtaaggagggactgcccgtggaggacgcttactttcacagctgtgttttcgacgtcctgatttccggggacccaaatttcactgtggcagcacaagcagctctggaagatgcacgggcttttcttcccgacctcgaaaagctgcatctctttccgtccgacgcaggcgtccctcttagctcggcgactctgctcgcgcctcttctgtcagggctgtttgtcctgtggctctgcatccag

SEQ ID NO: 13561 - DNA, 1278 bp, synthetic construct
  misc_feature 1..1278: note = source = /note="Description of Artificial Sequence: Synthetic coding sequence"
  source 1..1278: mol_type = other DNA
atgggagagcctggacagtcgccgtcaccccggtcgtcccatggatccccgccaactttgagcaccctcactctgctgcttcttttgtgtggacacgcacattcgcaatgcaagattcttcgctgtaacgcagaatacgtgagctcgaccttgagccttcggggaggaggaagctcaggagcactcagaggtggtggaggcggtggacggggtggtggagtgggaagcggaggactctgtcgagcccttaggtcgtatgcactttgtactcggcgaaccgcacgtacctgcaggggtgatcttgcctttcactccgcggtccacggaattgaagatctgatgattcaacataactgttcgcggcagggtcctactgcgccacctcctccgagaggccctgccctgcctggagccggttcggggctgccagcaccagatccttgtgactacgaaggtagatttagccgacttcatggtagaccccctggtttcttgcattgtgcctcgtttggcgatcctcatgtgaggtcattccatcatcattttcatacgtgtagggtgcagggcgcatggccgcttctggataacgattttctttttgtgcaagccacctcctcaccaatggcgctgggcgccaatgccaccgccacgagaaagctgactatcatcttcaaaaacatgcaagaatgcattgatcagaaggtctaccaagcagaggttgataacctgccagtcgcatttgaagatggaagcatcaacgggggcgaccgtcctggaggatcttctctgtcgatacaaactgcgaatccaggcaaccatgtggaaatccaagcagcttacatcgggaccactatcatcattagacaaactgctggacagctctcattctccatcaaagttgcagaagatgtagcgatggcattttccgcggaacaggatcttcaattgtgtgtgggtggatgtccaccttcgcaacgactttcccgttccgaaagaaatagaaggggcgctattaccatcgacactgcaaggagattgtgtaaggaggggcttcctgtcgaagatgcctacttccattcctgtgtctttgatgtgctgatttcgggtgaccccaatttcacggtggcggcacaagcagcccttgaagatgcgagagcctttctgcctgaccttgaaaagctgcacctcttccctagcgatgcaggtgtccctttgtccagtgcaaccctgctcgctcctcttctgtcgggtctttttgtgttgtggctttgtatacaa

SEQ ID NO: 13562 - DNA, 1278 bp, synthetic construct
  misc_feature 1..1278: note = source = /note="Description of Artificial Sequence: Synthetic coding sequence"
  source 1..1278: mol_type = other DNA
atgggggagccagggcaatcaccttcaccgagaagttcccatgggtctccacccacactatccacacttaccctcctactgctgctgtgtgggcatgctcactcccagtgcaagatcctgcggtgcaatgctgagtacgtaagctcaacactgagtctgaggggcggggggagtagcggcgcactccggggagggggtggcggaggacgcggcggtggtgtgggaagcggaggcctttgccgggccctgcgcagctatgccctatgtacccggaggactgcaagaacttgtcgcggggacctggccttccatagcgccgtgcacggcattgaggacctgatgatccagcacaactgttcgcgccaaggcccaaccgctccacctcccccccgcggtcccgcgctacccggcgctgggtctgggctgcccgctccagacccttgtgattacgaagggaggttctctaggttacatggtcgaccccccggattccttcactgcgcatcgtttggcgacccacatgtaagaagcttccaccaccacttccatacgtgtcgggtgcagggcgcatggcctctgctagacaacgatttcctgttcgtgcaagcgacctcctcaccaatggcccttggggcgaacgctacggccacgagaaagctaactatcatcttcaaaaacatgcaggaatgtatagaccagaaagtttaccaggcagaagtggacaacctgccagtagcttttgaggacggttccattaacgggggtgatcgccccggaggctcctcactgtctatacagaccgccaaccccggtaaccatgttgagatccaggccgcatacatcgggaccacaattattatacgacagactgctggccagttgtcttttagtattaaagttgccgaggacgtcgccatggcattcagtgccgaacaagatttgcagctgtgcgtgggcggttgtcctccaagtcaaagactcagccgttcagagaggaacagacgaggcgctatcaccattgacacggcaaggagattgtgtaaggaaggtttgccggtcgaggatgcctactttcactcatgtgtttttgacgtgctcatcagcggagaccccaacttcaccgtggccgcccaagcagcactggaggatgcgagagcctttctcccagacctagaaaaactgcacctgtttcccagcgatgcaggtgttcctttgtcctcagccaccctgctggccccactcctgtccgggctgtttgttctctggctttgtattcaa

SEQ ID NO: 13563 - DNA, 1278 bp, synthetic construct
  misc_feature 1..1278: note = source = /note="Description of Artificial Sequence: Synthetic coding sequence"
  source 1..1278: mol_type = other DNA
atgggggagcctggtcagtcacccagcccccggagcagccacgggtctccgccaacactgtctacactcacactcctcctcctcctttgcggacatgctcactcacagtgtaaaatacttcggtgtaatgctgagtatgtttctagcaccctgagcctgcgcggaggaggaagctccggcgcgctgcgcggaggagggggtggcggtagaggtggtggcgtggggagcgggggcctatgcagagccctccggtcatatgccctatgcacacgccgtacggctcgaacctgcaggggggatctggcctttcactcagccgttcatggcatagaggatctgatgatacaacacaattgttctaggcagggtccgactgcccctccccctccacggggacctgccctgccaggcgctggttctgggctccccgcacccgatccttgtgactacgaaggcagattcagtcggctgcacggccgcccacctggtttcctccactgtgcatctttcggagacccacatgtccggtcatttcaccaccacttccatacatgccgcgtccagggcgcgtggcctctcctcgacaatgactttttgttcgttcaggccacctctagcccgatggcacttggagcaaatgctactgctaccaggaaactcacaatcatcttcaaaaatatgcaggagtgcattgatcagaaggtatatcaggccgaagtggacaatctcccggttgcattcgaagacggcagtattaatgggggcgatcggcccggtggcagttccctgtcaattcagaccgctaacccgggaaaccacgttgaaattcaggccgcttatatcggtactacaattattattcgccagacagccggtcagcttagtttttcaattaaggttgcagaggatgtcgccatggctttcagtgcagaacaggatctgcaattgtgtgttggaggttgtccgccctcccagaggctgagccgttccgagaggaatagacgcggggccattacgatcgataccgccaggcgattgtgcaaggaaggcctaccagtggaggacgcctatttccactcctgcgtgttcgatgtcctgataagcggcgatccaaactttacagtggctgcacaggctgcccttgaggatgctcgtgcattcttacctgatctggagaagctgcatctgtttccaagtgacgccggtgttcctctctccagtgcaaccttgctcgcccctctcctctcaggcttattcgtgctgtggctgtgcattcag

SEQ ID NO: 13564 - DNA, 1278 bp, synthetic construct
  misc_feature 1..1278: note = source = /note="Description of Artificial Sequence: Synthetic coding sequence"
  source 1..1278: mol_type = other DNA
atgggtgaacccggccaatcgccctcgccccgcagcagccacggaagcccgcctactctgtctaccctcacccttctcctccttttgtgtggtcacgcgcattcgcaatgtaagatcctccgctgtaatgcagagtacgtctcgtcgaccctttcgctgagaggagggggatcgtccggtgcactgcgaggaggtggcgggggaggtcgtggaggaggagtgggttccggaggtttgtgtcgtgctctgcgctcatacgcactttgcacgcgacgcactgcaagaacgtgtaggggcgatctcgcttttcactcagctgtgcatggtattgaagatcttatgatccaacataactgctccaggcagggtccaactgcgcctccgccgccacgtggccctgcacttcctggagcaggctcagggcttccagcccctgatccatgcgactacgaaggacgttttagcagacttcacggtagaccacctggattcttgcattgtgcatcctttggcgacccacatgtgagatcatttcatcatcattttcatacctgccgggtgcagggagcttggccacttctggacaatgatttcctgtttgtgcaagcaacctcctcgcctatggcccttggcgctaacgccactgcgactaggaagctgaccatcattttcaaaaacatgcaggaatgtatagaccaaaaggtgtaccaagcggaagtggataatcttcccgtggcatttgaggacggtagcatcaatggtggagatagacccggaggttcctccctttcgattcagaccgctaaccctggtaaccacgtggaaattcaagctgcatacattggaaccactatcattattcgccagacggcaggacagttgtcgttttccattaaagtggcagaggacgtggcgatggcattttccgcagaacaggatttgcaactttgtgttggcggttgcccaccttcgcagcgcctgtcgagatccgaaagaaaccgtcggggagcgattaccatagataccgcacgccgactttgtaaagaaggactgcctgtcgaggatgcttactttcatagctgtgtctttgacgttctgatttcaggtgatcccaatttcaccgtcgccgcgcaagcggcccttgaagatgcgagagccttccttccagacttggagaagttgcacctttttcctagcgacgcaggcgtgcctctcagcagcgcaactctccttgcaccgctgctgagcggtctgttcgtgctctggctttgcattcag

SEQ ID NO: 13565 - DNA, 1278 bp, synthetic construct
  misc_feature 1..1278: note = source = /note="Description of Artificial Sequence: Synthetic coding sequence"
  source 1..1278: mol_type = other DNA
atgggagaaccgggacagagcccttcgccaagatcatcccacggatcgccaccaacgctctcgactctgaccctgcttctgctgctgtgcggtcacgcgcacagccaatgcaagatcctccgctgcaacgccgaatacgtttcctcgacgctttcgcttcggggaggaggttccagcggcgcactgcgcgggggtggtggaggaggccgcggcggtggtgtcgggtccggaggactctgtcgggcccttcggagctacgccctgtgtactaggcggactgcaagaacttgccggggggatctggccttccatagcgcagttcatggaatagaagatcttatgatccagcacaactgttcccgtcaaggacccactgcacccccaccacccagaggacccgcacttcctggagcaggatcaggacttcctgcaccagacccatgcgactacgagggccgtttcagccgccttcatggaaggccccccggctttctgcattgtgcctcctttggtgaccctcatgtgcggtcgttccatcaccatttccacacctgcagagtgcagggggcgtggccgttgctcgataacgattttctgttcgtgcaagccaccagctcgccaatggccttgggggcgaacgctacggccaccaggaagctcaccataatcttcaagaatatgcaagaatgcatcgaccagaaggtctatcaggcagaagtcgataacctgcctgtcgcatttgaggacggctcaatcaacggtggcgaccggcccgggggtagctccctgtcaatccaaactgcaaatccgggaaaccacgtcgagattcaagctgcgtacattggtaccaccattatcatccgacagacggcgggccaattgagcttctccattaaagtggcagaggatgtggcaatggctttttcggcggaacaggatctccagctctgcgtgggcggatgtcctccgtcgcagcgcctgtcaagatcagaaaggaaccgaagaggagcaataaccatcgacactgcgcggagactttgcaaagaaggacttcccgtggaggacgcttactttcatagctgcgtattcgacgtgcttattagcggagatcctaactttactgtggctgcacaagccgcactcgaagatgcgagggccttccttcctgatctggagaagctccatctctttcccagcgatgccggagtgccactgagctccgcaacgctgctcgcaccacttctttcgggacttttcgttctgtggctctgcattcaa

SEQ ID NO: 13566 - DNA, 1278 bp, synthetic construct
  misc_feature 1..1278: note = source = /note="Description of Artificial Sequence: Synthetic coding sequence"
  source 1..1278: mol_type = other DNA
atgggtgagcctggccagtccccttctcccagaagctcacatggcagtccacccactctgtctacacttaccttgctgctacttctctgtggtcacgcccactctcagtgtaagattctgcgatgtaacgcagagtacgtaagttccactttgagcctgcgcggcggcggttcatcgggcgcgcttaggggaggcgggggcggtggccgtggcggcggtgtaggctccgggggtctctgcagagccctgcggtcatatgctttgtgtacaagacgtaccgcaagaacctgtagaggagacttagccttccactctgctgtgcatggcatcgaagaccttatgattcagcataattgctcacggcaggggccaacggctccccccccaccaagggggcctgctctgcccggggctggttccggccttccagcaccagacccctgtgactacgaggggcgattcagccgtctgcatggtcgccctcctggcttcctccattgcgcctcttttggcgacccacacgtgcgctcgtttcatcatcacttccacacctgccgagtccagggggcgtggcctttactggataacgactttctgtttgtacaggcaacctcctctcctatggctctgggtgcaaacgccacagctactaggaaactgaccatcatctttaagaatatgcaggagtgcatcgaccagaaggtttatcaggccgaagtggataacttaccagtggccttcgaggacggctcaattaacggaggagatagacccggaggatccagtctgagcatccagactgcaaatcccgggaatcacgttgaaattcaggcagcttacatcggtacgaccatcatcatcaggcagaccgccgggcagctctcttttagcatcaaggtagctgaagatgtcgcgatggcttttagtgctgagcaggacctccaattgtgcgtcggcggctgtcctccaagccagcgcctgtccagatctgaacgcaaccgcaggggagcgatcaccattgatactgccagacgcctgtgtaaagaggggttgccagttgaagacgcatatttccattcatgcgtgtttgacgtcttaatcagtggcgatcccaactttacagtcgcagcccaggccgccctggaagatgccagggcatttcttccggaccttgaaaagctccacttgtttccgtcggatgcaggtgttcctctgtcatctgccaccttactcgcaccgcttctgagtggcttgtttgttttgtggttatgcattcag

SEQ ID NO: 13567 - DNA, 1278 bp, synthetic construct
  misc_feature 1..1278: note = source = /note="Description of Artificial Sequence: Synthetic coding sequence"
  source 1..1278: mol_type = other DNA
atgggcgagccagggcagtcccctagtccaaggtccagccacggtagcccccctaccttgagtacgctcacattactgctcctgctgtgtggtcacgctcactctcaatgtaagatacttaggtgcaatgccgaatatgtctcctccactcttagcctgaggggtggggggtcatccggagccctgaggggaggtgggggaggaggccgcggcggcggcgtcggatcagggggcttatgccgagctttgcgatcttacgcactctgcacacgccgtaccgcaagaacctgcaggggcgacttggccttccacagcgccgtgcacgggatagaggatctgatgattcagcacaactgtagtagacaggggcccaccgccccaccacctcccagggggcccgctctgccaggcgcgggcagcggactgcccgcgccagacccctgtgactatgagggtcggttctcaaggctgcatgggagaccacctggattccttcactgcgcctcttttggagacccacacgtgagaagcttccatcaccattttcacacatgccgggtgcagggcgcctggcctctgcttgacaacgactttctgtttgtacaggccacttcatcaccaatggccctcggcgcaaatgccacagccaccaggaagttgactatcattttcaaaaatatgcaggagtgcatcgaccagaaggtatatcaagctgaggtcgacaatttgccagtggcattcgaggacggcagcatcaatggaggcgatcgccctggcggatcgagtctgtctattcagacagctaatccggggaaccacgtggagattcaggcagcgtacattggtacaacaatcattattcgtcagacagccggccagctatcctttagcatcaaggttgccgaagacgtagcaatggcattctcagcggaacaagaccttcaactgtgtgttgggggatgtccgcccagccagagattatctcggtctgagagaaataggagaggggcaatcaccattgacactgctagacggctatgcaaagaaggacttccagtggaggatgcttactttcactcttgtgttttcgatgtgctgatcagcggagatccaaacttcacggtcgccgctcaggccgcactagaggatgcacgagcctttttgccagatctcgagaagttgcacctgttccccagcgatgcaggtgtaccactttcttccgctactctgctggcacctttactctctggcctttttgtgctctggttgtgcattcaa

SEQ ID NO: 13568 - DNA, 1278 bp, synthetic construct
  misc_feature 1..1278: note = source = /note="Description of Artificial Sequence: Synthetic coding sequence"
  source 1..1278: mol_type = other DNA
atgggcgagccaggacagtccccatcgcccagatcatcccatggttcgcctcctacgctctcaactctgactctcctgcttcttctctgtgggcatgcacattcacagtgtaaaatcctgcgctgtaacgctgaatacgtgagctccactctgtcgttgcggggtggagggtcgtcaggtgccctgcggggtggcggtggaggagggcgagggggaggagtcggatccggtggactgtgccgagcgcttcggtcatatgcactttgcacccgtcgaacggcaagaacctgccgcggcgatctcgccttccatagcgcagtgcacggaatcgaagatctgatgatccagcataactgttctcgccaaggccctactgcgccccctccgccacggggccctgcacttccaggtgcaggatccggcctgcctgcgccagacccatgtgattacgagggtaggtttagcagactgcatggtaggccgccagggtttctccattgcgcgtcttttggtgacccacatgtgcgcagctttcaccatcattttcatacctgtagggtccagggagcctggcctcttctggataacgacttccttttcgtccaagcaacctcctccccaatggcgctgggtgctaatgctactgccacccgaaaacttaccatcatcttcaagaatatgcaagaatgcatagaccaaaaggtgtaccaggccgaagtggataatctgccagtcgcttttgaagatgggagcatcaacggaggagatcgtccaggcgggtcgtcgctctcaattcagactgcaaaccctggtaaccatgtggaaatccaagcagcctacattgggaccaccatcattattcgccaaaccgcaggacagctcagcttcagtatcaaagtcgcagaggacgttgcaatggcgttttcggcagaacaagatctgcagctgtgcgtcgggggttgtcctccgtcgcaaagacttagccggtccgaacggaaccgtcgcggtgcaatcactattgatacggcacgtcgcctgtgcaaggaggggctgccagttgaagatgcgtactttcacagctgtgtgtttgatgtcctcattagcggcgaccccaactttactgtggctgcacaagccgccctcgaggatgctagagctttcctgcccgacttggagaaactccatttgtttccgtctgatgcaggagtaccacttagcagcgccaccctgctggcgcctcttctgagcggtctgttcgttctttggctctgcatccaa

SEQ ID NO: 13569 - DNA, 1278 bp, synthetic construct
  misc_feature 1..1278: note = source = /note="Description of Artificial Sequence: Synthetic coding sequence"
  source 1..1278: mol_type = other DNA
atgggagagcccggacaatcgccgtctccacgctcctcgcacggaagcccgccaaccctctcaaccctgaccctgttgctgctcctgtgcggacacgcacatagccaatgcaagatccttcggtgcaacgcagagtacgtttcgagcactctgtcattgagaggaggaggctcgagcggggccttgcgcggaggtggaggaggcggccgcggcggtggagtgggctcgggagggctctgtcgcgcgctgcgctcatacgccctttgcactcgaaggactgctcggacctgcagaggggatctcgcctttcactctgcagtgcacggaattgaggacctcatgatacagcataactgtagccgccaaggcccgaccgccccacctccgccgcggggcccggcccttccaggagcgggctccgggttgcccgcgcccgatccctgtgactacgaaggacgcttctcccggttgcatggacggccgccgggatttctccattgcgccagcttcggtgacccccacgttagatcgtttcatcaccattttcatacttgccgcgtgcagggagcttggccactcctggataacgacttcctgtttgtgcaggcaacttcctcgcctatggcattgggagcaaatgctaccgctactaggaagctgaccatcatcttcaaaaacatgcaagaatgcattgaccaaaaagtgtaccaggccgaagtggacaatctgcccgtggccttcgaagatggatccattaacggaggtgatagaccaggagggtcgagcttgtccatccagaccgccaaccctggaaaccacgtggagatccaggcggcatatatcggaaccaccattatcatccggcaaaccgcgggacagctcagcttctcaatcaaagtcgctgaggacgtggctatggcattctccgcggagcaggacctgcagctgtgtgtcgggggttgtccccctagccaacggctgagccggtcagagaggaaccgtcggggagccatcactatcgatactgcacgccgcctgtgcaaggaaggactcccggtggaagatgcatactttcattcgtgcgtgttcgatgtgcttatcagcggagatccaaactttactgtggcggcgcaagcggccctggaagatgccagggctttcctgccggatctggagaagctccaccttttcccatcggatgcaggagtgcctctgagctcggcgactctgctcgcgcctctcctgtccggcctgttcgtgctgtggctctgtatccag

SEQ ID NO: 13570 - DNA, 1278 bp, synthetic construct
  misc_feature 1..1278: note = source = /note="Description of Artificial Sequence: Synthetic coding sequence"
  source 1..1278: mol_type = other DNA
atgggggagcctggccagagtccctccccgaggtcatcacacggctccccacctaccctcagcactctcactctcctgctcctgttgtgcggtcacgctcactctcagtgcaaaatactgcggtgcaacgctgagtatgtgtcgtcaacgctatcactgagagggggcgggtcctcaggagcactgcgcggcggagggggaggagggaggggcggaggcgttggatcgggagggctgtgtcgcgcgctccgtagctacgcgttgtgtacccggcggactgcgcggacctgtaggggcgacttggcctttcacagcgccgtccacgggatagaagatctcatgattcaacataattgctctagacagggacctaccgcacctcccccacccaggggtcctgcactgcccggcgctggctcgggcctgcccgctccagacccatgcgactatgaaggccgcttctccaggctccatgggcggcctcccggatttctgcattgcgcatcatttggcgatccacacgtcagatcgtttcaccatcatttccatacatgtagggttcagggcgcttggcctctgctggataacgattttctgttcgtccaagcaacaagctcacccatggctcttggcgctaacgctactgctacacgtaaactgacaatcatcttcaaaaatatgcaggaatgcatcgatcagaaggtgtaccaggccgaagtggataacctccccgttgctttcgaggatggcagcattaacggtggcgatagacctggcggctcgtctctctcgatccagacagccaatcccggtaatcacgtcgaaatccaggcagcttacattggaactaccattattatacggcagaccgccgggcagttaagcttctcaatcaaggtggcagaagacgtagcaatggcgttctcagccgagcaggacctgcaactctgcgtgggtggttgccccccgtcacaacggctctctaggtctgaacggaatcggcgaggcgcaattaccatagataccgctcggcgactatgtaaggagggactgcctgtcgaggatgcatattttcacagctgcgtgttcgatgtcctcatctcaggcgacccaaattttacggtggccgcccaagcggcccttgaggacgcaagggctttcctccctgatctcgagaaactacaccttttcccatccgatgcaggagtgccccttagttcagctactttgctcgcaccacttctgagtgggttgtttgtgttgtggctatgcatacaa

SEQ ID NO: 13571 - DNA, 1278 bp, synthetic construct
  misc_feature 1..1278: note = source = /note="Description of Artificial Sequence: Synthetic coding sequence"
  source 1..1278: mol_type = other DNA
atgggagagcctgggcaaagccccagcccacgcagctcccacgggtcacctcccacactgtccacgctgactcttcttttgttactgtgcggacacgcccattcacagtgtaagattctcagatgcaatgccgagtatgtcagctccaccctgagcctacgaggtggtggctctagcggagccttgagagggggggggggaggtgggcggggagggggggtcgggtctggtggactgtgtagagctttgcggtcgtacgcgctgtgcacccggagaactgctcgaacctgtcgcggcgacctggcgtttcacagcgccgttcacggcatcgaagatcttatgatacagcacaattgctccagacagggacccactgctccacctcccccacgcggaccagcactgcccggggcgggctctgggctgccagcaccagacccttgcgactacgagggtagattttcccggctccacggccgccctcctggatttcttcactgtgccagctttggcgaccctcatgtacggagctttcatcatcactttcacacatgccgggtccaaggggcctggccgctgctcgacaacgatttcctatttgtgcaggccacttcctccccgatggcattgggagccaatgccactgccactagaaagctgaccatcatttttaagaatatgcaggagtgcatcgatcagaaggtataccaagcagaggtcgacaatctgcccgtggcctttgaggatggaagtatcaacggcggcgatcgccctggggggtcaagtctttcaatccaaacggctaaccctggcaatcacgtggaaatccaagccgcttatatagggacaaccatcattattagacagacagctggccaattaagctttagcatcaaagtggctgaggatgtggcaatggccttttcggctgagcaggacttacagttgtgcgttggaggttgccccccaagtcaacgcctttcacgaagtgagcgcaatcgaaggggcgctattaccatcgatactgcacgcaggctgtgcaaggagggccttccggtggaagacgcctacttccatagttgtgtctttgacgtgctgatcagcggtgatccaaatttcacagtggccgcccaggcggccttggaagacgcgcgtgcgttcctccccgatctggagaaattgcatttattcccgtccgacgccggagttcccctcagcagtgcaactcttctagcgccgctgctgagtggtctctttgtactctggctgtgtattcaa

SEQ ID NO: 13572 - DNA, 1278 bp, synthetic construct
  misc_feature 1..1278: note = source = /note="Description of Artificial Sequence: Synthetic coding sequence"
  source 1..1278: mol_type = other DNA
atgggggagccgggacagagcccgagtcctcgatcgagtcacggtagtcctcctaccctaagcaccttgacattgctgttgttgttatgtggccacgcccattcacaatgcaagatccttcgctgcaatgcggagtatgtctcttccaccttatccctgaggggaggtggctctagcggagcgctgcgagggggcggcggtggtgggcgggggggcggtgttggcagtggaggtctctgccgggctctccgatcctatgctctgtgcacgcgtcgtacagccaggacctgccgaggcgacctggctttccatagcgctgttcacggtatcgaggatttaatgatccaacacaattgtagtcgccaagggccgaccgctcctcccccaccccgcggacccgctcttcctggagcgggcagcggtctccctgctcctgacccttgcgactacgaaggccgcttctcacgactgcatggccgccccccgggctttttgcattgtgcgtccttcggcgatccccatgtgcggtcattccatcatcacttccacacctgcagagttcaaggagcctggcccctgctggacaacgatttcctgttcgttcaagcaacatccagtcccatggcattgggagctaatgctacggcgacccggaagctcacgatcatcttcaaaaatatgcaggaatgcattgatcaaaaggtttatcaagctgaggttgataacttgccagtggccttcgaggacggttctattaacggcggagacaggccgggcggtagctccctttctatccagactgcaaatccgggcaaccacgtggagattcaggccgcgtacatcggaaccacgattattatccgacagaccgccggacaactttccttctctatcaaagttgcggaggacgtcgcaatggcattctctgccgaacaggacctgcagctctgcgtgggcggttgtccaccctcacagcgtctctctagaagcgaaagaaaccgcaggggagctatcacaattgacacggcgagacgtctgtgcaaggaagggctacctgttgaggacgcctacttccactcttgcgtcttcgacgtgctaatctctggtgaccctaatttcaccgtcgctgcgcaggcggctcttgaggatgcgagagcattcttgcccgacctcgaaaaactgcacttgttccctagcgacgctggcgttcctctgtcctcggcgacgttgcttgcaccccttctatccggcctattcgtcctttggctctgtattcag

SEQ ID NO: 13573 - DNA, 1278 bp, synthetic construct
  misc_feature 1..1278: note = source = /note="Description of Artificial Sequence: Synthetic coding sequence"
  source 1..1278: mol_type = other DNA
atgggagagccgggccagagcccctcgcctcgctcaagccatggaagtccgccaaccctgtccaccctgactcttctgcttctgctgtgcggacatgcacattctcagtgcaaaatcctccgctgcaacgctgagtacgtctcttcgaccttgtccctgcggggcggaggatcttccggagcactccgtggaggcggtggcggcggacggggaggaggagtcggatcaggaggtctgtgccgcgctttgcggtcgtacgcgctgtgcactcggcggaccgccagaacctgtcggggggaccttgcgtttcattccgccgttcacggcatcgaagatctcatgatccagcacaactgctcacggcagggtccaactgcgccaccaccgccgcggggaccagccttgccaggagcagggtcaggcttgcctgcgccagacccgtgtgattacgagggacgcttctcacggctccacggcagaccgcccggctttctgcattgcgcgagcttcggtgacccccacgtgcggagcttccatcatcacttccacacttgtcgcgtccaaggtgcatggccgctgctggataacgacttcctgttcgtgcaggccacttcgtcgccgatggcgctcggagcgaacgccactgccactcggaagctcacgatcatcttcaagaatatgcaagagtgtatcgatcagaaagtctatcaagccgaagtggacaatctgccggtcgcattcgaggatggcagcattaacggaggcgaccggccaggaggatcatcgctgagcatccagactgccaacccgggaaaccacgtggagatccaggctgcatacatcgggaccactatcatcatccgccagactgcgggacagttgtccttcagcatcaaagtggctgaggacgtggcaatggcattctcagcggagcaagacctgcagctgtgcgtgggaggttgccctccatcccagagactgtcgcgatccgaacgcaacaggaggggagcgatcaccattgatacggcgagacgcctgtgtaaagaagggctgccggtcgaggacgcgtacttccactcctgcgtgtttgacgtgctgatctctggcgacccgaatttcacggtcgctgcacaagccgcccttgaagatgcaagggcgtttctgccggacttggaaaaactgcacttgttccctagcgacgctggagtgccgctgtccagcgccactctgctggccccgctgctctccggcctcttcgtcttgtggctgtgtattcag

SEQ ID NO: 13574 - DNA, 1278 bp, synthetic construct
  misc_feature 1..1278: note = source = /note="Description of Artificial Sequence: Synthetic coding sequence"
  source 1..1278: mol_type = other DNA
atgggagagcctggtcagtccccctccccgcgctcgtctcacgggtctccgcccacccttagtacgttaacgctgctgctacttttgtgcggccacgctcactctcagtgcaagatccttcgttgcaatgccgagtacgtgtcctcgactttgtctttgcggggcggtgggagctcgggagccctgcggggtggaggcgggggcggccgcggtggcggtgtcggcagcggcggcctgtgtcgtgctctgcgttcgtacgccctatgcacccgtaggaccgcaagaacctgtcgtggcgacctggccttccactctgctgtgcatggtatagaggatctgatgattcagcacaactgctctaggcagggcccgaccgctccccctcctcctcgtgggccagcgcttcccggcgctggttccggcctccctgctccagatccatgtgactatgagggccgcttcagccgtctccatgggcgacctcccggttttctgcattgcgccagcttcggtgatccccacgtccgctcattccaccaccatttccacacctgccgcgtgcagggtgcatggccattgttggacaacgacttcctgttcgtccaagcgactagcagccccatggccctcggcgcaaacgccaccgcaacgcgtaagttgaccataattttcaagaacatgcaagagtgcatcgaccaaaaggtctaccaggccgaggtggacaacttaccagttgccttcgaggacgggtccattaacggtggagatcgtcccggtggttcctctctgtccatccagaccgcgaacccgggcaaccacgtcgagatccaggcagcgtacattggtactaccatcatcattcgccagaccgccggtcagcttagtttttccattaaggtggctgaggatgtcgccatggccttcagcgctgaacaggacctccagctttgcgttggtggctgcccgccaagtcagcgcctgagtcggtctgagaggaaccgccgcggcgcgattactatcgatactgctcggcggctgtgtaaggagggactgcccgtcgaggacgcctatttccactcttgcgttttcgatgtgctgatctccggagacccgaacttcaccgtcgctgcgcaagctgccctggaagacgcgcgcgcattcctgcctgatctcgagaagctccatttgtttccatcggacgcaggtgtccccttgtcctctgccactcttctagctccccttctgagcggcctgtttgttctgtggctgtgcatccag

SEQ ID NO: 13575 - DNA, 1278 bp, synthetic construct
  misc_feature 1..1278: note = source = /note="Description of Artificial Sequence: Synthetic coding sequence"
  source 1..1278: mol_type = other DNA
atgggggaacccggacagtccccgagccctcggagctcccacggatcaccgccgacgctgagcaccctcaccctgctgttgctgctgtgtggccatgcgcactcacagtgtaagatcctgcgctgcaacgcggaatacgtgtcctcaaccctgtcgctgcgcggcggtggctcgtcaggcgcacttcgaggaggcggtggtggaggacgcggtggcggagtggggtctggcggtctgtgccgggcacttcgctcgtacgcgctgtgcactcggcggactgcgaggacctgccgcggggatctcgcgtttcactccgccgtgcatggtattgaggacctcatgatccagcataattgcagcagacagggacctaccgcccctccaccgcccaggggaccggccctgccgggagcggggtccgggttgcctgctccggacccatgcgattatgagggccgcttttcacgcctgcacgggcggccaccgggattcctccactgcgcatcgttcggtgaccctcatgtgcgctcatttcaccaccacttccacacctgccgggtgcagggagcatggccgctcctggacaacgatttcctgtttgtgcaggcgacctcgagcccgatggcactgggggccaacgcgactgctactagaaagctcaccatcatcttcaagaacatgcaggaatgcatcgaccaaaaggtgtaccaagccgaggtcgataatctgccggtcgctttcgaagatggatctattaacggtggcgatcggcccggaggttcgagcctgtcgatccagactgccaatccaggaaaccacgtcgagatccaagcagcctacattgggaccaccatcatcatccgccagactgccgggcaactctcattctcgatcaaggtcgctgaagatgtggctatggcgttcagcgcagaacaagatctgcagctctgtgtgggaggatgccccccgtcacaaaggctgtcaaggtccgagcgcaataggcggggggccatcaccatagacacggcaaggcggctctgcaaagagggactccccgtggaagatgcatactttcactcctgcgtgttcgacgttctcatcagcggggaccctaactttactgtggcggcgcaagcggcactggaggacgcccgcgcattcctgccagacttggaaaaactccatttgttcccatctgacgcaggagtgccactctcgtcggcgaccctgctcgcgccgctgctgtccggacttttcgtgctctggctttgtattcag

SEQ ID NO: 13576 - DNA, 1278 bp, synthetic construct
  misc_feature 1..1278: note = source = /note="Description of Artificial Sequence: Synthetic coding sequence"
  source 1..1278: mol_type = other DNA
atgggggagcctgggcaaagcccatcgcctagatcatctcatggttccccaccaactctttccactctcacccttcttttgcttttgtgcggtcatgctcattcacaatgtaaaatcttaaggtgcaatgcagagtatgtttctagcacgttgagtttacgaggaggcgggtcaagtggagctttgagggggggaggaggtggaggaagaggtggtggcgttggaagtggcggcctttgtagagcccttagatcttacgcactttgtacacggaggacggcccgtacttgtcgaggagaccttgcatttcactcagcggttcatggaatcgaagatcttatgattcagcataattgttcccgccaaggcccgacagctccaccgcctcctagagggcccgctttgccaggagcagggtccggcctcccagcaccagacccatgtgattacgaaggtcgtttttctcgcctccatgggcggccgccaggtttcctacattgtgcttccttcggggatccacacgttcgctccttccaccatcacttccatacctgcagggttcagggtgcatggccgttattagacaacgacttcctgttcgtgcaggctacatcctctcctatggctctcggtgctaacgctactgctactcgaaagttgaccatcatctttaagaatatgcaggagtgcattgatcagaaagtgtaccaggctgaggtggacaatttgcctgttgcctttgaagatggttcaattaacggaggtgataggccaggcggttcgtctctgtctattcaaacagcgaatccgggaaaccatgtggagattcaggctgcctacatcggtacaaccataataattagacagaccgctggtcagcttagcttttcaatcaaagttgctgaagatgtggccatggctttttctgcagagcaggacctccaactgtgcgtgggtggatgcccaccctcccaaagattatcccgatcagagcggaatcgaaggggtgctataactattgataccgctaggagactctgtaaggagggacttccagttgaagatgcttatttccattcatgtgtgtttgacgtgttgatctcaggtgacccaaactttaccgtggcggcacaagcagcactagaagatgcacgtgcttttcttccagatttggagaagcttcatttgttcccttctgatgctggcgttccgttatcctcagcaactctcctggccccactgcttagcgggctgttcgtgttgtggctttgtatacaa

SEQ ID NO: 13577 - DNA, 1278 bp, synthetic construct
  misc_feature 1..1278: note = source = /note="Description of Artificial Sequence: Synthetic coding sequence"
  source 1..1278: mol_type = other DNA
atgggagaaccaggacaaagtcctagtccaagatcttcacatggttcgccaccaactttgagtactcttacacttttacttttattatgtggtcatgctcattctcaatgtaaaattttaagatgtaatgctgaatatgtttcttcaacattatcattacgaggaggtggatcatctggtgctctaagaggaggtggaggaggaggaagaggaggaggagttggatcaggtggtttgtgtagagctttaagatcatatgcattatgtactagaagaacagcaagaacctgtcgtggagatttagcatttcatagtgcagttcacggaattgaagatttaatgattcagcataattgctctagacaaggaccaactgctccacctccaccaagaggtccagcacttccaggtgcaggaagtggtttaccagctccagatccatgcgattatgaaggaagattctcaagattacatggaagaccaccaggatttctacattgtgcttcttttggtgatccacatgttaggtcatttcatcaccattttcatacttgtagagtacaaggtgcatggccattacttgataatgattttttattcgttcaagctacatcatcacctatggctcttggagctaatgctactgctactagaaaacttacaattatatttaagaacatgcaagaatgtattgatcaaaaagtgtatcaagctgaagttgataatcttccagttgcttttgaagatggttctattaatggaggagatcgtccaggtggatcatcattgagtattcaaactgcaaatccaggaaatcacgttgaaattcaagcagcctatattggaacaacaataataattagacaaacagctggacaactttcattttctattaaagttgctgaagacgttgcaatggcattttccgctgaacaagatttacaattatgtgttggaggatgtccaccttctcaaagattatctagaagtgaaagaaatagaagaggagctattactattgatacagcacgaagactatgtaaagaaggattacctgtagaggatgcatatttccatagttgtgtatttgatgtgttaattagtggggacccaaattttactgtagctgctcaagcagctttagaagatgctagagcatttttaccagatcttgaaaaacttcatctttttccttcagacgcaggtgtaccattaagttcagccactttacttgctccattattatctggtctatttgtactttggttatgtattcaa

SEQ ID NO: 13578 - DNA, 1278 bp, synthetic construct
  misc_feature 1..1278: note = source = /note="Description of Artificial Sequence: Synthetic coding sequence"
  source 1..1278: mol_type = other DNA
atgggagagccagggcagtccccatctcctcgctcttcacacggaagccctcctacactatctactcttaccctgttacttctcctttgcggccatgcgcatagtcagtgtaaaattctgagatgcaatgccgaatacgtatcgtccactctcagcctccgcgggggcgggtcctccggcgccctgcggggagggggcggcgggggaagaggggggggcgtgggaagtggcggcctgtgtcgggccctgcgcagctacgcactctgcacgcgacggaccgcccgcacatgcaggggcgatcttgcttttcatagtgccgtgcatggcattgaggacttgatgatccagcacaactgctcaagacagggtccaacagccccgccccctcctaggggccccgcattgccgggagcagggagcggcctccccgcccccgatccctgcgactacgaaggtaggttttcccggctccatgggagaccaccaggctttctgcattgtgcatcattcggggatccccacgtaaggtcctttcaccatcacttccacacctgtagggttcagggggcatggcccctactggacaatgactttttgtttgtccaggcaacctcctcccctatggctctcggcgcaaacgctacagccaccaggaagcttacaattatatttaaaaatatgcaggagtgcattgatcagaaagtctaccaggcagaggtagacaatttgcccgtggccttcgaggacggctccatcaatgggggggatcgacccggcggatcgagcttatccatccagaccgctaatccaggcaaccatgtggagatccaggccgcctatatcgggacaacaattattatacggcagacagctggccaactttcttttagcattaaggtggctgaggacgtagcgatggccttctctgccgagcaagacctccagctgtgcgtgggaggatgtccaccttctcagcgcctgagccgatccgagcgcaatagaaggggagcaatcaccattgatacggctagacgcttgtgtaaggaggggctcccagtggaagacgcctacttccattcgtgtgttttcgacgtgctgatttcaggggatccgaatttcaccgtggccgcacaggccgcgctcgaggatgccagagctttcctgcccgatttggagaagttgcatctattcccaagtgacgcgggcgtgcccctgagcagtgctacattgctggcacccctgctgagcgggctatttgtgctgtggctgtgcattcag

SEQ ID NO: 13579 - DNA, 1278 bp, synthetic construct
  misc_feature 1..1278: note = source = /note="Description of Artificial Sequence: Synthetic coding sequence"
  source 1..1278: mol_type = other DNA
atgggggaacctgggcaaagtccctccccaagatcatctcacggcagcccccctactttatccacactgactctgctgctgctcctgtgcggccatgcacacagccagtgcaaaatactacgctgtaacgccgagtacgttagctcaactctgtctctacgggggggtgggtcctctggcgctctacgggggggcggagggggcggacgcggcggaggggtggggtccggcgggctctgtcgtgcactgcggtcttatgcactttgcaccaggaggaccgctagaacatgccggggcgacttggctttccacagcgctgttcacggcattgaggatctaatgatccagcataattgcagtaggcagggaccaaccgctccaccaccaccacggggccctgccctaccaggcgccggctctggcctgcctgcccctgacccatgcgactacgagggcagattctctcgcctgcatggcaggccccctggcttcctccattgtgcctcattcggcgatccccacgtgcgcagttttcaccatcacttccatacttgccgtgtgcagggcgcctggcccctgcttgacaatgacttcctgttcgtgcaggccaccagtagccctatggcactgggggctaatgccaccgccactcgcaagttaactatcatcttcaaaaatatgcaggagtgcatagaccaaaaggtgtaccaagctgaggtggacaacttgcctgttgccttcgaagatgggtccattaacggcggcgacaggccaggtggaagctccctgtctattcagactgcaaacccaggaaaccacgtcgagatacaggctgcttacataggtaccacaataatcattcggcagactgctggccagctttcttttagcataaaagtggccgaggacgtggccatggctttttcagccgagcaggacctgcagttatgcgtcggaggttgccccccttcccagaggttatcccgatcagaacggaaccgtcgcggcgcaatcactattgacacagcccggcgactgtgtaaggagggcctgcccgtcgaggacgcctattttcactcctgcgtgtttgatgtcttaatcagcggtgatcctaactttaccgtcgccgcccaggccgccctagaagacgctagggccttcctccccgatctggagaaactccacctgttcccatctgacgccggagttcctctgagtagcgctacactactggctccactgctgtctggcctgtttgttctatggttatgtattcag

SEQ ID NO: 13580 - DNA, 1278 bp, synthetic construct
  misc_feature 1..1278: note = source = /note="Description of Artificial Sequence: Synthetic coding sequence"
  source 1..1278: mol_type = other DNA
atgggagagcctggccagtccccctctccacgaagctcacacggatctcccccaactctatctacacttactctgctgttgttgctatgcgggcacgctcactcccagtgcaagatactgaggtgtaacgccgagtacgtcagctctaccttgtcccttagaggcggcggctctagcggcgcattaagaggtggtggtggtggaggtcgcgggggcggtgtcggaagcgggggactgtgccgcgctttgcggagctacgccctatgcacaaggcgtaccgcgcgaacttgccggggcgacctggccttccacagcgccgtgcacggtatcgaggaccttatgattcaacacaactgcagccggcagggacctaccgctccgcctccccctagaggtcctgcccttcccggcgccggaagcggcctgcccgctcccgacccctgcgactatgagggaaggttctctaggctgcatggacgccccccaggatttctgcactgcgcgtcgtttggcgaccctcatgtccgtagctttcatcatcactttcacacctgcagagtccagggcgcctggcctttgctggacaacgacttcctcttcgtgcaggccaccagttcccctatggctcttggtgctaatgctaccgccacacggaaactcacaatcattttcaaaaatatgcaggagtgcatcgatcagaaagtttatcaggctgaagttgataatctgccagtggccttcgaagacggctcaattaacgggggggatagacccggcgggtcgagcctgtcgatccagacggccaacccaggcaatcacgtggaaattcaagctgcgtatatcgggacgaccataatcattagacagaccgctgggcagctaagcttttccatcaaagttgcagaggacgtcgcgatggcattttcagctgaacaagacttgcagctgtgtgtaggagggtgccctccttcccaaaggctgtcaaggtccgagcgcaaccgccgcggagccattactattgacactgccaggcgcctctgcaaggaaggactgccggtggaggacgcttatttccattcctgcgtgtttgatgtgttgatatccggtgaccccaacttcactgtggcagctcaggcagccttggaggatgctagagcgttcctgcctgacctggagaagctgcaccttttcccgtctgatgcgggcgtgccattgagctcagccacactgctggcgccgctgctcagcggattgttcgttctatggctctgtatccaa

SEQ ID NO: 13581 - DNA, 1278 bp, synthetic construct
  misc_feature 1..1278: note = source = /note="Description of Artificial Sequence: Synthetic coding sequence"
  source 1..1278: mol_type = other DNA
atgggggagccaggacaatccccatcgccccgctcttctcatggatcaccgcctactctgtccaccctgactctgctgctgttgctgtgcggtcacgcacactcccagtgcaaaattcttcggtgcaatgccgaatacgtgagctcgactctttcgctgcggggcggcggatcaagcggagcactccgcggtggaggagggggaggaagagggggaggagtgggttcaggaggcctgtgccgggcacttcgcagctatgccctctgcaccagacgcactgcgcggacctgccgcggcgacttggcattccattcggcggtgcacggaatcgaagatctgatgattcagcataactgctcacgccaggggccaactgctccgcctccccctcgcgggccggcactcccgggcgccggatccgggctgccggctcctgacccgtgtgattacgaaggacgcttctcccgcctgcatggacggccgccaggattccttcactgcgcatcgttcggtgacccacacgtgcggtcgttccaccatcacttccatacttgtagagtgcagggtgcctggcctcttctggataacgacttcctctttgttcaagctacttcctcccctatggcgctcggagctaatgcaactgccactagaaagctgactatcattttcaagaacatgcaggagtgcatcgatcaaaaggtgtaccaggccgaggtcgacaacctgccagttgccttcgaggacggatccattaacggcggtgaccgcccaggaggatcttcgctgagcatccaaacggcgaatcctggcaatcatgtcgaaatccaggccgcctacatcgggacgaccatcatcatcaggcaaaccgccgggcagctgtcattcagcattaaggtggccgaagatgtggctatggccttctcggccgagcaggatctgcagctctgcgtggggggatgcccacccagccaacggctgtcgcggagcgagcggaaccgccggggagccatcactatcgacacggcccggcgtctctgcaaggagggcctcccggtcgaggacgcctacttccactcctgtgtgtttgatgtgctgatctctggcgaccctaactttaccgtcgctgcccaggcagcgcttgaagatgcccgagcttttttgccggatttggaaaaactgcacttgttccctagcgacgccggcgtgccgctctcgtccgcgacccttttggctccgttgttgtctggactctttgtcctttggctctgtatccaa

SEQ ID NO: 13582 - DNA, 1278 bp, synthetic construct
  misc_feature 1..1278: note = source = /note="Description of Artificial Sequence: Synthetic coding sequence"
  source 1..1278: mol_type = other DNA
atgggcgagccgggccagtcgccgagccctcgctcgagccacggcagcccaccaactctcagcaccctgactcttctgctcctcttgtgtggccacgctcattcccaatgcaaaatccttcggtgcaacgctgagtacgtgtcgagcaccctgtccctcagaggcggcggttcttcgggtgccctccgcgggggaggaggcggcggccgcgggggtggggtcggctccggaggcctgtgccgggcgctgcggtcatacgcgctgtgcacccgcaggaccgcccgaacgtgtcggggcgacctggccttccactcagccgtgcacggaatcgaagatctcatgatccagcataattgcagccggcaaggacctaccgcacctccgcccccacggggacccgcactcccgggcgccgggtcgggactcccagcccctgatccgtgcgattacgagggacggttctctcgcctgcacggacggccgccaggatttctgcactgcgcctcattcggcgacccccatgtcaggagctttcaccaccacttccatacttgccgggttcagggtgcctggccgctgctggataacgactttctgttcgtccaggcgacgtcgtcgccgatggcactcggagccaatgcaaccgcaactcgcaagctcactatcatctttaagaatatgcaggaatgcatcgaccaaaaagtgtaccaggcggaggtggacaacctgccagtggcattcgaagatggatctatcaacggcggcgacaggccgggtggaagctcactctccatccaaacggcaaacccgggaaaccatgttgaaatccaggccgcatacatcggaaccaccatcatcatcagacagaccgctggtcaactgtccttttcaatcaaggtcgctgaagatgtggccatggctttttccgcggaacaagacctgcagctctgcgtgggagggtgccccccgagccagcgcctcagccggtctgagagaaaccggcggggggcaattactatagataccgcccggaggctgtgcaaggaaggactgcctgtcgaggacgcgtacttccactcatgcgttttcgatgtactcatcagcggagatccgaatttcaccgtggcggctcaagcggcgctcgaggatgccagagcctttttgccagacctggaaaagctgcacctgttcccatcggatgccggagtgccgctttccagcgcgactctcctggccccgctgttgagcggactcttcgtgctgtggttgtgcatacaa

SEQ ID NO: 13583 - DNA, 1278 bp, synthetic construct
  misc_feature 1..1278: note = source = /note="Description of Artificial Sequence: Synthetic coding sequence"
  source 1..1278: mol_type = other DNA
atgggagaacccgggcaaagcccctcgcctagatcatcccatggctcccctccaactttgtccactctgactcttctcctccttttgtgtgggcacgcccattcacaatgtaagatcctccgctgtaacgcagaatacgtgagcagcaccctgtcactgcgaggagggggatcaagcggtgctcttaggggaggcgggggaggtggtcgcggaggaggagtcggatctgggggactctgcagagcacttcggtcgtatgctctgtgcactcgtcggactgcgcgcacgtgtagaggggatctcgcattccattcggcagtccatggtattgaggatctgatgattcaacacaactgctcgcgccagggaccaactgcacccccgcctcctagagggcccgcactccctggagccggtagcggcctgccagcaccagatccttgtgattacgaaggacgattttcaagacttcacggccggccacctggtttccttcattgcgcttcttttggagatccccacgtgcgatcatttcatcatcacttccacacgtgtcgtgtccagggcgcatggcccctgcttgacaatgacttcctctttgtccaagcaactagcagccccatggcactcggggcaaacgctactgcaacgcgtaagctgaccatcattttcaaaaacatgcaggagtgtattgatcagaaagtctaccaggccgaagtggataatctccccgtggcatttgaagatggctcaatcaatgggggcgaccgccccggtggttcgtccctcagcattcaaactgccaaccctggtaaccatgtcgagattcaggcagcctacattggcaccactatcattatcaggcagactgcaggacaactgtcgttttcgataaaggtggcggaagatgtggcaatggcgtttagcgccgaacaagatctgcagctgtgcgtcggagggtgccctccctcgcagaggctctcgcgatcagagcggaataggaggggcgcaattacgattgataccgcaaggagattgtgtaaagaaggccttccagtggaagatgcttactttcattcatgcgtgtttgatgttctgataagcggtgaccccaactttacggtggcagcacaagcagcactggaagatgcccgggcgtttcttccggatcttgaaaaactccacctctttcctagcgatgccggggtgcctttgtcgtccgcaacccttcttgcacctctccttagcggactcttcgtgctttggctttgtatccaa

SEQ ID NO: 13584 - DNA, 1278 bp, synthetic construct
  misc_feature 1..1278: note = source = /note="Description of Artificial Sequence: Synthetic coding sequence"
  source 1..1278: mol_type = other DNA
atgggtgagccggggcagtcgccttcgcctcgttcctcccacggttccccgccaactctgtcgacccttactttgcttctcctgctgtgcggacacgcgcattcgcagtgtaagattctccgatgtaacgcagagtacgtgtcgtccactctgtcgctccgcggaggtgggtcatccggcgcactgcgtggtggtgggggaggcggacgcggaggaggagtgggatccggaggtctgtgtagggcattgcggtcctacgcactgtgtacccgccggaccgccagaacctgtaggggcgatctggcattccattcggctgtgcatgggatagaggatcttatgatacaacataattgtagccgtcaaggtcccactgctccccctcctcctagaggccctgcacttcctggagcagggtcagggctgccagcacctgatccgtgtgattacgaaggaaggttcagccgactgcatgggcgcccgcccgggtttcttcattgtgcgagctttggagatccacatgtcaggagctttcatcaccacttccatacttgcagggtccaaggggcgtggccactcctcgataatgactttctgttcgtccaggcaacgtcatcacctatggcacttggcgcaaatgcaactgcaaccagaaagttgactattatcttcaagaacatgcaagagtgtatagatcagaaggtgtatcaggccgaagtggataacctgcccgtcgccttcgaagatggatccattaatggtggggacagacctggcggatcatcgttgtccattcagactgcaaatcctggaaaccatgttgaaatccaagcggcatacattggcactactattatcatccggcaaacggccggccaacttagcttctccataaaggtggcagaagatgtcgctatggctttctcggccgaacaggatcttcaactctgcgtcggaggatgtccaccatcgcaacggcttagcaggagcgagcggaaccggagaggtgcaattaccattgacacggccagacgactctgcaaggaaggtctgccagtggaggacgcatacttccattcctgcgtgttcgacgtgctgatctcaggagatcccaactttaccgtcgcagcacaagcagctctggaagatgcaagagcgttccttccggatttggaaaaactccatctgtttccttcggatgcaggtgtacccctttcctcagcaactcttttggcaccattgctcagcggcctgtttgtgctgtggctgtgcattcag

SEQ ID NO: 13585 - DNA, 1278 bp, synthetic construct
  misc_feature 1..1278: note = source = /note="Description of Artificial Sequence: Synthetic coding sequence"
  source 1..1278: mol_type = other DNA
atgggcgagccgggccagagcccaagtccaaggagcagtcacggtagtcccccgacactgtcgacattgacactcctgctcctgctgtgcggccacgcgcactcccagtgcaaaattctccggtgtaacgctgagtatgtgtcgagcacactttcgttgcggggcggtggaagttccggcgccttgcgtggcgggggcgggggcggccgaggaggcggtgtgggctccggtggactgtgccgtgccctgcgaagttatgctctgtgcaccagaagaacggctaggacctgccgcggagacctcgctttccatagcgcagtgcacggcattgaagatctaatgattcagcataattgtagtaggcagggcccgactgccccaccgccccctcgcggaccggcgcttccgggtgccggatcgggtctgccagctccagatccgtgcgattacgagggtcgctttagtcggctgcatggccgtccccccggattcctgcattgtgccagcttcggagatccacacgtccgcagttttcatcatcactttcacacgtgcagagtgcagggtgcctggccgcttctggataatgacttcctgtttgtgcaggccacgtctagcccaatggccctgggagctaacgccaccgccacacgtaaactcactatcattttcaagaatatgcaggaatgcatcgatcaaaaggtgtaccaagctgaggtagacaacctcccggtggcctttgaggatgggagcatcaatgggggagaccgcccgggcggaagcagtctgtcaattcagaccgcgaacccagggaatcacgtagagatacaggcagcgtatattggaacgactataattatccgccagaccgcgggccaactctctttctcgatcaaggtcgcggaggacgtggccatggccttttcagccgagcaggatctgcagctgtgtgttggtggctgccccccatcacagcgtctgagccggagtgagcgcaacagacgtggtgctatcaccatcgacaccgcccgccgtctttgtaaggagggtcttcccgttgaggacgcctacttccactcctgcgtcttcgatgtactcatctcgggcgatcccaactttacggtggccgcgcaggcggctttggaagatgctcgcgccttcctgccagacttggaaaaattgcacctgttcccaagtgacgcaggggtgccacttagtagtgccactctactggctccccttctttccgggctctttgttctttggctgtgcatccaa

SEQ ID NO: 13586 - DNA, 1278 bp, synthetic construct
  misc_feature 1..1278: note = source = /note="Description of Artificial Sequence: Synthetic coding sequence"
  source 1..1278: mol_type = other DNA
atgggagagcctggacaatcaccgtcaccccgctcatctcatggatccccgccgacccttagcaccctgacccttctcctcctcctgtgcggacacgcgcattcgcagtgcaagatcctgaggtgcaacgccgaatacgtgtcgtcgaccctcagcctgcgcgggggaggatcttcaggagcactgcgcggaggaggaggtggaggtcgcgggggcggagtgggctccggtggtctgtgtagagccctcaggtcgtacgcgctgtgcactcgcagaaccgctagaacttgcagaggggacctggccttccactcggctgttcacggaatcgaggacctgatgatccagcacaattgttcgcgccaaggcccaaccgccccgccgccgccacgcggtccggctctgccgggggccggatcgggcctgcccgccccggatccgtgcgactacgaaggccgcttctcgcgcctccatggccgcccgcctggcttcctgcactgcgcctcgttcggtgaccctcatgtgcgctccttccatcaccacttccacacctgcagggtccagggagcatggccgctgttggataacgattttctcttcgtgcaggccaccagctcccccatggcgcttggagcaaatgccaccgccaccagaaagctgactatcatcttcaaaaacatgcaagaatgcattgaccaaaaggtctaccaagcggaagtggataacctcccggtggccttcgaggacggttccatcaatggcggggatagaccgggagggagcagcctgtcaatccaaacggcgaatccgggaaaccatgtggaaatccaggcagcctacatcggaactaccatcatcatccgccagacggctgggcaactctcgttctccatcaaagtcgcagaagatgtggccatggccttctcggcagaacaagacctgcagctgtgtgtagggggctgcccgccgtcccaacggctcagccggagcgaacggaaccgcagaggggcaatcactattgatactgccagaaggctttgtaaggaaggcctgcccgtggaagatgcgtactttcattcgtgcgtctttgacgttctgatctcaggggacccaaatttcaccgtggccgctcaggcggcactcgaggacgcgagagccttcctcccagatcttgagaagctgcacctcttcccgtccgatgccggagttcctctgagctccgctactcttcttgcgccgcttctctccggactgttcgtcctgtggttgtgtattcaa

SEQ ID NO: 13587 - DNA, 1278 bp, synthetic construct
  misc_feature 1..1278: note = source = /note="Description of Artificial Sequence: Synthetic coding sequence"
  source 1..1278: mol_type = other DNA
atgggcgagcccggccagtcaccgtccccaaggtcctcccatggatccccgcccaccctgtcaacccttaccctcctgctcctgctgtgcgggcatgctcatagccagtgcaaaatcctgagatgcaacgcggaatacgtgtcctcgactctctccctccggggaggcggaagctcaggagcgctgcggggtgggggaggtggcggccgcggaggtggggtcgggtctggcggcctgtgcagagcgctgcgctcctacgcgctgtgcactcgccggaccgcccgcacttgccgcggagatctggcatttcactcagccgtccacgggatcgaagatctcatgatccaacacaactgctcgagacagggccctaccgccccgcctccaccacgcggacctgcactgccgggagcaggatcaggcctcccggccccggacccgtgtgattacgaaggacggttcagccgccttcatggtaggccgccgggcttcttgcactgcgctagctttggggatccgcacgtcaggtcgttccatcaccacttccatacctgccgggtgcaaggagcttggcccctgctggataacgacttcctctttgtgcaggcaacctcctcccctatggcccttggagccaacgccactgcgactaggaaactgaccatcatcttcaaaaacatgcaggaatgcatcgaccagaaggtgtatcaggctgaagtggataatctcccggtcgcgttcgaggacggatctatcaacggcggcgatcggccgggaggcagctctttgtcgatccaaactgccaaccccggaaaccacgtggaaatccaggctgcgtacatcggaactaccatcatcatcagacaaactgccggccaactctccttcagcatcaaggtggccgaggacgtggctatggcattctcggccgagcaagatctgcagctctgcgtgggaggatgcccaccgtcacagagactgtcgcgctcggaacggaaccgccggggagcaatcaccatcgatactgcaagaaggctctgcaaagaaggcctgccagtcgaggacgcgtacttccactcctgcgtgttcgatgtgctcatatcgggggacccgaacttcactgtggcggcgcaggcggccctggaggacgctagggcgttcttgccagatcttgaaaagctgcatttgttcccaagcgacgccggggtgccgctgtcgtcagctacccttctggcccccctgctgtccggcctcttcgtgctctggctttgtatccag

SEQ ID NO: 13588 - DNA, 1278 bp, synthetic construct
  misc_feature 1..1278: note = source = /note="Description of Artificial Sequence: Synthetic coding sequence"
  source 1..1278: mol_type = other DNA
atgggagagccaggccagagcccctcacccaggagctctcacggatctcctcctacgctctccacactcaccctgctgttgctgctgtgtggccatgcacacagtcaatgcaaaattttacgctgcaacgctgaatatgtgtcgagtaccctgagcctcaggggggggggatcctccggggccctgcgaggaggcggcggcggaggaagaggcggaggcgttgggtccggaggtctgtgccgagcactgcggagctatgcgctttgtactcgaagaaccgcaagaacctgtcggggggacctagcctttcattccgccgttcacggcattgaggatctaatgatccagcacaactgcagccgtcaggggccaacagccccaccccctccaaggggaccagcgcttcctggcgctgggtcgggcctgccggccccagacccatgcgactatgaagggaggttctctagactgcacggtaggccccccggtttcctacactgcgcgtcattcggcgatccacacgtcagaagtttccatcatcacttccatacctgccgagtccagggagcatggccactgttggataatgacttcctgtttgtccaggccacatccagccccatggctctgggagcaaacgccaccgccaccagaaaactgaccatcatcttcaagaatatgcaggaatgcatcgaccaaaaggtataccaggccgaggtggacaacctccctgtcgcgttcgaggacggaagcataaatggcggggaccgtcccggcggttcgtccctcagcatccaaacagctaatcccgggaatcatgtagagattcaggccgcttacatcggcaccaccataatcattcgacaaacggccggtcagctgtctttcagtatcaaagtggcagaggacgtggcaatggcattttctgctgaacaggatctccaactgtgcgtgggaggctgtccaccaagccaaagactgagcagaagtgagcgaaataggaggggcgcaatcaccatcgatacggcccggcggctgtgcaaggaggggttgccggttgaggacgcttacttccactcttgcgtcttcgacgtgcttatcagcggggaccccaatttcaccgttgctgcccaggccgctctggaagatgctcgcgcgttcttacctgacctggagaagcttcatctatttccatccgatgcgggggtgccccttagttccgctacattgcttgccccgttgcttagcgggctgttcgtgctctggctgtgcatccag

SEQ ID NO: 13589 - DNA, 1278 bp, synthetic construct
  misc_feature 1..1278: note = source = /note="Description of Artificial Sequence: Synthetic coding sequence"
  source 1..1278: mol_type = other DNA
atgggcgagccaggacagtcaccctctcctcggtcctcacatgggtcgccgcctactctctcaacgctcaccctgctgctgctgctctgtggacacgcgcacagtcagtgcaagatcctgagatgcaatgccgaatatgtcagctccactttgtcacttagagggggagggtctagcggagctctgcgaggaggaggcgggggaggacggggaggcggagtgggatcgggaggcctgtgccgcgcactgcgcagctacgccctttgtacccggaggacggccaggacttgccggggcgacctggctttccactcagccgtgcatggaatcgaagatctgatgatccaacacaactgctcccggcagggtcctaccgcgcctccaccgccccgtggacccgctctgcctggagcgggatcgggtctgccagccccagacccctgtgactacgaggggcgcttctcacgcctgcacggtcgccctccgggattcctgcattgcgcatcctttggtgatccccatgtacggagctttcatcaccacttccacacctgtcgcgtccaaggtgcttggccgctgcttgacaatgactttcttttcgttcaggccacctcctcaccgatggcgcttggagcgaacgccaccgcgactcgcaaactgacgatcatctttaagaatatgcaagagtgtatcgatcaaaaggtgtatcaagctgaagtggacaatctgcccgtggcctttgaagatgggtcgatcaacggaggggaccgcccaggcggtagctcgctgtcgatccagaccgcgaaccctggaaaccatgtggagattcaagcagcctacatcgggaccactattatcatccgccagactgccggacagctttccttcagcatcaaggtggcagaagatgtggctatggctttctcggctgagcaggaccttcagctctgcgtgggaggttgcccgccatcgcaacggctgtcgagatcggagagaaatcgccggggagccattaccatcgatactgcgagaaggctgtgcaaggagggcttgccggtggaagatgcatacttccactcatgcgtctttgatgtgcttatatcgggggacccgaacttcactgtggctgctcaggccgcgctcgaagatgcgcgggccttcctgccggatttggagaagctccacttgttcccgagcgacgcgggcgtcccactgtccagcgccactcttttggccccgctgctcagtggtctgttcgtgctgtggctctgcatccag

SEQ ID NO: 13590 - DNA, 1278 bp, synthetic construct
  misc_feature 1..1278: note = source = /note="Description of Artificial Sequence: Synthetic coding sequence"
  source 1..1278: mol_type = other DNA
atgggggaacctggacaatcaccgtcacctcggtcatcgcacggatcaccacctactctctccaccctgactctcctgctgcttctgtgcggccatgcacatagccagtgtaagattcttcgctgtaatgcagaatacgtgagcagcactctctccttgagagggggcggttcctcaggagctctgcgaggtggcggaggagggggacgcggtggaggtgtggggagcggaggtctttgtcgtgcactgcggagctacgcactgtgtactagacggactgcaagaacctgcagaggtgacctggcgtttcattcggcagtgcatggcatagaggaccttatgattcagcacaattgttcacggcaggggcctactgcaccaccgccaccacgcggacccgccctgccaggagctggttccggacttccggcacctgatccatgtgattacgaaggtagattttcacgcctccacggtcgacctccagggttcctgcattgcgcatcctttggggatccgcacgtcagatccttccaccatcattttcatacgtgccgcgtgcaaggagcatggcctctccttgacaatgatttcctctttgttcaagctacttcatccccaatggcgctgggcgcaaatgcaactgcgaccaggaaacttacgattatctttaagaacatgcaggaatgcattgaccagaaggtgtaccaagcagaagtggacaacctgcctgtcgcttttgaagatggaagcatcaatggcggagacagacctgggggttcatcgctgtcaattcagaccgcaaacccaggaaaccacgtggaaattcaggcggcgtacattggcactaccatcataatccgacaaaccgctggacaacttagctttagcattaaggtcgcagaagatgtggcaatggcattttccgcagagcaagatctccagctgtgtgtgggaggatgtccgccctcgcagagactctcccgctcggaacgtaatcgacggggcgcaataactatcgatactgctcgacgactctgtaaggaggggcttcctgtcgaagatgcatactttcattcgtgtgtgtttgacgtgcttatttcgggggaccctaactttactgtggcggcacaggcagcactggaggacgcacgtgccttcttgccagaccttgagaaactccatttgttcccatccgacgccggcgtgccactgagcagcgcaacgcttcttgcgccacttctctccggtctgtttgtcctttggctgtgcatacaa

SEQ ID NO: 13591 - DNA, 2184 bp, synthetic construct
  misc_feature 1..2184: note = source = /note="Description of Artificial Sequence: Synthetic coding sequence"
  source 1..2184: mol_type = other DNA
atgtgggtgacgaagttgctgcccgcactgttgcttcagcatgtgcttttgcatcttctgttgctgccaattgctatcccatacgccgaaggacaacgtaagaggcgaaacacgatccatgagtttaagaaatcggcgaaaactaccctcataaagatcgatcctgcccttaagattaagaccaagaaagttaacacggcagaccaatgtgcaaatcgatgtacgaggaacaagggtctgccgttcacctgcaaggctttcgtgtttgacaaagctcgcaagcagtgtctctggtttccatttaactccatgagttcgggagtgaaaaaagagtttgggcacgagtttgatctgtacgagaacaaagactacatcagaaactgtattatcgggaaggggcgaagctacaaggggactgtctcaataaccaaatctgggatcaaatgtcagccgtggtcgtcgatgatcccacatgagcacagcttcctcccttcctcataccggggaaaggatctccaagaaaactattgcagaaacccaagaggtgaagaaggcggaccttggtgtttcacctcgaatccagaggtgcgatacgaggtctgcgatattccacagtgttctgaggtggaatgtatgacctgtaatggcgagtcgtacagaggccttatggatcacactgagtccggtaagatttgtcaaagatgggatcaccaaactccccaccggcacaagtttctcccagagcgctaccctgataagggatttgatgacaactattgccggaatcccgatggccaaccgcgtccgtggtgctacaccctggacccgcatacgagatgggaatactgtgcgattaagacctgcgcagacaatactatgaatgacaccgacgtccctctggaaaccactgaatgtattcagggccagggagagggataccgcggtactgtcaataccatctggaacggtatcccctgtcaacggtgggattcgcagtaccctcatgagcacgacatgactcctgaaaactttaagtgtaaggatcttcgcgaaaactactgcagaaaccccgacggttctgaatcgccatggtgctttaccactgatcctaacattcgtgtcggctactgttcccaaataccaaactgtgatatgagtcacgggcaggattgctacagagggaatggcaaaaactatatgggaaatctttcccaaaccagaagcggactcacttgtagcatgtgggataagaatatggaagatctccaccggcacattttctgggaaccagacgcatcaaagctcaacgagaattactgtaggaacccggatgacgatgcccatggaccctggtgttatactgggaatccactgataccctgggattactgcccaatttcacggtgcgagggagataccactcccaccattgtgaaccttgaccatcctgttatctcgtgtgcgaaaactaagcaactgcgagtggtcaatggaatccccactcggaccaacattgggtggatggtcagcttgcgataccggaataagcatatatgtggtggttcactcatcaaggaatcgtgggtgcttaccgcacgacaatgttttccttcgagggatctgaaggattacgaggcatggttgggcattcatgacgtccacggccgcggcgacgagaagtgcaagcaagtcctgaacgtgtcgcagctggtgtacgggcctgagggaagcgatctcgtgcttatgaagctcgccagacctgcagtgcttgatgattttgtgtccacgatcgatcttccaaactacggctgtacgattcctgaaaaaacttcttgcagcgtctacggatggggatacacgggtctgatcaattacgatgggctgctgagggtcgcccatttgtacattatgggtaacgagaagtgctcgcagcaccatcgcggaaaggtcaccttgaacgaatccgaaatttgcgcaggagcagaaaagatcggctcgggaccatgcgaaggcgattacgggggacctttggtgtgcgaacaacacaaaatgcggatggtccttggagtgatcgtgcctggaagaggatgtgctattcctaaccgtcctggcatctttgtgagagtggcatactatgccaagtggattcataagattatcctgacgtacaaagtgccacagtcc

SEQ ID NO: 13592 - DNA, 2184 bp, synthetic construct
  misc_feature 1..2184: note = source = /note="Description of Artificial Sequence: Synthetic coding sequence"
  source 1..2184: mol_type = other DNA
atgtgggtgacaaaactgttaccagcgcttctcttacagcacgtgctcttacatctcctgctgctgcctatcgcaatcccatacgctgagggacagcgcaagcggaggaacactattcatgaattcaagaagtctgcaaagaccactctgattaagattgatccagcattgaaaattaagacaaaaaaagtgaatacggccgaccagtgtgccaaccgatgcacacgtaacaagggcctgccatttacatgcaaagcctttgtttttgacaaggcccgtaagcagtgcctgtggtttccattcaattctatgagttccggcgtgaagaaggaatttggccacgaatttgacttatacgaaaacaaagattacatccgaaactgcatcatcggaaagggacggtcctacaaaggtacggtgtccattactaagtctggtatcaagtgtcaaccctggtcaagcatgatccctcacgaacatagcttcctgccatccagttatagaggcaaggatctacaagagaactattgtagaaatccaaggggcgaagagggggggccttggtgctttacaagcaatcccgaagtccggtacgaagtgtgtgacattccccagtgttccgaagtcgagtgtatgacatgtaatggtgagtcctatcgggggttaatggaccacacagagtccggcaaaatctgccaacgctgggaccatcagaccccacaccgccacaagtttttgcctgaaaggtatcccgataaaggctttgatgacaattactgccgcaaccccgatggtcagccccggccctggtgttacacactggacccacatactcgctgggagtattgtgctattaagacgtgtgccgacaataccatgaatgatacagacgtgcctttagagacgaccgagtgtatccagggacagggcgagggatacagaggcacggttaacacaatctggaatggaattccatgtcagaggtgggattcacagtacccgcacgaacatgacatgactccagagaacttcaaatgcaaagacctgagggaaaattactgtaggaatcctgacggatctgaatctccctggtgtttcacgacagaccctaatattcgagtgggctattgttcacagatccccaattgtgacatgtctcacggccaggattgctatcgcgggaacggcaagaattatatgggtaacttgagtcagacaaggtccggactcacctgctcgatgtgggacaagaacatggaggacctacacaggcatatcttttgggagcctgatgctagcaagcttaatgagaactactgccgtaatcctgatgacgatgctcacggtccctggtgttataccggcaatccactcattccctgggactactgccccattagccgatgtgagggtgacacgacaccgacaatcgtaaatctcgaccaccccgttatctcttgtgctaaaacgaaacagttacgcgttgtgaacgggatcccaacacgcaccaacatcgggtggatggtgtccctgagatatcggaataaacatatatgtggcggcagcctgatcaaagaaagctgggtgctaacagcacgccaatgcttcccctcacgcgacctcaaagattacgaagcctggctcggcatccatgatgtccacggcaggggcgatgagaagtgcaaacaagtgctgaacgtcagtcagctggtgtatgggccagagggctccgatctggttctcatgaagctggccagacccgctgttttggatgactttgtgagcaccatagatctcccaaactatggctgcactattccagaaaagaccagttgctcagtgtatggttgggggtacacagggctcattaattatgacggactgctacgggttgcccacctatatatcatgggaaatgaaaaatgttcacagcaccatcggggaaaagtgactctgaatgagtctgagatttgcgccggcgccgaaaaaataggctccggtccttgtgagggggattacggcggacctctggtgtgtgaacaacacaagatgagaatggtgctgggggtgatcgtaccaggccgcggatgtgctatcccaaatcgaccggggatctttgtgcgagtagcctattatgccaaatggatacacaagatcatcctcacctataaggtgcctcagagt

SEQ ID NO: 13593 - DNA, 2184 bp, synthetic construct
  misc_feature 1..2184: note = source = /note="Description of Artificial Sequence: Synthetic coding sequence"
  source 1..2184: mol_type = other DNA
atgtgggttacaaagctcttgcctgccttattgctccagcatgtacttcttcacctgcttctcctgccaatcgctatcccctacgccgagggtcagcgcaaaaggcgaaacactatccacgagttcaaaaagtccgctaaaacaaccttgatcaaaattgatcccgctcttaagatcaaaactaagaaggtgaacaccgcagatcagtgcgccaacaggtgtacccgaaacaaaggcctccccttcacttgtaaggccttcgtattcgataaagccaggaagcagtgcttatggtttccgtttaactctatgagcagcggggttaaaaaggaatttggacacgagttcgacctttatgaaaacaaggactatatacgcaattgcattatcggcaagggacggagctataagggtactgtctccatcacaaagtcaggaatcaagtgtcagccctggtcatcgatgatccctcatgagcacagctttttacccagctcgtacaggggcaaagacctccaggaaaactactgtcgtaatccgcggggtgaggaaggcgggccttggtgtttcaccagtaacccggaagtcaggtatgaggtgtgcgatataccacagtgcagtgaggtggagtgtatgacttgtaacggcgagagctatcgtggactcatggaccatactgagagtggcaaaatttgccaacgttgggatcaccaaactccccatagacataaatttttacctgagcgctacccggataaaggcttcgatgataactactgccgtaatccggacggccagccccgcccctggtgctatactctggacccccatacccgctgggagtattgtgccatcaagacatgcgctgacaataccatgaatgacaccgatgtgccacttgaaaccaccgagtgtatccagggccagggcgagggctacaggggcacagtgaatacaatctggaacggcataccgtgtcagcgttgggattcccagtacccccacgaacatgacatgaccccagagaacttcaaatgcaaggatttgagggagaattactgccgaaatcccgacggatctgagtctccttggtgttttacaaccgatcccaacatccgagtcggctattgctcgcagatacctaactgcgacatgtcccacggacaggattgctaccgtgggaatggaaaaaactacatgggaaatttgtcacagacgagatctggcctgacatgcagcatgtgggataaaaacatggaggatctgcaccgccacatcttttgggagcccgatgcaagcaagcttaatgagaattattgccgcaaccccgacgacgacgcccacgggccctggtgctataccggcaatccactgattccctgggactactgcccgatctccaggtgtgaaggagacaccacacccacgatagtgaatctggatcacccagtcatcagctgtgccaagacaaagcagcttcgtgtggtcaatggtatccctacaagaaccaatatcggatggatggtaagtctgagatatcggaataaacacatctgcggtggctcgctgattaaggaaagttgggttctcacggcgcgtcagtgctttccgtctagagacttgaaggactacgaagcctggctggggattcatgacgtccacggtcggggggatgaaaaatgcaaacaggttttgaatgtaagccaacttgtctatggtcccgaaggaagcgatctagtcctaatgaagcttgctagacccgccgtcttagacgatttcgtgagtacaattgatctgcccaactacggctgtacaattcccgaaaaaacttcttgcagtgtctatggttgggggtacactgggctgattaactatgatggtctgctgagagtggctcacctgtatatcatgggaaacgagaaatgtagtcagcaccataggggaaaggtgacccttaacgagtcagagatctgtgccggagccgagaagatcggatctggcccttgtgaaggtgactacgggggccccctcgtgtgtgagcagcacaaaatgcggatggttttgggagttatcgtgcccggaagaggatgtgccattcccaatcggcctgggatcttcgtgagggttgcctactacgccaaatggatccataaaatcatcctgacctataaggtgccacagagc

SEQ ID NO: 13594 - DNA, 2184 bp, synthetic construct
  misc_feature 1..2184: note = source = /note="Description of Artificial Sequence: Synthetic coding sequence"
  source 1..2184: mol_type = other DNA
atgtgggtaaccaaactgcttccagcattgcttcttcagcatgttctgctgcatctgctccttctgcctattgccattccctatgctgagggccaaaggaagagaagaaacaccattcatgagttcaagaagtccgccaagactaccctcattaagattgacccagctctgaagattaaaacaaagaaggtaaataccgccgaccagtgcgccaacaggtgtacaagaaataagggcttgccatttacttgcaaggccttcgtgtttgacaaggctcgcaaacagtgtctttggttcccattcaacagcatgtcctctggtgttaagaaagagtttggtcatgagtttgatctgtacgagaataaagattacatccgcaactgcataatcggaaagggccgttcatacaagggcaccgtttctattacaaaatcaggcatcaagtgccagccttggtctagcatgataccacatgagcacagcttccttcctagctcttacagaggtaaggacctgcaggaaaactactgtaggaatcctcgtggagaagagggcggtccctggtgcttcacctctaatcccgaggtccgctatgaggtgtgcgacatcccccagtgcagtgaggtcgagtgcatgacctgcaacggcgagagctatagaggtctcatggatcatacagaatctggcaaaatttgccagagatgggatcaccagacaccccacagacataagttcctccctgagaggtaccctgacaagggattcgacgacaattactgtcgtaatcctgatggtcagcctcgcccctggtgttacacccttgatccccacactagatgggaatactgcgccatcaagacctgtgccgataacaccatgaacgacaccgacgtaccactggagaccaccgagtgcatccagggccagggcgagggatacaggggaaccgtcaacaccatctggaacggaattccttgtcaaagatgggactcccagtacccccacgagcatgacatgacacctgagaactttaagtgtaaggacctccgtgaaaactactgtagaaacccagatggaagtgaaagcccatggtgctttaccaccgatcctaatatcagggtcggttactgcagccaaatccctaactgcgatatgtcacacggacaagactgctaccgtggaaacggcaaaaactatatgggaaatctgtcccagactcgctccggtctgacttgcagtatgtgggataagaacatggaagaccttcatcgccacatcttttgggagcctgacgccagtaagttgaacgagaattactgtaggaaccctgacgatgacgcacatggcccttggtgctacaccggcaatcccctgatcccatgggactactgtcccatttcacgctgcgaaggcgacactacccccaccattgttaacctggaccatcccgtgatatcatgtgccaagacaaagcagctgcgcgtagtgaacggtatccccaccaggaccaacatcggttggatggtctctctgaggtacaggaacaaacatatctgtggaggaagcctgatcaaggagagttgggtcttgaccgcccgccagtgtttcccatcccgtgatttgaaggactacgaggcttggcttggaatccacgatgtccacggcaggggagacgagaagtgtaagcaggtcttgaacgtttctcagctggtttacggtccagaaggttccgatttggtcctgatgaagcttgcacgtcctgcagtactcgatgactttgtttccacaatcgacctgcctaactacggctgcaccatcccagagaaaacctcatgttctgtctacggctggggttacactggtctcatcaactatgacggcctcctccgcgtggctcacctctacattatgggcaacgagaagtgcagtcagcaccatcgcggcaaggtgaccctgaatgaaagcgaaatttgcgccggtgctgagaagattggaagcggaccttgcgagggtgattacggaggtcccctcgtttgtgagcagcataaaatgagaatggtgctgggtgtaatcgtgccaggcagaggctgtgccattcccaatcgcccaggcatcttcgtccgcgtagcttactacgcaaaatggattcataagatcatcctgacttacaaagtcccacaaagt

SEQ ID NO: 13595 - DNA, 2184 bp, synthetic construct
  misc_feature 1..2184: note = source = /note="Description of Artificial Sequence: Synthetic coding sequence"
  source 1..2184: mol_type = other DNA
atgtgggttaccaagctgctgccagccctgcttttacaacacgtgttactgcatttactgctgctgcctatcgcaataccatacgctgagggccagcggaagcggcggaatactatacacgaattcaaaaaatccgctaaaactacccttataaagatagatcctgctcttaaaatcaagaccaagaaggtgaatacagcagaccagtgtgccaaccgctgcacacgtaataagggcttgccatttacctgcaaagcctttgtttttgacaaggcacgcaagcaatgcttatggtttccctttaattccatgagcagcggcgtgaagaaagagtttggccatgagttcgatctctacgaaaataaagattacataaggaactgcatcatcggtaaggggaggagttacaaggggacagtgtccatcactaagtctggcatcaaatgccagccatggtctagcatgattccccatgagcattccttcctgccaagctcctaccgggggaaggacctccaggagaattactgccggaaccctcggggcgaagaaggcggcccatggtgtttcacctctaacccagaagtgcggtacgaggtgtgtgacatcccacagtgcagtgaggtagagtgcatgacctgcaatggggaaagctaccggggccttatggaccataccgaatccggaaagatctgtcagcgctgggaccatcaaacaccccaccgtcacaaatttctccccgagagatatcccgacaaaggcttcgacgacaattattgcaggaaccccgacgggcagccaagaccttggtgctataccctggacccccacacaaggtgggagtactgcgccataaaaacctgcgctgacaacaccatgaatgatacagatgtgcctctggaaaccacagagtgcatccagggtcagggggaaggttatcgggggactgttaatacaatttggaacggcattccctgccagaggtgggactcacagtacccccacgaacacgacatgaccccagagaattttaagtgtaaagaccttcgtgaaaactactgtagaaaccccgatggaagcgagagtccatggtgctttaccacagaccccaatattcgcgtcggatactgttctcaaatccccaattgcgatatgagtcacggccaagattgttacagagggaatggaaaaaattacatgggaaacctgtcacagactaggagtggactgacatgttccatgtgggacaagaatatggaagatctgcatcgacatatcttctgggaacccgacgccagcaagttaaatgagaactactgtcgcaaccctgacgatgacgctcacggcccttggtgttataccggtaaccccctgatcccgtgggactactgtcccatctcaaggtgcgaaggagatacaactccaaccatcgtaaatctcgatcatcccgtaattagttgtgccaagaccaagcaactgcgcgtggtgaatggaattcccacccggactaatatcggctggatggtaagccttcgttatcgaaataagcacatttgcgggggctctctgataaaagagagttgggtcctgaccgcccgccagtgtttccctagtcgggacctgaaggattatgaagcctggttaggcattcatgacgtgcacggcaggggggatgagaagtgtaaacaggtgctgaacgttagccagctggtctatggaccagaaggcagcgatctcgtactcatgaagctagcaagaccagctgtgttggacgacttcgtgagtactattgatctgccaaactacggctgtactattcccgaaaagacatcctgcagtgtctatggttggggctacacaggcttaatcaactacgatggccttctaagagtggcccatctctatatcatgggcaatgaaaaatgcagtcaacaccatcgtggaaaagttacactaaacgagtccgaaatctgtgctggggccgagaaaattggctcaggcccatgtgagggagattatggcgggcccctggtgtgtgagcagcacaagatgcggatggttttgggggtgattgtgcctgggagaggctgtgccatccctaaccggcctggtatattcgtgcgggtggcttactatgccaagtggatacacaagataattctcacatacaaggtgccccagtct

SEQ ID NO: 13596 - DNA, 2184 bp, synthetic construct
  misc_feature 1..2184: note = source = /note="Description of Artificial Sequence: Synthetic coding sequence"
  source 1..2184: mol_type = other DNA
atgtgggtgacgaagctgttgccagccctcctgctccagcatgttctgctccacctccttctgctgccgatcgccattccatacgctgagggccaacgcaagcgccgcaatactattcatgagtttaagaaatccgcaaagactacgctgatcaagatcgacccggccctcaagatcaaaaccaagaaagtgaacaccgcggaccaatgcgcaaaccgctgtacccggaacaagggcctcccctttacttgcaaggccttcgtgttcgacaaggcacgcaagcagtgtctgtggtttccgtttaactcgatgagctccggagtgaagaaggaattcggtcatgagttcgacctgtatgaaaacaaggactacatcagaaactgcatcatcggaaaaggccggtcgtacaagggtactgtgtccatcaccaagtcaggcatcaagtgccagccgtggtccagcatgatcccgcatgaacactcatttctgccgtcctcgtaccgcgggaaggatttgcaggagaattactgccgcaatccgagaggtgaagaaggtggtccgtggtgctttacctcgaatccggaagttaggtacgaggtgtgcgatatccctcaatgttcggaagtggaatgcatgacctgcaatggggaatcgtaccgcggactcatggatcacaccgagagcggaaagatctgccagaggtgggatcaccagactccacaccggcacaaattcctgccggaaaggtaccccgacaaggggttcgatgacaactactgtaggaatcctgacgggcagccacgcccttggtgttacacgctcgacccgcacacgcggtgggaatactgcgcgatcaagacctgcgcggataatacgatgaatgacaccgacgtccctctggaaaccactgagtgcatccagggacagggtgaaggatacagaggtacggttaataccatctggaatgggatcccgtgccaacgctgggattcacaatacccacacgagcacgacatgactccggaaaacttcaaatgtaaggacctgcgcgagaactactgccgtaacccggatgggagcgaatcaccctggtgtttcactaccgatccaaatatcagagtgggatactgttcgcagatccctaattgtgacatgagccatggacaggattgctaccgcggcaacgggaagaactacatgggcaacctctcgcagactaggtccggtctgacctgctcgatgtgggataagaacatggaagatctgcaccggcacatcttctgggaacctgacgcctcgaagctcaacgaaaactattgtcggaaccctgatgacgatgcccatggaccgtggtgctacactggaaacccgctcattccttgggactactgccctatcagccggtgcgaaggggatactaccccgactatcgtcaatctggaccaccctgtgatctcttgcgctaaaacgaagcagctgagagtcgtgaatggcattccgacccggaccaacattgggtggatggtgagcttgcgataccggaacaaacacatctgtggcggatccctcatcaaggagtcctgggtgctcactgctcgacagtgcttcccatcgagggatcttaaggattacgaagcctggttgggaatccatgacgttcatggccgcggcgacgaaaaatgtaaacaggtcctgaatgtgagccagttggtctacgggccagagggttcggatttggtgcttatgaagctggctaggcctgcagtgcttgacgactttgtttccactatcgacctgccaaactatgggtgtaccatccctgaaaaaacctcgtgctcagtgtacggctggggatataccggactgatcaactatgatggactcctgcgggtggctcatctctacatcatgggaaatgaaaagtgttcgcagcatcaccggggcaaggtgaccctgaacgaatcggaaatctgcgcgggggcagaaaagatcggaagcggtccgtgcgaaggagattacggaggaccccttgtttgtgagcagcataagatgagaatggtgctgggtgtcatagtcccaggaaggggatgcgccatccctaaccgtccgggaatcttcgtgagagtggcctactacgccaagtggatccataagatcatcctgacctacaaggtgcctcagtca

SEQ ID NO: 13597 - DNA, 2184 bp, synthetic construct
  misc_feature 1..2184: note = source = /note="Description of Artificial Sequence: Synthetic coding sequence"
  source 1..2184: mol_type = other DNA
atgtgggtgaccaaactgctgccggcccttctgctgcagcatgtgctcctgcacctgctcctccttccaatcgcgatcccgtacgccgaaggacaaagaaaacggcggaacactattcatgagttcaagaagtcggccaaaaccaccctgatcaagatcgacccagcgctgaagatcaagaccaagaaagtgaacaccgctgatcagtgtgccaaccgctgcacgcggaataaggggctcccgtttacttgcaaggctttcgtattcgataaggcccgcaagcaatgtctctggttcccattcaactcgatgtcctcaggtgtcaagaaggagtttggacacgaattcgacctgtacgaaaacaaggactacatcaggaactgtatcatcggaaagggccgctcgtacaaagggactgtgagcattactaaatcgggtataaagtgccagccttggagctccatgataccgcacgaacactctttcctgccatcgtcgtaccgcggcaaggatctgcaggaaaactactgcagaaacccgagaggggaggaaggcggcccatggtgcttcactagcaacccggaagtgaggtacgaagtgtgcgacatccctcagtgctcagaagtggagtgcatgacgtgcaacggagagtcatatcggggacttatggaccacaccgaaagtggaaagatctgccagcggtgggaccatcagactccgcatcgccacaagtttctgcctgagcggtacccagacaaaggcttcgacgataactactgtagaaatccggacggtcaacccagaccgtggtgctacacgctggacccgcacaccagatgggagtactgcgcaatcaagacttgcgcggacaacaccatgaatgataccgatgtgccgctggagactaccgaatgcattcaaggacagggagaaggatacagagggaccgtgaatactatctggaatggaatcccgtgccaaagatgggactcccaatatccgcatgaacacgatatgaccccggagaatttcaaatgcaaggatctccgggagaattactgccgaaaccctgatgggtccgagtcgccttggtgcttcacgactgatccgaacatccgcgtcggatactgttcacaaatccctaactgcgatatgtcgcatggacaggactgttatcgcgggaacggtaagaactatatgggaaatctttcacagacgcgctcgggattgacctgttcgatgtgggataagaatatggaggatttgcaccgtcacatcttctgggaaccggatgcatcgaagttgaacgaaaactactgtcgaaatcctgacgatgacgcgcacggaccctggtgctacaccggaaacccactgatcccatgggactactgcccgatctccaggtgcgaaggcgatactaccccaactatcgtgaatctggatcacccagttatctcctgcgcaaagacgaagcagctgagggtggtgaacggcatcccgaccagaaccaatatcggatggatggtcagcttgagataccggaacaagcatatctgcggaggatcgctgatcaaagaaagctgggtgttgactgcccggcagtgctttccaagcagagatctgaaggactacgaagcctggttgggtatacacgacgtacacggtcgcggtgacgaaaagtgcaagcaggtgctcaatgtctcacagttggtgtatggccccgagggctccgacctcgttctcatgaagctcgctcgcccggccgtcctggacgattttgtcagcaccattgacctgcccaactatgggtgtaccattcctgagaaaacttcatgttcagtgtacggctggggctacaccgggctgatcaactacgacggactgcttcgggtggctcatctgtacatcatgggaaacgagaaatgctctcagcatcatagaggcaaagttacccttaacgagtcggaaatttgcgcgggggccgagaagattggatcgggcccgtgtgaaggagattacggcggccccctggtgtgtgagcaacacaaaatgcgcatggtcctcggagtgatcgtgccgggacgaggatgtgccattcctaaccggccaggtatctttgtgcgcgtcgcttactacgccaagtggatacacaaaatcatcttgacctacaaagttcctcaatca

SEQ ID NO: 13598 - DNA, 2184 bp, synthetic construct
  misc_feature 1..2184: note = source = /note="Description of Artificial Sequence: Synthetic coding sequence"
  source 1..2184: mol_type = other DNA
atgtgggtgactaagctgctgccagcccttttgctccagcatgtcctccttcatcttttgctgttgccgattgccattccttacgcagaaggacaaaggaaacgccgcaatacgatccacgagttcaagaaatccgcgaaaactaccctgatcaaaattgatcccgcccttaagatcaaaactaaaaaggtgaacactgcagatcaatgcgcaaaccgctgtaccagaaacaaaggccttccctttacttgtaaggcgttcgtctttgataaggcacggaagcagtgcctctggtttccgttcaattccatgtcgtcgggcgtgaaaaaagaatttggacatgaattcgatctctacgaaaacaaagattacataagaaactgtatcattgggaaaggccggtcctataaaggcaccgtctcgattactaagtcagggattaagtgtcaaccatggtcatcgatgattccacatgaacattcctttctgccctcatcatataggggaaaagatctccaagaaaactactgcaggaatccaagaggagaagaagggggcccttggtgtttcacttcgaacccagaagtccgttacgaagtgtgcgacattccacagtgttcggaagtggagtgtatgacctgcaacggagagtcgtaccgaggactgatggaccacaccgaatcaggtaagatctgtcaacgttgggatcaccaaactcctcatagacataagtttctccccgaacgttaccctgataagggtttcgatgataactactgtcgtaatcctgacggccaaccccgtccctggtgctacaccctcgatcctcatactagatgggaatactgcgccattaagacctgtgccgataacactatgaatgataccgacgtgcctcttgagactaccgaatgtattcaaggacaaggagaaggataccggggtaccgtgaacaccatttggaacggcattccttgtcagaggtgggactcgcagtatccgcatgagcacgatatgaccccagagaatttcaagtgcaaggatctgagagagaattactgcagaaacccggatggctcggagtcgccgtggtgttttaccaccgatcccaatattcgtgtgggatactgttcacaaataccaaactgcgacatgtcacatggacaggattgctacaggggaaacggaaagaactacatgggaaatctttcgcagacccgctcgggactcacttgctcaatgtgggataagaatatggaggatctgcatagacatatcttttgggaaccagacgcaagcaaacttaacgagaactactgccggaaccctgatgatgatgcccatggaccttggtgctatactggtaaccctctgataccctgggactactgcccaatcagccggtgtgaaggggacaccacgccgactattgtgaatctcgatcatccagtgatttcttgcgctaaaactaagcaactcagagtggtcaatggaatacccacccgaactaatatcggatggatggtgtcccttcgctaccggaacaaacatatttgtggcggttccctcatcaaggagagctgggtgctgactgcaagacagtgctttccgtcgcgcgatcttaaggattacgaggcctggctcgggatccatgatgtccatggacgcggagatgaaaagtgtaagcaggtgctcaacgtgagccaactcgtttacggccctgagggatccgatctcgtgcttatgaagctggccaggcctgcagtgctggatgacttcgtgtcgactattgacctgccaaactacggatgtaccatccccgaaaagacctcctgctcagtctacggatggggatataccggtctgatcaattacgatggactgctgagagtggcacatctttacatcatgggtaacgaaaaatgttcccaacatcataggggaaaggtgaccctgaatgagtccgagatctgtgcaggcgcagaaaagataggctctggaccctgtgagggggactacggaggcccgttggtctgtgaacagcataagatgcggatggtgcttggtgtgatcgtgcctggtagagggtgtgctattccaaatagacctgggatctttgtgcgggtggcttactacgcaaagtggatccataagatcatacttacttacaaggtgccgcaaagc

SEQ ID NO: 13599 - DNA, 2184 bp, synthetic construct
  misc_feature 1..2184: note = source = /note="Description of Artificial Sequence: Synthetic coding sequence"
  source 1..2184: mol_type = other DNA
atgtgggtgactaagctcctgccggctctgctcctgcaacatgtgctcctccatcttctgctgctgccaatcgcgatcccatacgccgagggtcagcggaagcggcggaataccatccatgagttcaaaaagtcggccaagactaccctgatcaaaatcgaccctgctctgaagatcaagactaagaaggtcaacactgcggaccaatgcgccaatcgatgcactcggaataagggattgccgtttacctgcaaggctttcgtgtttgacaaagcgcgcaagcaatgtctgtggttcccgtttaacagcatgtccagcggagtgaagaaggaattcggacacgagttcgatctgtacgaaaacaaggactacatcagaaactgcatcatcggaaagggacgcagctacaaggggactgtctcgatcaccaaatcggggatcaagtgtcagccgtggagctctatgatcccgcacgaacattcgttcctcccctcgtcctaccgggggaaggaccttcaggaaaactactgtcggaatccgaggggtgaggaaggtggtccgtggtgcttcacctcgaacccagaagtgcggtacgaagtgtgcgacattccacaatgcagcgaggtggagtgtatgacttgtaacggggaatcgtaccgcggactgatggaccataccgaaagcggcaagatctgccaacgttgggatcaccaaactccgcatcgccacaaattcctgccagaacgatacccggataaggggtttgacgacaactactgcaggaaccctgacggccagccgcgcccgtggtgttacaccttggacccacataccagatgggagtactgcgcaatcaaaacttgcgctgataacaccatgaacgacaccgacgtgccgctggagacgactgagtgcatccagggtcagggggaaggctaccggggaactgtgaacaccatctggaatggaatcccttgtcaacgctgggacagccagtacccgcatgaacatgatatgacccctgaaaacttcaagtgcaaggacctcagggagaattactgccggaacccagacggatcagaatcaccgtggtgctttaccactgacccgaacatccgggtgggatactgtagccagatcccaaactgtgatatgagccatggtcaggattgttaccgcggaaacggaaagaactacatgggcaacctgtcgcagacccgcagcggactgacttgttcaatgtgggataagaacatggaagatctgcacaggcatatcttctgggagccagacgcatcaaaactgaatgaaaactactgccgcaatcctgacgatgatgcccacggaccttggtgttacactggaaatccgctgattccgtgggactactgtcccatctcgcgctgtgagggtgacactactccgaccatagtcaatctcgaccatccggtgatctcgtgcgccaagaccaagcagctccgcgtggtcaacggcatcccaactcgcactaatatcggctggatggtttccctgagataccgcaacaagcacatctgcggcgggtcgcttatcaaggaatcgtgggtgctgaccgcgcggcaatgtttcccatccagggacctcaaggattacgaagcctggctcggaatccacgatgtgcacggccgcggtgatgagaagtgcaagcaggtgctcaacgtgagccaattggtgtacggacctgaggggtcggatttggtgctgatgaagctggcgcgcccggccgtgctggatgactttgtgagcaccattgacctccccaactacggatgcaccatcccagagaaaacttcctgcagcgtgtacgggtgggggtacactggactgatcaactatgatggcctgcttagagtcgcgcacctgtacatcatggggaatgaaaagtgttcgcagcaccatcgcggaaaggtgactctgaacgaatccgaaatctgcgccggagcagagaaaatcggatcgggcccttgtgaaggagattacggaggcccactggtgtgtgagcaacacaaaatgcgcatggtgcttggggtgattgtgcctggcaggggatgcgcaatcccgaacagaccaggcatctttgtccgggtggcatactatgcaaagtggattcacaagattatactgacctacaaggtccctcagtcc

SEQ ID NO: 13600 - DNA, 2184 bp, synthetic construct
  misc_feature 1..2184: note = source = /note="Description of Artificial Sequence: Synthetic coding sequence"
  source 1..2184: mol_type = other DNA
atgtgggtcaccaagctgcttccggcgttgctcctgcagcatgtgctcctccacctgctcctgctcccgatagcgatcccctacgctgaagggcaacgcaagcgccgcaacaccatccatgagttcaaaaagagcgccaagactaccctgatcaaaatcgacccggcattgaaaatcaaaactaagaaggttaacacggctgaccaatgtgcgaatcgctgcactagaaacaaaggactgccttttacctgcaaggccttcgtgttcgataaggcacggaaacagtgcctttggttcccatttaactccatgagctccggagtcaagaaggagttcgggcacgaattcgatctgtacgaaaacaaggactacattagaaactgtatcataggaaagggaagatcctataagggcactgtctcgatcaccaagtcaggcattaagtgccagccgtggagctcaatgatcccgcatgaacattccttcctgccatcgagctaccgcggtaaggatctccaagagaactactgtcgaaaccctcggggcgaggaaggcggtccgtggtgcttcacctccaacccagaggtgagatacgaggtgtgcgacatcccgcagtgctcagaagtggaatgcatgacctgcaatggagagtcgtatcgcggactgatggaccataccgaatcaggcaagatctgtcagagatgggaccaccaaactccgcataggcacaagttcctgcctgaacggtacccggacaagggattcgacgacaactactgccgcaatcccgatggtcagccacgaccatggtgctacacgctggatccacacactcgttgggagtactgtgccatcaaaacctgcgcagacaacactatgaatgacactgacgtcccgttggagactaccgaatgtatccaggggcagggagagggttaccgcggcaccgtcaacaccatctggaatggcattccgtgccaacgatgggactcccaatacccccatgaacacgatatgactcccgaaaacttcaagtgcaaggacctgcgggaaaactattgccggaatcccgacggctccgagtcgccttggtgctttactaccgatcccaatatccgcgtgggttattgctcgcagatccccaactgcgacatgagccatgggcaggattgttatcggggcaacggcaagaactacatgggaaacctgtcgcagactaggagcgggctgacctgctcaatgtgggataagaacatggaggacctccaccggcacatcttctgggagcccgatgcatctaaactcaatgaaaactactgtcgcaatccagatgatgatgcgcatggaccctggtgctacaccggaaatcccctgattccatgggactattgtccgatttctcggtgcgaaggggacactaccccaactatcgtcaacctggaccatccagtcatttcatgcgcgaaaactaagcaactccgcgtggtgaacgggatcccgaccagaaccaacatcggatggatggtgtcactgagatacagaaacaaacacatctgtggaggctcactcattaaagaatcatgggtgctcaccgcgcgccagtgcttcccgtcgagagatctcaaggattacgaagcctggctgggaatccacgacgtgcatggccgcggagacgagaagtgcaagcaagtgctgaatgtctcgcaactcgtgtacggtcctgagggaagtgacctcgtcctgatgaagctcgcccggccagcagtgctggatgatttcgtgtcaacgatcgatctgccaaattacggatgcaccatccctgaaaaaacctcctgttccgtgtacggctgggggtacactgggctgattaactacgatggtctgctcagagtggcgcacctttacatcatgggaaacgaaaaatgttcgcagcaccaccggggaaaggtgactctgaacgagtcggaaatctgcgcgggagcggaaaagatcggctcaggcccgtgcgagggagactacggaggaccgctcgtctgcgaacagcacaagatgagaatggtgctgggagtcatcgtgccgggtcgcggctgcgctatcccaaataggcctggaatctttgtgcgggtcgcgtactacgccaagtggatccacaaaatcattttgacgtacaaagtgcctcagtca

SEQ ID NO: 13601 - DNA, 2184 bp, synthetic construct
  misc_feature 1..2184: note = source = /note="Description of Artificial Sequence: Synthetic coding sequence"
  source 1..2184: mol_type = other DNA
atgtgggttacgaagctgcttcctgcactcctgctgcagcacgtgctgctgcatttgttgctgctccccatcgcaatcccctacgccgaagggcagcgtaaaaggcgtaataccatccacgaattcaagaagtccgcaaagaccaccctgatcaaaattgatcctgccttgaagatcaaaacaaaaaaggtgaacacggctgatcagtgcgccaaccgctgcacaaggaataaaggccttccctttacatgcaaagccttcgtcttcgacaaggcccggaagcaatgtctatggtttccttttaattccatgtcatctggcgtgaagaaggagtttggccacgagtttgatctatacgagaacaaagactacatacgtaattgtatcatcggtaaaggccgctcctataaagggaccgtttctatcaccaagagcgggatcaagtgtcagccgtggtcttccatgatccctcacgagcatagtttccttccgtcttcataccgggggaaggatcttcaggagaactactgtcgaaaccctaggggggaggaaggcggcccttggtgtttcacctcgaacccggaggtgcgatatgaggtgtgcgacattccccagtgctccgaagtcgaatgtatgacttgtaacggcgaatcataccggggcctgatggaccatactgaatccggaaaaatctgccaacgttgggaccaccagacaccccaccgacacaagtttctgccagagaggtacccagacaagggattcgatgacaactactgtaggaatccggacggccagccccgaccttggtgttacacgctcgaccctcatacccgatgggagtactgtgccatcaagacgtgcgcagacaacaccatgaatgataccgacgtgcctctggaaacgaccgagtgcatccaaggtcaaggcgaaggctaccgaggtactgtgaatacaatttggaacgggattccttgtcagagatgggacagccagtatccccacgaacacgatatgacccctgaaaactttaagtgcaaggacctccgcgagaattattgtagaaatcctgacgggtcagagagcccctggtgcttcactacggacccgaatattagagtcggctattgttcccaaattcccaactgcgatatgagccacggccaggattgctacagaggaaacggtaagaactacatgggaaatctctctcaaacccgaagcggcctgacctgttctatgtgggataagaatatggaagacctgcaccgccatatattctgggaaccagatgccagtaagttgaatgagaattactgcagaaacccagatgatgacgcccacgggccatggtgctacacaggaaaccctctcatcccctgggactattgtccaatctcccggtgtgagggggataccacccccaccatcgtcaacttagaccaccctgtgatatcgtgcgccaaaaccaagcaactaagggtcgtgaatggcatccctacgagaaccaacattggctggatggtgtccctgaggtacagaaataaacacatctgcggcggctctttgatcaaagaatcttgggtactgactgcgcggcagtgcttcccctctcgggatctgaaggactatgaggcctggttgggcattcacgatgtccatgggaggggggacgaaaagtgcaagcaagtactcaatgtgtcccaattggtgtatggccccgagggcagcgacctggtcctaatgaagttagccagacccgcagttctggacgattttgtaagcacaattgacttaccaaactatgggtgcacgattccagaaaaaacatcttgcagtgtgtacggttggggctacactggtcttatcaactatgatggattgcttcgtgtagctcatctttacatcatgggaaatgagaagtgttcccaacatcaccgaggcaaggtcactctgaatgaatccgagatctgtgctggagccgagaagattggatccggcccctgtgaaggagattatggcgggccgctcgtttgcgagcaacataagatgcggatggttcttggcgttatagtccctggaagaggatgtgcgattcccaacagaccgggaattttcgtgcgggtcgcgtattatgcgaaatggatccataaaattattcttacgtacaaagtgccccagtcc

SEQ ID NO: 13602 - DNA, 2184 bp, synthetic construct
  misc_feature 1..2184: note = source = /note="Description of Artificial Sequence: Synthetic coding sequence"
  source 1..2184: mol_type = other DNA
atgtgggtgacgaagctcctgcccgcactgctgcttcaacatgtgctgctgcatttgcttcttctcccaatagcgatcccatacgcagaaggtcaaagaaaacgccggaacaccattcatgagttcaagaaaagcgccaagactactcttatcaaaatcgaccctgcgctcaagataaagacgaaaaaagtcaataccgccgaccagtgtgccaaccgctgcacccgtaataagggtctgccttttacttgtaaggcctttgtgtttgataaggcacgtaaacagtgtttgtggtttccgtttaacagcatgtcgtccggggtcaagaaggaatttggacacgaatttgacctgtacgagaacaaggattacatcagaaactgcattataggcaaggggagatcctacaagggcaccgtgtcgatcaccaagtccggaatcaaatgccagccgtggtcatcgatgatccctcatgaacattccttccttccatcatcttatcgcggaaaggaccttcaagagaactactgtcgaaaccccagaggagaagaaggaggtccttggtgtttcacttcgaaccctgaagtccggtacgaagtctgcgacattccgcagtgttccgaagtcgaatgtatgacctgcaacggagagagctacagaggccttatggatcataccgagtcagggaaaatctgccaacggtgggaccatcagactccacatagacacaagttcctgcctgagcggtaccccgataagggttttgatgacaattactgtcgcaaccctgacggacaacctagaccgtggtgctatactctcgacccacacactcgctgggaatactgtgctattaagacttgtgccgacaatactatgaacgatactgacgtgcctctggaaaccactgaatgtattcaaggtcagggggaaggttaccggggcactgtgaacaccatttggaatggaattccgtgtcaaaggtgggactcccaatacccacacgagcatgacatgaccccagaaaacttcaagtgcaaggatcttagagaaaactactgtaggaaccccgacggttcggaatccccctggtgcttcactaccgatcccaacataagagtgggttactgttcccaaattcccaattgcgatatgtcacatgggcaagattgttaccgcgggaatggaaagaactacatgggaaacctgtcgcagacccgatccggacttacttgttccatgtgggacaagaatatggaggatctccatcggcatatcttttgggaaccagacgcatcgaaactgaacgaaaactactgccgcaacccagacgacgatgcacacggtccctggtgttacactggaaacccgctgattccttgggattactgtcctatttcgagatgtgagggagataccaccccaaccattgtcaaccttgatcatccagtcatttcctgcgctaagaccaaacagctgagagtggtcaatggaatacccacccggactaacatagggtggatggtgagccttcgataccgcaacaagcatatatgtggtgggtcgctgattaaggaatcgtgggtgctgaccgcacgacagtgctttccatccagggacctcaaagattacgaagcatggttggggattcacgatgtccacgggcggggcgacgaaaagtgtaaacaagtgcttaatgtgtcgcaactcgtgtacggaccggagggcagcgatctggtgctgatgaagctggcacgacccgcagttctggatgacttcgtttccactattgatcttccgaactacggatgtactattccagaaaagactagctgttccgtgtacggctggggttacaccggactcattaactacgatggcctgttgcgcgtcgcccatctttacattatgggcaacgaaaaatgctctcagcaccatcgtgggaaggtcacccttaacgagtcagagatctgtgccggcgcagagaaaattggaagcggcccttgcgaaggagactacggaggccctcttgtgtgcgagcagcacaagatgcggatggtgctcggcgtcattgttcccggtagaggatgcgcaattcccaatcgccctggaatctttgtgagggtggcgtactacgcaaagtggattcataagatcattctcacttataaggtgccgcaatcg

SEQ ID NO: 13603 - DNA, 2184 bp, synthetic construct
  misc_feature 1..2184: note = source = /note="Description of Artificial Sequence: Synthetic coding sequence"
  source 1..2184: mol_type = other DNA
atgtgggtgactaaactgttacctgccctgctgcttcagcatgtgctcctccatctactgcttctgcctatcgcaatcccctatgccgagggtcagcgaaaacggagaaatactatccatgagttcaagaaaagtgccaaaaccacattgatcaagatagatcctgcgcttaaaataaaaacaaagaaggtcaacaccgcagaccagtgtgccaatcgctgcaccagaaataaagggctccctttcacttgcaaggctttcgtcttcgacaaagctaggaaacagtgtctgtggtttcccttcaatagcatgtcctccggcgtcaagaaggaattcgggcatgaattcgacttgtacgagaacaaggattatattcgcaactgtatcattggcaaggggcgttcttacaagggtaccgtgagtattacaaagtccgggataaaatgtcagccttggtccagcatgatacctcatgagcattcctttttgccaagctcatatcgggggaaagaccttcaggagaattactgcagaaatcctcggggcgaggagggggggccatggtgctttacgtcaaatccggaagtgaggtacgaagtatgcgatattcctcagtgttcggaagtggagtgcatgacgtgtaacggagagagctatcgcggtttaatggatcacacagaaagcggcaagatttgtcagagatgggaccaccagacgccacatcggcacaagtttctgcccgaacgataccccgataaaggctttgatgataactattgcaggaatcctgacggacagccccgcccatggtgttacaccctggacccccatacgagatgggaatactgcgcaattaagacctgcgctgacaacacaatgaatgatacagacgtccccttagaaaccaccgaatgtattcagggtcaaggcgaaggctaccgcgggactgtgaataccatatggaacggaattccatgtcaaagatgggattcacagtacccccacgagcacgacatgacaccggaaaatttcaagtgcaaagaccttagagaaaattactgtcggaaccctgatggaagtgagagcccgtggtgtttcactaccgaccctaatatacgggtgggatactgttctcagattcctaattgtgatatgtcacacggacaggattgctatcggggaaatggaaagaactacatggggaacttgagccaaacccgctctggcctgacttgtagcatgtgggacaagaatatggaggacctgcatcgacacattttttgggagcccgatgcatcaaagctgaacgagaattactgtcgcaaccctgatgatgatgcccatgggccgtggtgctacaccggcaatccactgatcccatgggactattgccccatctcgaggtgcgagggggatacaaccccgacgatcgtaaacctggaccaccccgtgatctcttgcgccaagaccaagcagctgagagtggtgaacggtatcccaacccggacaaatatagggtggatggtctcccttagatacaggaataagcacatctgcggtggatctcttattaaggaatcctgggtgctaaccgccagacaatgttttccgagccgggacttgaaggactatgaagcctggctcggcattcacgacgtgcatggaaggggggacgagaaatgtaaacaggtgctcaacgtcagccagctcgtctatggcccagagggatcagatctggtgctcatgaagttggcgaggccggcagtgcttgacgactttgtgtccacgattgacctgccaaactacggatgtactatccctgagaaaacttcctgctctgtctacggttgggggtacactgggctgatcaactatgacggattgctgagagttgctcatctgtatattatggggaacgaaaaatgctctcaacaccatcggggcaaggtgacgctgaacgaatctgagatatgtgcaggggctgaaaaaatcggctcgggcccatgtgaaggtgattacggcggtccactggtttgcgaacagcacaagatgcgtatggtgctgggggtgatagtacccggccgcgggtgcgcgattcccaacagaccgggcattttcgtacgagtcgcctactatgccaagtggatccataagatcatcctgacctacaaagttccccaatct

SEQ ID NO: 13604 - DNA, 2184 bp, synthetic construct
  misc_feature 1..2184: note = source = /note="Description of Artificial Sequence: Synthetic coding sequence"
  source 1..2184: mol_type = other DNA
atgtgggtcactaaactcctgcccgctctgctcttgcagcacgttcttcttcacctgctgctgctacctattgccattccatatgcagaaggccagcggaaaagacggaatactatacacgaatttaagaagtcagccaagactaccctgatcaagatagatcccgcattgaaaattaaaaccaaaaaggtgaacacagccgaccagtgcgccaacaggtgcactcggaataaaggcctgcccttcacgtgcaaagcctttgtgttcgataaggcacgtaaacaatgcctgtggtttcccttcaactccatgagcagcggcgtgaaaaaggagttcggacacgagtttgacctctatgaaaacaaggactatataagaaattgcatcatcggtaaggggcgctcctacaaggggaccgttagcatcacaaagtccggaatcaaatgccaaccctggtcaagcatgatcccccatgaacatagttttctccctagcagctataggggtaaggacctgcaggagaattactgccgcaaccctcgcggagaggaaggcggaccttggtgcttcacatccaatccagaagtgagatacgaagtctgcgacattccacagtgtagcgaagtggaatgtatgacctgtaacggggaatcatatagggggctcatggaccacactgaaagcggtaagatatgtcagagatgggatcaccagaccccccatcgccacaaattccttccagagcggtatccagataaggggttcgacgataattactgtaggaatcctgatgggcagccgcggccttggtgctacacgctagatcctcatactagatgggagtattgtgccatcaagacgtgcgcagataacactatgaacgacacagatgtccccctggagacaacagagtgtatccagggccagggagaggggtatcgggggactgtgaatacgatctggaacggcatcccgtgtcagagatgggatagccaatatccccacgaacacgatatgacccctgaaaatttcaaatgcaaagatctgagggaaaactactgtcgcaaccccgatggtagcgaaagcccgtggtgctttacgaccgatcctaacatacgggtaggttattgcagtcagatccctaattgtgacatgtcacacggccaggactgttaccgcggcaacgggaagaattatatgggcaatctgtcgcagacccgctctgggttgacttgttcgatgtgggacaagaacatggaagatctgcacaggcacatcttctgggagccagatgccagcaagctgaatgaaaattactgtaggaacccagacgatgatgctcatgggccttggtgctatacgggaaatccattgattccttgggactattgtcccataagtcgctgtgaaggcgatacgacacctacaatcgtaaacctcgatcaccctgtgatctcgtgtgccaaaactaaacagctcagggtggtcaatggtatccccacacggacgaatatcggatggatggttagtttgcgatatagaaacaagcatatttgcggcggttccctgatcaaggagtcctgggttcttactgccagacaatgctttccaagcagagacctgaaagattatgaagcctggctcggaattcacgatgtgcacggaaggggtgatgagaagtgcaagcaggtgctgaatgttagccagctggtatatgggcctgagggatccgatctcgttctcatgaagttagccaggcctgctgtgcttgacgactttgtgtcgacaattgatctgccgaactatgggtgcactatccccgaaaaaacatcctgtagcgtgtatgggtggggttacactggcttaattaactacgacggactgcttagggtggctcacttgtacatcatggggaacgaaaaatgttcccagcaccaccgaggaaaagtcacattgaatgagtccgaaatctgtgctggcgctgaaaaaataggtagtgggccctgtgagggagattatggggggccactggtgtgtgagcagcataagatgaggatggtgcttggcgtgatagttcctggacgtgggtgtgccattccaaaccgccctgggatttttgtgcgtgtggcctactacgctaagtggatacacaaaatcattctaacttataaggttccccagtcc

SEQ ID NO: 13605 - DNA, 2184 bp, synthetic construct
  misc_feature 1..2184: note = source = /note="Description of Artificial Sequence: Synthetic coding sequence"
  source 1..2184: mol_type = other DNA
atgtgggttacgaaattacttccggcgttactcctgcaacatgttttattgcacttgttactgttaccgatcgcgattccgtatgcagaaggacaaagaaaaaggcggaacacgattcatgaatttaaaaaatctgctaagacgaccctgatcaaaatagaccctgctcttaagataaaaacaaaaaaagtgaatactgcagatcagtgtgcaaacagatgtaccaggaacaagggccttccatttacttgcaaagcattcgttttcgataaggcacgtaaacagtgtttgtggtttccgtttaattcaatgagctcgggcgttaaaaaagaatttggacatgaattcgacctttatgaaaataaagattacataagaaactgcattattggcaagggtcgctcttacaaaggtacagtttcaatcactaaatctgggattaaatgccaaccgtggtcatcgatgatcccacatgagcacagtttcttaccgtcaagctatcgcggcaaagacttacaagagaactattgtcgcaaccctcggggcgaagagggtggcccctggtgttttactagcaatccggaagtgcgttacgaagtttgtgatattccccagtgctcagaagttgaatgcatgacctgtaacggtgaatcatatagaggactgatggatcacaccgaatcaggtaaaatttgccaacgatgggaccatcaaacaccgcatagacacaaattcctgcccgaacgttacccggacaaagggttcgatgataattattgtcgtaatcctgatggacaaccgcgtccatggtgttacacgttggatccacacacacggtgggagtattgcgcgatcaaaacttgcgcagataatacaatgaatgatacggacgttccgcttgagacaacagagtgcattcaagggcaaggtgaagggtatagagggacagtcaatacaatctggaatggcattccatgccaacgatgggattcccagtatccgcatgagcatgatatgacaccggaaaattttaaatgcaaagatttgcgagagaactactgtcgcaatcctgacggatctgaatctccttggtgttttaccaccgatccgaatatcagggtaggctattgttcacagataccaaattgcgatatgtctcatgggcaagactgttatcgtggtaatggaaaaaactacatggggaacttgtcacaaactcggtcgggtttaacctgcagcatgtgggacaaaaatatggaagatttacatagacatatcttttgggagccggatgcgtcgaaattaaatgaaaactactgtcgtaacccggacgacgatgcacacgggccttggtgttatactggcaatccgcttattccatgggattactgccctatctctcgctgcgaaggagatacaacgcccacaattgtcaatctcgatcatccagtcatctcatgcgcaaagacaaaacagctgcgggtggtaaatgggattcctaccaggacaaatattgggtggatggtaagtcttcgttaccgcaataaacatatttgtggtgggtctcttataaaagaaagttgggttcttacagcacggcaatgttttccaagcagagacttaaaagattatgaagcctggctggggatccatgacgtgcacggccgaggggatgaaaagtgtaaacaggttcttaacgttagtcagctggtctatggtccggagggatctgatttagttctgatgaaacttgcgcgccccgcagtgcttgatgactttgtgtcaacaattgatttaccaaactacggatgcaccatccctgagaaaacgtcctgtagcgtatatgggtggggttacacaggactgataaattatgacggactacttagagttgctcacttgtatatcatgggtaacgagaaatgtagccaacatcatcggggtaaagtgacacttaacgaatcggaaatctgtgctggcgctgaaaaaattggctcaggtccgtgcgagggcgactatggcggacctctggtttgcgaacagcacaagatgaggatggttttaggcgtcatcgtaccgggaagggggtgcgcaatcccgaaccgccctggtatctttgtccgtgtggcatattacgcaaaatggattcataaaattattctgacctataaagttccgcaatca

SEQ ID NO: 13606 - DNA, 2184 bp, synthetic construct
  misc_feature 1..2184: note = source = /note="Description of Artificial Sequence: Synthetic coding sequence"
  source 1..2184: mol_type = other DNA
atgtgggtgaccaagcttctgccggcactgctacttcagcacgtgctgctgcatcttttgcttctccccatcgccatcccttacgccgaaggacaacgtaagaggagaaacaccatccacgagttcaagaaaagtgccaaaaccaccctgataaaaattgatcctgctctgaagattaagaccaagaaggtcaacactgcagaccagtgcgcaaaccggtgcactcgcaacaagggtctgccttttacttgtaaggcgtttgtgttcgataaggctagaaagcaatgtctatggttccctttcaattctatgtcctccggtgtcaagaaagagttcggacatgaatttgatctgtatgaaaataaggattatatcagaaattgcatcataggaaagggccgctcctataagggcacagtgtcaattactaaatctggcatcaaatgccagccttggtcatccatgatccctcatgagcatagttttctacccagctcctatcgcggcaaggatctacaggaaaactactgcagaaatccccgcggcgaagaaggaggaccctggtgcttcacatccaaccccgaggttcgctacgaggtgtgtgacatccctcaatgttccgaagttgagtgcatgacttgtaatggagaaagctaccgtgggcttatggaccacactgaaagcggcaaaatttgccaacggtgggatcatcagacgcctcatagacataagtttctgcccgagcggtatcccgacaagggctttgatgacaattactgtaggaatcctgatgggcagcctcgcccttggtgctacacactggacccacatacgaggtgggagtattgcgcaatcaaaacatgcgctgacaatactatgaatgacaccgatgtccctttggagaccaccgagtgtatacagggccagggcgagggatacagaggaaccgtcaatacaatttggaatggtattccatgtcagaggtgggattcccaatacccacacgagcacgatatgactcccgaaaacttcaaatgcaaggatctgagggaaaactactgccgcaatccagacgggtctgagtctccttggtgcttcaccactgacccaaacatccgcgtaggctactgctcacagatccccaactgcgacatgtctcatggccaggattgctaccgtggcaatggcaagaactacatgggaaacctgagccagacacgcagtggcctgacttgttccatgtgggacaaaaatatggaggatctgcatcgccatatcttctgggaaccagacgcatccaagctgaatgagaattattgtcgaaatccggatgacgacgcgcatggcccatggtgttataccggcaaccccctgatcccgtgggactactgtcctatttctcgatgtgaaggcgatactacgcccacaattgtgaatttggaccaccccgtaatctcttgcgccaaaacgaaacagctgcgagtggtcaatgggatcccaacccgaactaacattggatggatggtgagtctgcgttacaggaataagcacatctgcgggggctctctcattaaggagtcttgggtgctgaccgcccgccaatgctttccaagccgcgacttgaaggattacgaagcatggctagggattcacgacgttcacggcaggggagacgagaaatgtaagcaggtcctgaatgtatcacagctggtatacgggccagagggaagtgatctggttctgatgaagctcgcacgccccgccgtgctcgatgacttcgtctcaactatagacctccccaattacgggtgtacaatacccgagaaaacttcatgttcagtttacggatggggctacactggcctaattaattacgacggacttctgagggtcgcccacctttacatcatgggcaatgaaaagtgctctcagcatcaccgtgggaaggttacactgaatgagtctgagatttgtgccggcgccgaaaaaatcgggagtggaccttgcgaaggggattatgggggccccctggtttgcgagcagcataaaatgcggatggttttgggcgttatcgtgccgggtcgcggatgtgccatccctaaccgaccaggaattttcgtgcgggttgcatactacgccaaatggatccataaaatcatcctgacatacaaggtacctcagagc

SEQ ID NO: 13607 - DNA, 2184 bp, synthetic construct
  misc_feature 1..2184: note = source = /note="Description of Artificial Sequence: Synthetic coding sequence"
  source 1..2184: mol_type = other DNA
atgtgggtgaccaagctgttgccagcacttctgcttcagcacgtgttgctccatttgctgctcctgcctatcgccataccctatgctgaggggcagaggaaaaggaggaacactatccacgagtttaagaaatctgcaaaaactaccctgattaagattgacccagcgctgaaaatcaagaccaagaaggtgaacacggccgatcagtgcgccaatagatgtacgagaaacaaaggactgcccttcacgtgcaaagcctttgtgtttgataaagcaagaaagcagtgtctgtggtttcccttcaattcaatgtcttcaggagtaaaaaaggagttcggccacgagttcgacttgtatgaaaataaggactacatccgcaattgcatcatcggaaaggggagatcatataaaggtacggtgtctattaccaaatcgggaatcaaatgccagccttggtctagcatgatcccccatgaacattccttcttgccgtcctcttaccgcgggaaagaccttcaggaaaactactgccgcaatccgagaggggaggagggcggaccatggtgttttacctccaaccccgaagtgcgttatgaagtttgtgacatccctcagtgtagtgaagtcgaatgcatgacatgcaacggagagagctaccgagggctgatggatcataccgaatctggaaaaatctgccagcggtgggaccaccagactcctcaccgacacaagtttcttcctgaaaggtatccagataagggcttcgacgacaactattgtcgaaaccctgacggtcagcctaggccatggtgttacaccctggatcctcacactcggtgggaatactgcgcgatcaagacctgcgcagataataccatgaatgatacagacgtaccattggaaacgacagaatgtatccagggccagggagagggctatcgggggacagtcaataccatttggaacggaatcccttgccaaagatgggactcccagtacccgcacgagcatgatatgactcccgagaattttaagtgcaaggatctgagagaaaactattgcagaaaccccgatggttcagagagtccctggtgttttacaaccgatccaaacatccgtgttgggtactgtagccagattcctaattgtgacatgtcgcatggacaggattgttatagggggaatgggaaaaattatatgggcaatctgtcccagacacgatcaggcctgacctgtagcatgtgggacaaaaacatggaggatctgcatagacatattttttgggagccagatgcgagcaagcttaatgagaattactgtaggaaccctgatgatgacgcacatggcccatggtgttatacgggtaaccctctcatcccttgggactactgcccaattagtcggtgtgaaggagataccaccccaactattgttaacttggatcaccccgttatctcatgtgccaaaaccaaacagctaagggtggtgaacggcataccaactaggacaaatatcgggtggatggtgtcactgcggtacaggaataaacatatttgcgggggctcactgattaaggaaagctgggttttgacggctcggcaatgcttccctagcagggacctcaaggattacgaggcgtggttgggtatccacgatgtgcatggccgcggagacgagaaatgcaagcaggtgctgaacgtctcccagctggtgtacgggcccgaaggaagcgatttagtcctgatgaaactagctcggccagcagtgctcgacgattttgtgtctaccattgacctgccgaactatggctgcactattcctgagaagacatcatgtagtgtgtacgggtggggctacaccggcttgatcaattacgacggcttactgagagtagcacatctttacatcatgggtaatgaaaagtgttctcagcaccacagaggcaaagttaccctgaatgaatcggagatatgtgccggagctgaaaagattggatctggcccttgcgagggggactatggagggccattggtctgcgagcagcacaaaatgaggatggttctgggagtgatcgtcccgggcaggggatgtgccattcctaacaggccggggatcttcgtgcgtgttgcatactacgctaaatggatccataagatcatcctgacttataaggttccccagagc

SEQ ID NO: 13608 - DNA, 2184 bp, synthetic construct
  misc_feature 1..2184: note = source = /note="Description of Artificial Sequence: Synthetic coding sequence"
  source 1..2184: mol_type = other DNA
atgtgggtgaccaaactgcttccagccctgcttcttcaacacgtccttctccacctgcttttgcttccaatcgcaatcccatacgccgaaggacaacgtaagcgcaggaatacgatacacgaattcaaaaagtcagcaaaaactaccctgatcaaaatcgacccagcgcttaagattaagacgaagaaggtgaacactgctgatcaatgtgccaacaggtgcactcgtaacaaggggcttccctttacctgcaaggcctttgtgtttgacaaggcacgaaagcagtgtctgtggtttccctttaactccatgagctcgggagtgaagaaggaatttggccatgagttcgacctgtacgagaacaaagattacatccgaaactgcattattggcaagggtcgatcatacaagggaactgtctcaattaccaagtccggaattaagtgccaaccctggtcgtccatgatcccacatgaacattcattcctgccgtcatcgtacagagggaaagatttgcaagagaactactgtcggaacccccgcggcgaagaaggtggaccttggtgtttcacctccaatccagaagttagatacgaggtttgtgatatcccacaatgctccgaggtggagtgcatgacctgtaacggcgagtcatacagaggacttatggaccataccgagtcgggaaagatctgccaacgctgggaccaccagacgccccatcgtcataagttccttcctgagcggtaccctgataagggctttgacgacaattactgtcgtaatcctgatggacaacccaggccttggtgttacaccctggatcctcataccaggtgggagtactgtgcaattaagacttgtgccgataacactatgaatgacactgatgtcccgctggaaactactgaatgtattcaaggccaaggtgagggatacagaggaactgttaacaccatttggaatggtatcccatgtcaaagatgggatagccagtatccccatgagcatgacatgactcccgagaactttaagtgcaaagacctgagagaaaactactgtcgaaatccggatggatccgaatcgccttggtgcttcaccaccgaccctaacatcagggtgggctactgttcccagatacctaattgcgatatgtcgcacggacaggattgttacagaggaaatggaaagaattacatggggaacctgtcacaaactcgatcaggcctgacgtgctcgatgtgggataagaacatggaggatttgcatcgacacattttctgggagccggacgcgtcgaaactgaatgaaaactactgccggaatcctgatgatgatgcacatgggccctggtgttacacgggaaatcctcttattccctgggactactgtccaatctcacgctgtgaaggagataccactccaaccatcgtgaacctcgatcaccctgtgatctcgtgcgcaaaaaccaagcaactgagggtggtgaatggcattcccacccgcactaatatcggttggatggtgtcccttagatacaggaacaagcatatctgcggaggtagccttatcaaggagtcgtgggtgctcactgcgagacaatgttttcctagccgcgacctgaaagactatgaagcatggctgggtattcatgatgtccatggcagaggtgacgaaaagtgtaaacaagtccttaatgtgtcccagctggtgtacggccccgaaggaagcgaccttgtccttatgaaattggcacgacccgcggttctggatgattttgtcagcaccatcgatctgcccaattacggttgtaccattccagaaaaaacctcctgttcggtctacggttggggatacaccgggctcatcaactacgatggtctgctgcgggttgcacatctgtacataatgggtaacgaaaagtgttcacagcaccatcgggggaaagtgaccctgaacgaatccgagatttgcgctggagccgaaaagattggctccggcccatgcgagggcgattatggaggaccgctggtctgcgaacaacataagatgcggatggtcctgggagtgattgtgcccggtcgtggatgtgcaataccgaatcgtccggggattttcgtgcgtgtcgcgtattacgcaaagtggattcataagataattctgacctacaaggtgccacagtcg

SEQ ID NO: 13609 - DNA, 2184 bp, synthetic construct
  misc_feature 1..2184: note = source = /note="Description of Artificial Sequence: Synthetic coding sequence"
  source 1..2184: mol_type = other DNA
atgtgggtcactaagctgctgcctgctcttctcctccaacacgtgctgctgcacctcttgctgctgcctatcgctattccatatgctgaaggccaaagaaagaggcgcaacacaatccacgaatttaagaagtctgccaagaccacactgatcaaaatcgaccctgcgcttaaaattaagacaaagaaggtgaacacagcggatcagtgcgccaaccgctgcacacgcaacaagggattgccttttacttgcaaggcatttgtcttcgataaggcgcgcaagcagtgcctgtggttccccttcaactctatgagctccggtgtcaagaaggaatttggccacgaatttgatctctacgagaacaaagactatattaggaactgcataattggtaaaggaaggtcatataagggtaccgtgtccatcactaaatcaggaatcaaatgccagccctggtcttcaatgattccccacgagcacagttttcttcctagctcatatcgcggcaaggatcttcaggaaaactattgccgcaatccacgcggtgaagaaggcggtccttggtgctttacttctaatccagaggtcaggtatgaggtctgtgatataccacaatgttccgaagtcgagtgcatgacctgcaacggagagtcatatagaggactgatggaccacacagagagcggaaagatttgtcagcgctgggaccaccaaactccccatagacacaagtttcttcctgaaaggtaccctgataaaggcttcgacgacaactactgtagaaaccctgatggtcaacctaggccgtggtgctacacgctcgacccccacaccagatgggagtactgtgccattaagacttgtgccgataacactatgaacgacactgacgttcctttggaaaccacagagtgtattcaaggtcagggtgagggttataggggcactgtcaatactatctggaacggaatcccatgccaaagatgggactcccaatatccgcacgaacacgatatgaccccagagaattttaagtgcaaggacctgagagaaaactactgcagaaatccagacggaagtgagagtccgtggtgctttacaactgatccgaacatcagggtgggatattgctctcaaatcccaaattgcgacatgagccacggccaagattgctatagaggcaatggcaagaactacatgggaaatctgtcacagacccgctccggattgacttgctcaatgtgggataagaatatggaggacctccatcgccacatattttgggagcctgatgctagcaaactgaacgagaattactgtcgcaacccagatgacgacgcccacggcccctggtgctatacaggcaatcctctgatcccttgggactattgcccaatctctcgctgtgaaggcgacacaactcctacaatcgtgaacctcgaccatcccgttatctcctgcgcgaagacgaagcaacttcgcgtcgtaaacggaatcccaactaggactaacattggttggatggtgtcccttcgctacaggaacaaacatatttgtggaggatctttgataaaggagtcctgggtgttgacagctcgccaatgcttcccttctcgcgatctgaaggactatgaagcttggttgggcatccacgatgtgcacggcaggggcgatgagaagtgtaaacaagttctgaacgtctcccagctggtgtatggtcccgagggctctgacttggtccttatgaagttggccagacctgccgtccttgacgatttcgtgtctactatcgacctcccaaactacggctgtacaatccccgagaaaacgtcctgttcagtttacggttggggatacaccggactgataaattatgacggccttctgagggtcgctcatctgtacatcatgggcaatgaaaaatgttcccagcatcatcgcggcaaggtcactctgaatgagtctgaaatctgcgctggcgccgaaaagatcggttcaggcccatgtgaaggcgactatggaggaccactcgtgtgtgagcagcataaaatgcgcatggtgctgggtgtaattgtacccggtcgcggctgcgcgataccaaatcgcccaggtattttcgttagggtggcgtactacgccaaatggattcataaaatcatcctcacatataaggttccccaatcc

SEQ ID NO: 13610 - DNA, 2184 bp, synthetic construct
  misc_feature 1..2184: note = source = /note="Description of Artificial Sequence: Synthetic coding sequence"
  source 1..2184: mol_type = other DNA
atgtgggtgaccaagctcctccccgcactgcttttgcagcacgtgctgctgcacctcctgctgttgcctatcgctatcccctatgctgagggacaacgtaagaggagaaacacaattcacgagtttaaaaagagcgccaaaacaacattgataaagatcgacccggctctcaagatcaaaacaaagaaagtcaacaccgctgaccagtgtgccaatcgctgtactcggaacaagggactgcccttcacctgcaaggctttcgtgtttgacaaggctaggaaacagtgcctctggttcccttttaatagcatgtcgagtggggtgaaaaaggagttcgggcacgagtttgacctgtacgagaacaaggactatatcagaaactgcatcatcggaaagggcaggagttacaagggtaccgtgtcaatcaccaagagtgggatcaaatgccaaccttggtcttcaatgatcccacatgagcattcctttttaccctcttcttaccgggggaaagacctgcaggaaaactattgccggaacccacgaggcgaggaagggggcccctggtgtttcacatccaaccccgaagtccgatatgaggtatgcgatatcccacagtgcagcgaggtggagtgtatgacctgcaacggggagagctatcgtggactgatggatcataccgagtctggtaagatctgccaacgctgggatcaccagacaccacacagacataagtttctgcctgaaagataccccgacaaaggcttcgatgacaactactgcaggaatccagatggacagcccagaccctggtgttatacactcgaccctcacactcgctgggaatactgcgcgatcaagacttgtgctgataacaccatgaacgacaccgacgtgcccctggaaaccaccgagtgtattcaaggacaaggcgaggggtaccgggggactgttaacaccatttggaacggtatcccctgtcaaaggtgggattcacaatatccacatgagcatgacatgacccccgagaactttaaatgtaaggatctccgggagaattattgtaggaaccctgatggctctgaatccccatggtgcttcactacggaccctaacatcagggttgggtactgctcccagatccccaattgcgatatgtctcatggacaagattgctaccgcggaaacgggaagaactacatgggaaatcttagccaaactcggtccggcctgacctgctccatgtgggataagaatatggaggacttgcaccgccacatcttttgggaaccagacgcatctaagcttaacgagaattactgcagaaaccccgatgacgacgctcacggaccctggtgctacactggaaaccctctgatcccatgggattactgccccatttcccgttgcgaaggagacactaccccaaccattgttaacctggaccacccagtcatcagttgtgctaaaaccaagcagctgcgggtcgtgaacggcatcccaacaagaactaacatcgggtggatggttagcctccggtataggaacaagcacatctgcggcggcagcctgattaaagagtcttgggtgctcacggcgcgccagtgttttccaagccgggacttgaaagattacgaagcatggttagggatccacgatgtgcacggccggggagacgagaagtgtaaacaggtacttaacgtgtcccaattagtctatggaccagagggaagtgatctggtacttatgaagctcgcccgtcccgcagtcctcgacgactttgtctcaacaatcgacctccctaactacggatgcacaatccccgagaagacaagctgtagtgtttacggctgggggtatacaggattgatcaactatgacgggctgcttagggtagcccatctatatataatgggcaatgaaaagtgcagccaacaccacagaggcaaggtcacacttaacgaaagtgagatctgtgccggagctgaaaagattggctcaggaccttgcgagggtgactacggaggcccactggtgtgcgagcagcacaagatgagaatggtgcttggtgttattgtacccggacggggctgcgctatcccaaacagacctggaatctttgtcagggtggcttactacgccaagtggatccacaaaatcatactcacatacaaggtacctcagtct

SEQ ID NO: 13611 - DNA, 2184 bp, synthetic construct
  misc_feature 1..2184: note = source = /note="Description of Artificial Sequence: Synthetic coding sequence"
  source 1..2184: mol_type = other DNA
atgtgggtgacgaagctcctccccgccctgttgttacagcacgtcctcttgcacctcctgttgctgcccatcgctatcccatacgccgagggccaacgtaaacggagaaacacgattcacgagttcaagaaatcagccaagaccacgctcatcaagatcgatccggctcttaagattaagacaaagaaggtcaacaccgccgaccagtgcgcaaaccggtgcacgcgtaataagggactcccatttacatgtaaggcttttgtgttcgacaaggcccgcaagcagtgcctgtggttcccttttaacagcatgtcttccggagtgaagaaggagttcggccacgagtttgacctctatgaaaacaaggattatatccgcaactgcatcatcggtaaggggcgctcgtacaagggcactgtgtcgatcactaagagcggtatcaagtgccagccgtggtcctccatgatcccgcacgagcacagcttcctgccgagcagttaccgtggcaaggacctccaagaaaactactgtcgtaatcccagaggtgaggagggtggaccctggtgctttacttccaaccccgaggtccgctacgaagtctgcgatatcccgcagtgttctgaggtcgagtgcatgacctgcaatggcgagtcgtacaggggtctcatggatcacactgaaagcggtaagatttgccagcgctgggaccaccagactcctcatcggcacaagttccttcctgagcgttaccctgacaagggcttcgatgataactattgtcgtaaccccgacggtcaacctcgaccgtggtgctacactctcgatccgcacactaggtgggaatattgcgctatcaaaacctgcgcagataacacgatgaatgacactgacgtgccactagaaacgaccgagtgtattcaggggcagggcgaaggctaccgcggcacggttaataccatctggaacggcatcccctgccagagatgggattcgcagtacccccacgagcacgacatgactcctgagaacttcaagtgcaaggacctccgtgagaactactgtcgcaaccctgacggctccgagtccccatggtgcttcaccaccgatccgaatatccgggtcggatactgtagccaaatccccaactgtgatatgtcccacggtcaggactgctaccgtggcaatggcaagaactatatgggtaatcttagtcagacgcgctcaggtttgacttgctccatgtgggacaagaacatggaggatctccaccgacatatcttctgggaacctgacgcttccaaattgaacgagaactattgccgcaatcccgatgacgacgcccacggaccctggtgctacaccggcaatccccttatcccttgggattactgcccgatctccagatgcgagggtgataccacgcccacgatcgtgaacctggaccacccagttatttcctgcgccaagacgaagcagctgcgtgtcgtcaacggtattccgactcgcacaaacattgggtggatggtgtccctccgatacagaaacaagcacatctgcggtggttcattgatcaaggaatcctgggtcctcacagcccgccagtgcttcccctccagggacctgaaggattatgaggcatggctcgggatccacgatgtgcacggtcgcggtgatgagaagtgcaagcaggttctgaacgtgagccagctcgtttacggtccggagggctccgacctggtcttgatgaagttggcgcgtccagctgtcctggacgactttgtgtccaccattgatctccccaactacggatgtaccatccccgagaagacctcttgttcggtgtacggttggggctacacgggattgatcaattacgatggtcttctgagggtcgcgcacctgtacatcatgggcaacgaaaagtgttcacagcatcaccgcggcaaggttaccctcaacgaatctgagatttgtgcaggcgcggagaagattggttccggaccgtgcgagggagattacggtggccctctggtttgtgaacagcacaagatgcgcatggtcttgggtgtcattgtacccggtcgtggttgcgcaatccctaaccggcccggtatattcgtacgagttgcctattatgccaagtggatccacaaaatcatcctcacgtacaaagtgcctcagagt

SEQ ID NO: 13612 - DNA, 2184 bp, synthetic construct
  misc_feature 1..2184: note = source = /note="Description of Artificial Sequence: Synthetic coding sequence"
  source 1..2184: mol_type = other DNA
atgtgggtgacaaaactcctgcctgcactgctcctgcagcacgtcctactccatctacttctcctaccaatcgctatcccctatgccgaagggcagagaaaacgccggaacactatccatgaattcaaaaaatcggctaaaactacgctcatcaaaatcgatcccgcactgaagatcaaaactaaaaaagtgaatacagccgatcagtgcgccaacagatgcacacggaacaaaggactgccattcacgtgcaaagccttcgtcttcgataaagcaagaaagcagtgcctttggttccccttcaattcaatgagttctggagttaaaaaagaattcgggcatgaattcgatctgtacgaaaacaaagattatataagaaactgcattatcgggaaggggcggtcatataaaggaactgtgtctatcactaaatccggaataaagtgtcagccctggtcttctatgatcccccacgaacattcttttctgccctcttcatatagggggaaagacctacaggagaactattgtcgcaacccacggggggaggaaggaggaccctggtgctttactagtaatcctgaagtgagatatgaagtgtgcgatatccctcagtgctctgaggtcgagtgtatgacatgtaacggggagagttatcgggggctgatggatcacactgagtccggaaaaatctgtcagaggtgggatcaccagactccacatcgccataaatttttgcctgaacggtatcccgataaagggtttgacgacaactattgccggaatccagatgggcagcctaggccctggtgctatactttggatccccatacgcggtgggaatattgcgcaattaagacatgtgcagataacactatgaacgatacagatgtgccactcgaaacaacagaatgtatccaggggcagggagaagggtataggggaacagtaaacactatttggaatggaataccttgtcagaggtgggattcccagtaccctcacgagcacgatatgacaccagaaaactttaagtgcaaagatcttcgggaaaattattgtagaaatcccgacgggtctgaatcaccttggtgcttcactactgaccctaatatcagggttggatattgttcgcagatccctaattgtgatatgtcccatggacaagattgctaccgggggaatggaaaaaactacatgggaaacttgtctcagacgcggagtgggcttacatgctctatgtgggataaaaacatggaagatctgcatcgccatatcttctgggaacctgatgcttctaagctgaacgaaaactactgccgaaatcctgatgatgatgcgcatgggccctggtgctatactggaaatcccctgatcccttgggactattgccccatctctaggtgtgaaggagacacaactcctacaatcgtgaaccttgatcaccctgttatttcttgtgccaaaactaaacagctgagagtagtgaatggaatacctacacgcacaaatatcgggtggatggtaagtctcagatataggaacaaacatatatgtggggggtcattgattaaagaatcatgggtgctgactgccaggcaatgctttccctctagggatctgaaggattatgaagcttggttaggaatccacgatgttcacgggcggggagatgaaaagtgtaagcaagtgctaaacgtttctcagctcgtatatggaccagagggatctgatctagtactcatgaaactggctaggccagccgtgttggatgattttgtttctacaattgacttgccaaattatgggtgtactatccccgaaaaaacttcatgctcagtgtacggatggggatatacagggttaatcaattacgatggacttcttagagtggcacatctttatattatgggaaatgaaaaatgttctcagcaccaccgcggaaaagtgactctaaacgaatccgaaatttgtgccggagccgagaaaatcggatccggaccctgcgaaggagattacggagggccccttgtgtgtgaacagcacaaaatgcgaatggtgctaggagtgatcgtgcctgggcgcggatgtgccatccccaatcgccccgggatctttgtcagagtagcttattacgcaaaatggatccataaaataatcctaacttataaagtacctcagtct

SEQ ID NO: 13613 - DNA, 2184 bp, synthetic construct
  misc_feature 1..2184: note = source = /note="Description of Artificial Sequence: Synthetic coding sequence"
  source 1..2184: mol_type = other DNA
atgtgggttaccaagctcctcccagcactcctgcttcaacacgtgctgcttcatctcctgctgcttccaattgcgattccttacgcagaaggtcaacgaaagagaaggaataccatccatgaattcaagaagtccgccaagaccaccctgattaagatcgaccctgccctgaagattaagactaagaaggttaacactgcagatcaatgtgcaaacagatgtactagaaataagggacttcctttcacctgcaaggcttttgtgtttgataaagcaagaaagcagtgtctttggtttccatttaacagcatgagctccggtgtgaaaaaggaattcggccatgaattcgacctgtacgagaacaaggactacatcagaaactgtattatcggtaagggtagatcctacaagggtaccgtgtcgattactaagtccggaattaagtgtcagccctggagctctatgatacctcacgaacactcgtttctgccgtctagctatcggggaaaggacttgcaagaaaactactgcagaaatcccagaggggaggaaggaggaccctggtgcttcacctccaaccccgaagtcagatacgaggtctgtgacatccctcagtgttccgaagtggagtgtatgacctgtaacggagaatcgtacaggggactgatggatcacaccgagagcggaaagatctgtcaaaggtgggaccatcagaccccacataggcataagtttctgcctgaacgatacccagacaagggttttgatgataactactgtcgcaatccagacggacaaccccgcccttggtgttacacgcttgatcctcataccaggtgggaatactgtgcaatcaagacttgcgcggataacaccatgaatgataccgacgtgccactggaaacgactgaatgtatacaaggacaaggcgaaggttacagaggcactgttaacactatttggaacgggattccatgtcaaagatgggactcccaataccctcacgaacatgatatgaccccagagaactttaagtgcaaggatcttcgagagaattactgtcgcaacccggatggctccgaatccccatggtgttttactactgacccgaacattcgcgtcggatactgttcacagatcccaaattgtgacatgagccatggacaggattgttaccgagggaacggaaagaattacatgggaaacctgagccagacccgatcagggcttacctgttcgatgtgggacaagaatatggaagatctgcataggcacatattctgggaaccagacgccagcaaacttaacgagaactactgccgtaaccctgacgacgatgcacacggcccgtggtgctatactgggaaccctcttataccttgggattactgccccatttcgcggtgtgagggagacactacccctactatcgtgaatctggatcacccggtgatctcatgcgccaaaactaagcaattgcgggtggtcaatggcattccgactagaaccaatataggctggatggtgtcacttagatacagaaacaaacacatatgtgggggctcgcttatcaaggaatcctgggtgctgaccgcaagacaatgctttccctcccgagacttgaaggattatgaagcatggctgggtattcatgatgttcatgggcgtggagatgaaaagtgtaagcaggtccttaacgtgtcccaacttgtgtatggtccagagggttccgatctggtgcttatgaagctggcaaggcctgctgtccttgacgatttcgtgtccaccatcgatctgccgaattacggttgtactattccagaaaagacctcgtgttcagtgtacggctggggctacactggcttgattaactacgatggactcctgagagtggcacacttgtacatcatgggaaatgaaaagtgctcgcagcatcaccgagggaaggtgactctgaatgaatccgaaatctgcgcaggtgcagagaagattggctccggaccttgcgaaggtgattacggtggtccactggtgtgtgaacaacacaaaatgcggatggtccttggcgtcattgtgccaggtcgtggatgtgcaattcctaacagaccaggtattttcgtgagagtggcatactatgcaaaatggattcataagatcattctgacgtacaaagtccctcagtca

SEQ ID NO: 13614 - DNA, 2184 bp, synthetic construct
  misc_feature 1..2184: note = source = /note="Description of Artificial Sequence: Synthetic coding sequence"
  source 1..2184: mol_type = other DNA
atgtgggttacaaaattactacctgcactgctacttcaacacgtccttctgcatctgctgctactgccaattgccatcccatacgcagaaggccaacgtaagcgcaggaatacaattcatgagtttaagaagagtgccaagaccacacttatcaaaattgacccggccttgaaaataaagaccaaaaaagtgaacaccgccgatcagtgcgccaacagatgcaccagaaacaaagggctcccttttacatgtaaggcgttcgtttttgataaagcccggaaacagtgtctttggttcccctttaacagtatgagtagcggagtcaaaaaagagtttggccacgaatttgatctgtacgagaataaggactacatcaggaattgtattatcggcaaagggaggagctataaaggcacagtgtccattaccaagtccggcattaaatgccagccttggtcttccatgattcctcacgaacattccttcctgccttcttcttaccgtggcaaggatctgcaggaaaattattgtcggaatccacggggcgaggagggtggcccctggtgctttacttctaatcctgaggtgaggtacgaggtgtgcgatatcccccagtgctctgaggtagagtgcatgacctgcaatggggaatcatatcggggacttatggatcatactgagagtggcaagatatgtcagagatgggaccatcagactccccatagacacaagttcctacctgagaggtatccagataaaggctttgacgataactactgccgaaacccagatggacagccaaggccatggtgctacaccctggaccctcacacccgctgggagtactgtgctatcaaaacctgcgcggacaatacaatgaacgacactgacgtgccactggaaactacagagtgtatacaggggcagggcgagggctacagaggaactgtcaataccatatggaacggcattccatgtcagcggtgggattctcaataccctcacgaacacgacatgacacctgaaaacttcaagtgtaaggaccttagggaaaactactgccgcaacccggatggaagcgagagtccctggtgcttcactacggacccaaatattagggtgggctattgttctcaaatccccaactgcgatatgtcacatggtcaggactgttaccgagggaatggcaagaactatatgggcaacttgtcccaaaccagatctgggctgacttgcagcatgtgggacaaaaacatggaggaccttcataggcacattttctgggaaccagatgcctctaaactgaatgagaactactgtcggaacccagatgacgatgctcacggcccttggtgttacaccggaaatcccctcatcccctgggattattgccccatatcccggtgcgaaggggatactacccccacaatcgtgaatctggatcaccctgttatctcttgtgccaaaaccaagcagctgcgcgttgtcaacgggatccctactcgaaccaacattggatggatggtgagtctcagatatcgcaataagcacatctgtggcgggtctcttattaaggaaagttgggtacttacggcacggcagtgtttcccctcccgggatctgaaagactacgaggcttggctcggcattcacgatgtgcatggcaggggagatgagaagtgtaagcaggttttaaacgtaagccaactggtatatggccctgagggctcagatctggtcctaatgaagctagcccgacctgcggtcctggacgatttcgtctcaactatcgatctgcctaactatgggtgtactatccccgagaaaacaagctgttccgtttacggatggggatacacagggttgattaactatgatggcctactgcgagtggctcacctgtacataatgggtaatgagaagtgttcccagcaccaccgaggaaaggtcacactgaacgaatccgaaatatgcgccggtgccgagaagattggaagcgggccttgcgagggagactatggtggccctctcgtctgcgagcagcataaaatgaggatggtgctgggagtgatcgtgccagggcgggggtgtgcaatacccaaccggccaggtatatttgtgcgagtggcatactacgccaagtggattcacaaaatcatccttacttacaaagtgccccaatct

SEQ ID NO: 13615 - DNA, 2184 bp, synthetic construct
  misc_feature 1..2184: note = source = /note="Description of Artificial Sequence: Synthetic coding sequence"
  source 1..2184: mol_type = other DNA
atgtgggttacgaaattgttgcctgccctgcttctgcagcacgtcctcctgcacctgttattgctacccattgcaatcccctatgctgaggggcagaggaagcgacggaacaccatccatgagttcaaaaagtccgctaagaccactttaatcaaaattgaccctgctctgaaaattaagaccaaaaaggtgaacactgccgaccagtgtgcaaatcggtgcactagaaacaaagggttgccgttcacatgcaaggccttcgtctttgataaggctcgcaagcagtgcctgtggttcccctttaattcaatgtcatctggagtgaagaaggaattcggacatgagttcgatctttacgaaaataaagattatattcgcaactgcattatagggaagggacggtcctataagggcactgtctccattaccaaaagcggtataaagtgtcagccctggagcagtatgatcccacacgaacatagcttcctgccaagttcatacagaggaaaggacttacaggagaattactgtcgtaatcccagaggcgaggaaggcggcccatggtgttttacctccaaccccgaggtccgctatgaggtgtgtgatattccgcagtgcagcgaggtggaatgtatgacatgcaacggcgaaagttatagaggtctgatggaccatacagagtctgggaaaatctgccaacggtgggatcatcagacaccacatcgccacaagtttctgcccgagaggtacccagataagggtttcgacgacaactattgccgaaaccctgatgggcagcctaggccctggtgttataccctggaccctcatactcggtgggagtattgtgcgatcaaaacatgcgctgataacaccatgaatgataccgatgtaccactggaaacaaccgaatgcatccaaggccagggcgagggatacagagggacagtaaacacgatctggaatggcatcccctgtcagcgatgggatagtcaatacccccacgagcacgacatgacccctgaaaactttaaatgtaaggacttgcgcgagaactactgtagaaaccccgatggaagtgaatccccttggtgcttcaccacagatccgaatatcagggttgggtattgctctcagatccctaattgtgacatgagccacgggcaggattgctaccgcggaaacgggaagaattacatgggcaatttgagccagactcggagcggactaacatgcagtatgtgggataagaacatggaagacctgcaccgtcatattttttgggaacctgacgccagcaaactgaatgagaactactgccgcaaccctgacgatgatgcccacgggccttggtgttatacaggaaaccccttaatcccgtgggactattgccccatttcaaggtgcgagggtgacactaccccaaccatcgtcaacctggatcaccccgtgatttcttgcgcaaaaacaaagcagctgagagtcgtgaacggtattcctactagaaccaatataggctggatggtctctctgcggtatcgcaacaaacacatatgtggaggttccctgatcaaggagtcctgggtccttaccgcacgtcagtgcttcccaagtcgcgaccttaaggattacgaggcatggctggggattcatgacgttcacgggaggggagacgaaaaatgtaagcaggtgcttaatgtgtcccagctggtctacggacctgaagggtctgatctggtgctgatgaaactggcccggcccgccgtcctggatgattttgtgagcaccattgatctgcctaactatggttgtactattccagagaagacatcatgttccgtgtatggctggggatataccggcttgattaactacgatggactgctccgcgtggcacatctctacataatggggaacgaaaagtgcagccagcatcaccggggcaaggtgaccctcaacgagtcagagatctgcgcaggagccgagaagatcggtagcggaccctgtgagggggattatgggggtcccctggtgtgcgaacagcacaagatgcggatggtcctgggagttattgtgccgggtcgtggttgcgccattcctaatagacctggtattttcgtacgcgttgcttattacgccaagtggattcacaaaataattctcacttacaaggtaccccagtcc

SEQ ID NO: 13616 - DNA, 2184 bp, synthetic construct
  misc_feature 1..2184: note = source = /note="Description of Artificial Sequence: Synthetic coding sequence"
  source 1..2184: mol_type = other DNA
atgtgggtcaccaagctcctccctgcactgcttcttcaacatgtgctgcttcaccttctgcttctgccaatagcgatcccttacgcggaagggcagcggaaaaggaggaataccatccatgaattcaagaagtcagcaaagacgaccctcattaagattgaccccgcactgaagattaagactaagaaggtgaataccgccgaccagtgcgcaaaccgatgcactcgcaataaggggcttccttttacttgtaaggcttttgtgttcgacaaagcaaggaaacaatgcctctggtttcctttcaacagcatgtcctcgggcgtgaagaaggagtttggacacgagtttgatctctacgaaaacaaggactacattcggaattgtatcattggaaagggtaggtcgtataagggtaccgttagcatcactaagtctggaattaagtgtcagccttggtcctcgatgatcccacacgaacactcatttctgccatcaagctaccgtggaaaggaccttcaggagaactactgtaggaacccgcggggggaggagggtgggccatggtgttttacgtcgaaccctgaagtgcgttacgaggtttgcgatattccacagtgttccgaggttgagtgtatgacctgtaatggagagtcatacaggggcctcatggatcataccgaatcaggaaagatttgtcagcggtgggatcatcaaactcctcatcgccataagtttctgccggaaagataccccgataaagggtttgacgataactactgtcgcaaccctgatggccagccccgcccgtggtgctacacccttgatccacacaccagatgggaatactgcgcaattaagacttgtgccgataataccatgaacgacaccgatgtgcctcttgaaaccaccgaatgtatacaaggacaaggagaaggttacagaggtaccgtgaacacgatctggaacgggatcccttgtcagagatgggactcccagtaccctcacgagcatgatatgactcctgaaaactttaagtgcaaagaccttagagagaattactgtcgaaatcccgacggcagcgaatcaccctggtgctttacgaccgatcctaatatcagagtgggctattgttcgcaaatccccaactgtgatatgtcgcatggacaggattgctatcggggcaacggtaagaactacatgggaaatctgagccaaaccagatcaggacttacttgttcaatgtgggataagaacatggaggacctgcaccgacatatcttttgggagccagatgcatccaaactcaacgaaaactactgcaggaaccctgacgatgatgcacatggaccatggtgctacactggaaatccactcattccatgggattactgccctatttccaggtgtgagggggatactacccctactatcgtgaacctggaccaccccgtcatctcttgcgcaaagacgaagcaactgcgcgtcgtcaacggaattccaacccggactaacattggctggatggtgtccctgagataccgcaataaacatatctgtggaggtagcttgattaaggagtcgtgggtgctcactgcacgtcaatgcttcccctcgcgcgatctcaaagattacgaagcctggttgggaattcatgacgtgcacgggcgcggcgatgaaaaatgtaagcaagtgctcaacgtctcgcaacttgtctacggacctgaagggtcggaccttgtgcttatgaagctggcgcgccctgccgtccttgacgattttgtgtcaacgatcgacctgcctaattacggatgcaccattcctgaaaagaccagctgttcagtgtacggttggggttacaccggactgataaactacgacggacttttgcgggttgcacatctgtacattatgggtaacgaaaagtgtagtcaacatcatagaggaaaggtgactctgaacgaatccgaaatctgcgcaggagcagagaaaattggaagcggcccatgtgagggtgattatggaggacctctggtctgtgaacagcataagatgagaatggtgctgggcgtcattgtgccaggaagaggatgtgcaatccccaaccgtccaggaattttcgtgcgcgtggcttactatgccaaatggattcataagattatactcacctacaaggtgccccaaagc

SEQ ID NO: 13617 - DNA, 2184 bp, synthetic construct
  misc_feature 1..2184: note = source = /note="Description of Artificial Sequence: Synthetic coding sequence"
  source 1..2184: mol_type = other DNA
atgtgggtgactaagctgctgccggctttactgttgcagcacgtgctcctccacctcctgctgttgcccatcgccattccgtacgctgaaggtcagagaaaacgacgaaacacaattcacgagttcaagaagagcgctaagacaaccttaatcaagattgatccggccctgaagattaagacaaaaaaggtcaatacggctgaccaatgtgccaaccgttgcacccgcaataagggcctgcccttcacgtgtaaggcattcgtcttcgacaaggcgcggaaacagtgcctgtggtttccatttaactctatgagtagcggcgtgaagaaggagtttggacacgagtttgacttgtacgagaacaaggactatatacgaaattgcattatcggcaagggtcgctcctacaaaggcacggtgtcgataacgaagtccggtattaaatgtcagccgtggtcctccatgataccccacgagcactcatttcttcccagctcatacagaggcaaggacctacaagagaactattgtcgcaaccctcgcggtgaggagggcggcccatggtgctttacgtctaaccccgaggtgcgctatgaggtatgcgatattccacagtgctcggaggtggagtgcatgacatgcaacggtgaatcctaccgcggactgatggaccacacggagtccgggaagatttgtcaacgttgggaccatcagaccccccaccgacataaattcctacccgagcgttatccagataaaggattcgatgataattattgcagaaatccagatggtcaaccacggccctggtgctacaccctggatccacacactcgttgggagtactgcgctataaaaacatgtgccgataacactatgaacgataccgacgtgcccctggagacaactgaatgcatccagggacagggcgagggttataggggcacagtcaataccatctggaacggcattccgtgccagcgctgggatagccagtatccacatgaacacgacatgacacccgaaaatttcaagtgcaaagatctgcgagagaattactgtaggaaccctgatggttcagagtcgccatggtgcttcaccactgaccccaatatccgtgttggctattgcagccagatccctaattgcgatatgagccacggccaggactgctatagaggaaacggcaagaactacatggggaatctgagccaaaccaggtccggactgacttgctccatgtgggataagaatatggaggatctacaccgccacatattctgggagcctgatgcgtccaagctcaacgagaattactgtcgtaaccccgatgacgatgcgcacggaccctggtgctacacgggtaacccactaatcccttgggattactgcccaatttccaggtgcgagggcgacaccaccccaacgattgtgaacctggaccaccccgtcattagctgtgccaagactaaacaactgcgggtcgtgaatgggattcctacccgcacgaatattggatggatggtttcgttacgttatagaaacaagcatatttgcggtggcagcctgattaaggaatcttgggttctgacggcccgacagtgcttcccgtcccgcgacctgaaggactatgaggcatggctgggcattcatgacgtgcatggtcggggcgatgaaaaatgcaagcaggtcctgaatgtgtcccagctggtgtacggaccggagggcagcgacttggtcctgatgaagctcgcgcgaccggcggtgctcgacgactttgtgtcgaccattgatctaccgaactatggatgcacgataccagagaagacatcgtgcagcgtatacggatggggctacacgggcctgattaattacgatggactgctgcgtgtcgcccatttgtacattatgggtaacgagaagtgttcccagcaccacaggggtaaggtcacgctcaatgaatctgagatatgcgctggcgctgagaaaatcgggagtggaccatgcgagggcgactatggtggcccccttgtgtgtgagcagcacaaaatgcggatggtcctcggtgttattgtaccaggccgcggctgcgctataccgaaccgcccgggaattttcgtcagggttgcatactacgccaagtggatccacaagatcattctgacatacaaggttccacagagc

SEQ ID NO: 13618 - DNA, 2184 bp, synthetic construct
  misc_feature 1..2184: note = source = /note="Description of Artificial Sequence: Synthetic coding sequence"
  source 1..2184: mol_type = other DNA
atgtgggtcactaagctgctgccggcactcctgcttcaacatgtgctgctgcacctcttgttgctgccaatcgcgatcccttacgccgaagggcaacggaagcgacggaatactatccacgagttcaagaaatcagccaagactactctgatcaagattgatccagctctgaaaatcaagactaagaaggtgaacaccgcggaccaatgcgcgaataggtgcaccagaaataagggacttccgttcacctgcaaggcattcgtgttcgataaagcacgcaaacaatgcctgtggttcccatttaactctatgagcagtggggtcaagaaggagtttggccatgagttcgatctgtacgagaacaaggactacatcaggaactgtataatcggaaagggtcggtcctataaaggcactgtcagcatcactaaatcaggaattaagtgtcaaccttggtcgtcgatgattccgcatgaacatagctttctgccctcctcttataggggaaaggatctccaggaaaactactgtcgtaatccacgaggagaagaaggaggcccatggtgcttcacctccaacccggaagtgcggtacgaggtctgtgacatcccccaatgcagcgaagtggaatgtatgacttgcaacggagaatcttacaggggcctgatggaccacaccgaatccggcaagatctgtcagagatgggaccaccaaaccccacatcggcacaagttcttgccggaacgatatccagataagggtttcgatgacaactactgtcggaaccctgacggacaaccgcggccctggtgctacaccttggatccgcatacccgctgggaatactgcgctatcaaaacttgcgccgacaacaccatgaatgacaccgacgtgccactcgagacgacggaatgcatccagggacaaggagaaggataccgcggaaccgtcaataccatttggaacggaatcccatgccagcggtgggattctcagtacccgcacgaacacgacatgaccccagagaactttaagtgcaaggacctgagggagaactactgcaggaacccagatggatccgaatccccgtggtgcttcactactgaccctaacatacgggtcggatactgctcccagattccgaattgtgatatgtcgcatggccaggattgctacagaggcaacggaaaaaactacatgggaaatctctcgcaaactagatcaggactgacgtgtagcatgtgggacaagaacatggaagatttgcatcgtcacatcttttgggagccggacgctagcaaactgaatgagaattactgcagaaaccctgacgacgatgcccatggaccgtggtgctacactggaaacccgctcatcccatgggactactgtccgatctctcggtgcgagggagatactaccccgactatcgtgaacctggaccacccggtgatctcgtgtgcgaaaaccaaacagctgcgcgttgtgaatggaatccctacgcgcaccaatatcggatggatggtcagcctccggtaccgcaataagcacatctgtggcggaagccttatcaaggaatcgtgggtgctgacggcgaggcagtgtttcccgtcccgtgatttgaaggactacgaggcatggttgggtatccacgacgtccacgggcggggtgacgagaaatgcaaacaagtgttgaacgtgagccagctggtgtacggacccgagggatccgacctggttctgatgaaactggcgcggccagcagtgctggacgacttcgtgtcaactatcgacctgcctaactacgggtgcaccatcccggaaaagacttcgtgctcggtgtacggctggggatacacgggcctcataaactacgacggtctgcttcgggtggcgcacctctacatcatggggaatgagaagtgcagccagcatcacaggggaaaagtcactctcaatgaatcggagatctgcgcaggcgcggagaaaattggttcaggaccctgcgagggtgactacggaggccccttggtgtgcgaacaacataagatgcgcatggttctgggagtgatcgtgcccggccgcggctgtgctatcccgaacagacctggaatcttcgtccgcgtcgcttactacgccaagtggattcacaagatcatcctcacctacaaggtcccacagtcc

SEQ ID NO: 13619 - DNA, 2184 bp, synthetic construct
  misc_feature 1..2184: note = source = /note="Description of Artificial Sequence: Synthetic coding sequence"
  source 1..2184: mol_type = other DNA
atgtgggtgaccaagctgctgcccgcactcttactgcagcacgtactcctgcacttgctgctgctgccaatcgctattccttatgccgagggacaacggaagcgacgaaataccattcatgaattcaaaaaatctgccaagacaaccctaattaagatcgatcccgcgctcaagattaaaactaaaaaagtgaacaccgcagaccagtgtgctaatcggtgcacccgcaacaaggggctgccatttacctgcaaggcgtttgtcttcgataaggcacggaaacagtgcctgtggttcccgttcaactcaatgtccagcggtgttaagaaggagttcggtcacgaatttgatctctatgagaataaggactacatacggaattgcattatcgggaaaggacgatcgtacaaagggaccgtgagcatcacaaagtccggaattaaatgccagccatggagctccatgattccacatgaacactcgtttctgccatcatcctacagaggcaaggatctgcaagagaattactgtcgcaaccccaggggcgaagagggaggcccttggtgcttcaccagtaatcccgaagtgaggtacgaagtgtgtgatatccctcagtgttcagaggtagaatgtatgacctgtaatggcgagagctaccggggactgatggaccacactgagtcaggtaagatttgtcaacgctgggaccaccagactccccacagacacaaattcttgccagagaggtatccggacaagggcttcgacgacaattactgccgcaaccctgatgggcagccacggccttggtgttatactcttgatccacacacccggtgggagtactgcgctattaagacctgtgcagacaatacaatgaacgacacagacgtcccccttgagacgacggaatgcattcagggacagggtgagggctatcgcggtaccgttaacactatttggaatggtattccttgccagaggtgggacagtcagtatccccacgaacacgatatgacaccggaaaacttcaagtgtaaagacctgcgcgaaaactactgtcgaaatccagatggcagcgagtccccttggtgcttcaccacggatcctaacattagggtggggtactgtagtcagatccccaactgtgatatgtcccacggtcaggactgttaccggggcaacgggaagaactatatggggaacctcagccaaacccggtcagggttgacctgctccatgtgggacaaaaacatggaggatttacatagacatatcttctgggagccagatgcctccaagcttaatgagaattactgtcgcaaccccgacgatgatgcccatggtccctggtgttacaccggcaatccgctgatcccctgggattactgccccatatcccgctgcgagggggataccactcctacaattgtaaacctcgatcaccccgttatcagttgtgccaaaacgaaacagctgcgtgttgtcaatggtattcccacgagaaccaatattggctggatggtctcccttcggtatcgtaataaacatatctgtggtgggtcactgataaaagaaagttgggtgctgacggctcgccagtgcttcccttccagagacctcaaagattacgaggcatggttagggattcatgatgtccatggaagaggcgacgagaaatgcaaacaagtactaaacgtaagtcaactcgtgtacgggcctgaaggcagcgacctcgtgctcatgaagctggccaggccagcggttttggacgactttgtatcaaccattgatctgccgaactacggctgcacaattccggagaagaccagttgcagcgtgtatggctggggatacacagggcttattaactacgatggcctattgcgggtcgcccatttatatataatgggcaacgagaagtgctcacagcaccaccgaggaaaggtgacgctcaacgagagcgaaatctgcgctggcgcggagaaaattgggagtggcccctgcgagggggactatggcggcccgctggtgtgtgaacagcacaagatgcggatggtgctgggagttatagtgcccggcaggggttgcgctatcccaaatcgtcctggtatttttgtcagggtggcctactacgccaagtggatacataagatcattttgacatataaggtcccccagtcg

SEQ ID NO: 13620 - DNA, 2184 bp, synthetic construct
  misc_feature 1..2184: note = source = /note="Description of Artificial Sequence: Synthetic coding sequence"
  source 1..2184: mol_type = other DNA
atgtgggtcaccaaactcctgccagctctgctgctgcagcacgtgctactccacttgttgttactgcctattgccataccgtacgccgagggacagagaaagagacggaacactatccacgagtttaagaagagcgcaaagaccacgttgatcaagatcgatcctgcgctgaaaataaagaccaagaaagtcaatacggcagatcagtgcgcgaatcggtgcacccgcaacaaggggctgccatttacctgtaaggcctttgttttcgacaaggcaagaaagcagtgtttgtggtttccatttaattctatgtcatccggagtgaaaaaagaatttggacacgaatttgacctatacgaaaacaaggactacattcgcaactgcattatcggcaaggggcgtagctacaaagggacagttagtatcactaaatctggcattaaatgccagccgtggtcttcgatgattccgcacgaacactcgtttcttccaagcagttaccgcgggaaagacctccaggaaaactattgtcgtaacccgcgaggagaagagggagggccttggtgtttcaccagcaatccagaagtgaggtacgaagtgtgcgatatcccacagtgctcagaagttgagtgtatgacctgtaacggcgaatcctaccggggacttatggaccatacagagagcggaaagatctgtcagaggtgggatcatcagaccccacatcgtcacaagttcctaccggagcgctaccccgataaggggtttgacgacaattactgccgcaatcctgatggacagcctcgtccttggtgctacacgctcgaccctcataccagatgggagtactgcgccataaagacttgcgctgacaataccatgaatgacaccgatgtgccactagaaaccactgaatgcatccagggtcagggcgagggctacagaggtaccgtgaacacgatctggaacgggattccttgtcagagatgggatagtcagtatccccatgagcatgacatgacccccgaaaacttcaagtgtaaagatctgcgagaaaattattgccggaatccggacggaagcgaatctccgtggtgcttcacgacagatccgaatatccgggtcggctactgctcccagattcccaactgcgatatgtcacatgggcaagattgctatcgtggcaacggcaagaattatatgggtaatctgtcacaaacaagatctggcctgacatgcagcatgtgggataagaacatggaggacctgcaccgacacatcttttgggaacccgatgccagcaagctcaatgaaaattactgccgaaaccccgacgacgacgctcatgggccttggtgttataccgggaatcccctcatcccttgggactactgccctatttctagatgcgagggagacacaactccaaccatcgtaaacctggatcacccagtgatctcttgtgccaagactaagcaactgagggtcgtaaacggcattcctactcggaccaacatcggctggatggtgtctttacgctaccggaataaacacatatgcggaggctccctgatcaaagagagctgggtgctgacggcaaggcagtgctttccgtcgagggatcttaaagactacgaggcctggctgggaatacacgacgtacacggcagaggtgacgagaagtgcaaacaagtcctgaatgtatcccagctagtctatgggcccgaaggaagcgatctggtgctgatgaaactggcccgaccggctgtcctggacgactttgtatccaccatcgacctacccaattacggttgcactattccagaaaagacatcttgttccgtctatggctggggttatacaggtttgattaactacgacggacttctcagagtggctcatctttacatcatgggtaatgagaagtgtagtcagcaccatcggggcaaggttaccctgaacgagtccgaaatctgcgccggagccgagaagatcggaagcggcccctgtgaaggggactatggcggaccgctggtatgtgagcagcataagatgcgcatggtcctcggagtgattgtgccagggcggggctgtgccattcctaacagaccagggatctttgtgcgcgtggcgtattatgcgaagtggatacataagattatacttacctataaagtacctcagtca

SEQ ID NO: 13621 - DNA, 2184 bp, synthetic construct
  misc_feature 1..2184: note = source = /note="Description of Artificial Sequence: Synthetic coding sequence"
  source 1..2184: mol_type = other DNA
atgtgggttacgaaactattaccggcgctattattacaacatgtattattacatttactactactaccgatagcgataccgtatgcggaaggtcaacgtaaacgacgtaatacgatacatgaatttaaaaaatcggcgaaaacgacgttaataaaaatagatccggcgttaaaaataaaaacgaaaaaagtaaatacggcggatcaatgtgcgaatcgttgtacgcgaaataaaggtttaccgtttacgtgtaaagcgtttgtatttgataaagcgcgaaaacaatgtttatggtttccgtttaattcgatgtcgtcgggtgttaaaaaagaatttggtcatgaatttgatttatatgaaaataaagattatatacgaaattgtataataggtaaaggtcgatcgtataaaggtacggtttcgataacgaaatcgggtataaaatgtcaaccgtggtcgtcgatgataccgcatgaacattcgtttctaccgtcgtcgtatcgtggtaaagatttacaagaaaattattgtcgtaatccgcgtggtgaagaaggtggtccgtggtgttttacgtcgaatccggaagtacgatatgaagtttgtgatataccgcaatgttcggaagtagaatgtatgacgtgtaatggtgaatcgtatcgtggtttaatggatcatacggaatcgggtaaaatatgtcaacgttgggatcatcaaacgccgcatcgtcataaatttctaccggaacgttatccggataaaggttttgatgataattattgtcgaaatccggatggtcaaccgcgtccgtggtgttatacgctagatccgcatacgcgttgggaatattgtgcgataaaaacgtgtgcggataatacgatgaatgatacggatgttccgctagaaacgacggaatgtatacaaggtcaaggtgaaggttatcgaggtacggtaaatacgatatggaatggtataccgtgtcaacgttgggattcgcaatatccgcatgaacatgatatgacgccggaaaattttaaatgtaaagatctacgtgaaaattattgtcgtaatccggatggttcggaatcgccgtggtgttttacgacggatccgaatatacgtgttggttattgttcgcaaataccgaattgtgatatgtcgcatggtcaagattgttatcgtggtaatggtaaaaattatatgggtaatctatcgcaaacgcgatcgggtctaacgtgttcgatgtgggataaaaatatggaagatctacatcgtcatatattttgggaaccggatgcgtcgaaattaaatgaaaattattgtcgaaatccggatgatgatgcgcatggtccgtggtgttatacgggtaatccgttaataccgtgggattattgtccgatatcgcgttgtgaaggtgatacgacgccgacgatagtaaatttagatcatccggtaatatcgtgtgcgaaaacgaaacaattacgtgtagttaatggtataccgacgcgtacgaatataggttggatggtatcgttacgttatcgtaataaacatatatgtggtggttcgttaataaaagaatcgtgggtattaacggcgcgtcaatgttttccgtcgcgagatttaaaagattatgaagcgtggttaggtatacatgatgtacatggtcgaggtgatgaaaaatgtaaacaagtattaaatgtttcgcaactagtttatggtccggaaggttcggatttagttctaatgaaattagcgcgtccggcggtattagatgattttgtatcgacgatagatttaccgaattatggttgtacgataccggaaaaaacgtcgtgttcggtatatggttggggttatacgggtttaataaattatgatggtctattacgagttgcgcatctatatataatgggtaatgaaaaatgttcgcaacatcatcgtggtaaagtaacgttaaatgaatcggaaatatgtgcgggtgcggaaaaaataggttcgggtccgtgtgaaggtgattatggtggtccgttagtatgtgaacaacataaaatgcgaatggtattaggtgttatagtaccgggtcgtggttgtgcgataccgaatcgaccgggtatatttgttcgtgttgcgtattatgcgaaatggatacataaaataatattaacgtataaagtaccgcaatcg

SEQ ID NO: 13622 - DNA, 2184 bp, synthetic construct
  misc_feature 1..2184: note = source = /note="Description of Artificial Sequence: Synthetic coding sequence"
  source 1..2184: mol_type = other DNA
atgtgggtgactaagctgctgcccgccctgttactccagcacgttttacttcatttgctgctactgcccattgctattccctacgcagagggtcagcggaaaaggaggaataccatccatgaattcaaaaagtcggctaaaacaactctaataaaaattgatccggccctcaagattaaaaccaagaaggttaacaccgcggaccaatgtgctaacaggtgcaccaggaataaagggctgccgttcacctgcaaagcttttgtgttcgacaaagcccgcaaacaatgtctgtggttccccttcaactccatgagctccggggtgaaaaaggagtttgggcatgaattcgacctgtatgaaaataaagattacatccgtaattgcattataggaaagggacggagttataaggggactgtctcaattaccaaatccggcattaagtgccaaccttggtcaagcatgatccctcacgaacactcatttttgccgagttcttatagggggaaagatttacaggagaactactgtcggaacccaagaggagaagagggagggccttggtgtttcacctctaacccagaggtccgctacgaagtgtgtgatataccacaatgtagtgaagtggagtgtatgacatgtaatggggagtcctaccgcgggctgatggaccacacagaatcggggaagatttgccaacgttgggaccaccagacaccacacagacacaagttcctgcccgagagatatccggataaagggtttgacgataattattgccggaatcccgacgggcagccaagaccctggtgctatacgcttgatccacacacgagatgggagtattgcgccatcaaaacgtgcgctgacaatacaatgaacgacactgacgtaccactcgagacgaccgagtgcatccagggacagggcgagggctaccgtggcaccgtaaacaccatctggaatgggatcccctgccagaggtgggactcccagtacccccacgagcacgacatgacacccgagaattttaagtgcaaggacctaagggaaaactactgtcgaaaccccgacgggtccgagagcccatggtgttttacgaccgacccgaacattcgagtggggtactgctcccagatcccaaactgcgatatgtcccatggtcaggactgctaccgcggaaatggaaaaaactatatggggaatctttcgcagaccagaagcggcctaacatgtagcatgtgggataagaacatggaagacctacatagacacatcttttgggaaccagacgcaagtaagcttaacgaaaactattgccgaaaccctgatgatgacgcccacggcccctggtgctatacaggcaatcctctgatcccatgggactattgtcctatctctcgctgcgagggcgacacgactccaacaattgttaatctggaccaccccgtaatttcctgtgccaagaccaagcagctcagagttgtaaatggcataccaactcggactaatatcggatggatggtgagtttgagatatagaaacaaacacatatgtggcggttcactgataaaagaaagttgggtattgactgcacgccagtgttttccgtcccgagacctgaaagattacgaggcttggctggggatccatgatgtgcacggaaggggggacgagaagtgcaaacaagtgctgaatgtgtcgcagttggtgtacgggccagaggggtccgatctcgtgctgatgaagttggccagacccgccgtgctggacgacttcgtgagcacaatcgacctgcccaactatggctgcactattcccgagaaaacatcatgtagcgtctacggatggggatacacagggctgattaactacgatggcctgcttcgtgtagcccacctttatattatgggcaatgagaaatgcagccagcaccaccgcggcaaagtcaccctgaacgaaagcgagatatgcgcgggagcagaaaagattggctcgggtccttgcgaaggcgactacggcggtccactggtgtgcgagcaacacaagatgcgcatggtgctgggggtaattgtgccgggtcggggttgcgccattcctaacagacccgggattttcgtccgggtggcctactacgcaaaatggatccacaagattattctcacgtacaaagtccctcagagc

SEQ ID NO: 13623 - DNA, 2184 bp, synthetic construct
  misc_feature 1..2184: note = source = /note="Description of Artificial Sequence: Synthetic coding sequence"
  source 1..2184: mol_type = other DNA
atgtgggtgaccaagcttttaccagcactccttctgcaacacgtacttctacacctcctcctcctccctattgctatcccctacgctgaagggcaacgcaagcggcgtaatactatccatgaattcaaaaaatctgccaagacgacactaattaagatcgacccagctttaaagatcaaaacgaagaaggttaacaccgctgatcagtgcgccaatcggtgtacacgtaataagggcctgccatttacttgcaaagcttttgtgttcgataaggcacgaaaacagtgcctgtggttcccattcaacagcatgtcttctggggtaaaaaaggaattcggccacgaatttgacctgtacgaaaacaaagattatattagaaattgtattatcggaaagggcagaagctataaaggaaccgtgtcaatcacgaaatcagggatcaagtgtcagccttggtcttccatgatcccacatgagcactcgttcctaccttcctcctaccggggtaaggatttacaggagaattattgtcgtaatccaaggggtgaagagggcgggccctggtgtttcacaagtaatccggaggtgcgctacgaggtctgtgacatcccccagtgcagcgaagttgagtgcatgacttgcaatggcgagtcatatcgggggctcatggaccacaccgaatccggcaagatctgtcagagatgggaccatcagacgccacaccggcacaagttccttcctgaacgctatcccgataagggattcgacgataattactgtagaaatcctgatggccagccgagaccctggtgctatacactggacccacacacgaggtgggagtactgcgccataaaaacgtgcgcagacaatactatgaacgataccgacgtaccacttgagaccactgaatgtattcaggggcagggcgagggctataggggcacggtcaacaccatttggaacggcataccttgccaaagatgggatagccagtacccacacgaacacgatatgacccctgagaacttcaagtgcaaagatctgagggaaaactattgccgcaatcctgatggctccgagtcgccttggtgcttcaccacagatccaaatatccgtgtggggtattgcagccagattcccaattgcgatatgtcccatggccaggattgctacagaggaaatggcaagaattatatgggcaacctgtcacagacccggagtggcctgacctgttcgatgtgggataaaaatatggaagacttgcatcggcacattttctgggaacccgacgcctctaaactgaatgagaactactgtcgcaaccccgatgacgatgcccatggaccctggtgttacactggcaatcctctgattccctgggactactgccccatcagcagatgtgaaggagacaccactcccactatcgtcaacctggaccacccagtgatcagctgtgccaaaaccaagcagctgagggtggttaacggcattcccactcggacaaacataggctggatggtgagcctgcgctaccgcaacaaacatatctgcgggggttccctgattaaggagtcctgggtgctgacagcccggcagtgtttcccctcacgagacctcaaagattacgaagcatggctgggtatccacgatgtacacgggaggggcgatgagaagtgtaagcaggtactgaacgtgagtcaactggtttatggccccgaaggctccgatctcgtgcttatgaagctggctagacccgctgtgctggatgacttcgtgtctacaatagacttgccaaactatggctgtacaatacccgagaagacttcctgttctgtctatggttggggatacaccgggttgattaactatgacgggctgttgcgagtggcccacctgtacattatgggcaatgaaaaatgtagtcagcatcatcgcggcaaggtaacactcaatgaatctgaaatctgcgctggcgccgagaagattgggtctggcccttgcgagggtgactacgggggcccgctagtgtgtgagcagcacaaaatgagaatggtcttgggggtaattgtgcccgggcgcggttgcgccatccccaacagaccgggtatctttgttcgcgtggcctattacgcgaaatggattcacaagatcatccttacatataaggtgcctcagtct

SEQ ID NO: 13624 - DNA, 2184 bp, synthetic construct
  misc_feature 1..2184: note = source = /note="Description of Artificial Sequence: Synthetic coding sequence"
  source 1..2184: mol_type = other DNA
atgtgggtcaccaaacttctgccggctctcctgctgcagcatgttctgctccacttgttgctccttccaatcgccatcccatatgcagaagggcaacgtaaacgtcgaaacaccattcacgaattcaagaagtcggcaaaaacgaccctgatcaagatagatcctgcccttaagatcaagaccaagaaggtcaacactgcagatcaatgtgcgaaccggtgtacccgaaacaagggacttcctttcacctgtaaggcctttgtgtttgacaaggcgcgtaagcagtgtctctggtttcccttcaattccatgtcctctggagtaaagaaagaatttggtcatgagtttgatctgtacgagaataaggactacattcgtaattgcatcatcggaaagggtcggtcgtacaaaggcaccgtgtcaataactaagagcggaattaagtgtcaaccatggtcatcgatgatacctcatgagcactctttccttccctcgtcctaccggggcaaggaccttcaggaaaactactgccggaatccacgaggggaagagggtggaccctggtgtttcacctctaacccagaagtcagatacgaagtgtgcgatattcctcagtgtagcgaagtcgaatgcatgacttgtaacggagaaagctacagaggtctgatggaccatactgaatcagggaagatttgtcagcgttgggaccaccagacccctcaccgacacaaattcctccctgaaaggtaccctgataaaggttttgacgacaattactgcaggaatccagatggacaacctagaccttggtgttacacccttgacccccacactaggtgggagtactgcgcaattaagacctgcgccgacaatacgatgaacgacaccgatgtgcctctggagactactgagtgtatccaaggacaaggagagggatataggggaaccgtgaacaccatttggaacggtattccttgtcaacggtgggactcccaatacccccatgaacatgatatgacccccgaaaactttaagtgtaaggacctgcgcgaaaactactgtcggaacccagatggttccgaatccccttggtgctttactactgatcccaatattcgagtggggtattgttcacaaatcccgaactgcgatatgagccatggacaagactgttaccggggtaatggaaaaaactatatggggaaccttagccagacccgtagcggactgacgtgttcgatgtgggacaaaaacatggaagatcttcatcgccacattttctgggaaccagacgcgtctaaactcaacgagaactactgtagaaaccctgatgatgatgcgcacggaccatggtgctacactggaaacccactcattccatgggattactgccccatttctcgctgtgaaggagacactaccccgactattgtcaacctggatcatcccgtgatttcctgtgccaaaaccaagcaactgcgggtcgtcaacggtatcccaactcgcactaacatcggatggatggtgtcgctgcgataccgcaataaacacatctgcggcgggagtcttatcaaggaatcatgggtgcttaccgcacggcaatgtttcccctcacgtgatcttaaggactacgaggcttggctgggaatccatgatgtgcacggcaggggggatgagaagtgtaagcaagttctgaacgtctcacagcttgtgtacggcccagaaggatccgatctggtcctcatgaagctggcaagacctgcggttctggacgactttgtttccaccattgatcttcccaactacggatgtaccattcctgagaaaacgtcatgctcggtgtacgggtgggggtacactggcctgataaactacgacgggcttctgcgagtcgcacatctttacatcatgggaaatgaaaagtgttcgcaacaccataggggcaaggtgacgctgaatgaatcagagatatgtgcgggcgcagagaaaattggttcaggaccctgtgaaggtgattacggaggcccgctggtgtgtgaacagcacaagatgcggatggtgctcggtgtcattgtcccaggacggggatgcgcaattcctaatagacctgggatatttgtgcgggtggcttattacgcaaaatggattcataagattatcctcacttataaggtgccacagagc

SEQ ID NO: 13625 - DNA, 2184 bp, synthetic construct
  misc_feature 1..2184: note = source = /note="Description of Artificial Sequence: Synthetic coding sequence"
  source 1..2184: mol_type = other DNA
atgtgggtgacaaagcttctccccgctcttctgttgcaacacgttttgctgcacctcctactcctgcctattgctatcccctatgctgagggacagcgcaaaaggcggaacaccatacacgagtttaaaaagtccgccaaaaccaccctgataaagatcgatcccgcgctcaagatcaaaactaaaaaggtgaatacggccgatcagtgtgctaatcggtgcactaggaataaggggttaccgtttacatgcaaggcattcgtctttgataaggccaggaagcagtgtctgtggttcccgttcaactcgatgagctctggggtaaagaaggagttcggccatgaattcgacctctatgagaacaaggactacatcagaaattgtatcattgggaaagggaggtcctataagggcacagtctcgatcacaaaatcaggcattaagtgccagccatggtccagcatgattccacacgagcacagctttcttccctcttcctacagaggcaaagacctgcaggaaaattattgtcgcaacccccgcggggaggaaggaggaccatggtgtttcacgtcaaatccggaggtcagatacgaggtgtgcgatatcccccagtgtagtgaggtcgagtgtatgacctgtaacggagaaagttataggggactgatggatcataccgaatctgggaagatttgtcagaggtgggatcaccagacaccacataggcacaaattcttacctgaaagataccccgataaaggttttgatgataattattgtaggaacccggacgggcagccccgtccctggtgttatactttagatccccacacccggtgggaatactgcgctatcaagacctgtgccgataataccatgaatgacactgatgttcctctggagactacagagtgcatacaggggcagggcgaggggtacaggggaactgttaacaccatttggaatggcataccctgtcagagatgggattcccaatatccccacgagcacgacatgacacctgagaactttaagtgcaaggacctgagagaaaactactgtagaaaccctgacggctcggagtctccatggtgctttaccaccgaccccaacattcgggtaggttactgtagccagattccaaactgtgatatgtcccacgggcaggattgctaccggggaaacgggaagaactatatgggcaatttgagccagacacgctctgggctgacctgctctatgtgggacaaaaacatggaggatctccatagacatatcttctgggagcctgacgctagcaagttgaatgaaaactactgccgcaatccagacgatgatgcacatggcccatggtgctatactggcaatcctctcattccttgggattattgtccgatttcgcgctgcgaaggtgacacaacaccaaccatcgtcaatcttgatcaccctgtcattagttgcgcgaaaactaaacaactccgagtggtcaatgggattcccacgcgaacgaatattgggtggatggtgtctctacggtaccgtaataagcacatctgcgggggcagcctgatcaaggaatcttgggttcttaccgctaggcagtgtttcccctcccgtgacttaaaggactacgaagcatggctgggaatacatgacgtgcacggtcgtggggatgagaaatgtaagcaggtgcttaacgtgtcccagcttgtctacggccctgagggatcagacctggttctgatgaagttagcccgacctgctgttctggatgactttgtttctactattgatctgcccaactacgggtgcacaatacctgagaagaccagctgttccgtatacgggtgggggtacacaggcttgattaactatgatgggctgctccgagttgctcacctctatattatggggaacgagaagtgctcccagcaccaccgtggtaaggtgactctcaatgagagcgaaatttgtgctggcgctgaaaagattggttccggcccctgcgagggagattacggcgggccgctggtctgcgagcaacacaagatgcgcatggtactcggggtcattgtcccgggccgcggttgtgccatccctaataggcccggcattttcgtgagagtcgcctattatgccaaatggattcataagatcatcttaacgtataaagtgccacaatcc

SEQ ID NO: 13626 - DNA, 2184 bp, synthetic construct
  misc_feature 1..2184: note = source = /note="Description of Artificial Sequence: Synthetic coding sequence"
  source 1..2184: mol_type = other DNA
atgtgggtaactaagctcctcccagcactgctcttgcagcatgtgcttctgcacttgctcctgctcccaatcgcgataccatacgctgaaggccaacggaagagaaggaacaccatccatgaattcaagaaatcggcgaagaccactctgattaagatcgacccggcactgaagataaagactaagaaagtgaacaccgctgatcaatgtgccaaccgctgcacccgcaacaagggcctccctttcacttgcaaggcttttgttttcgacaaagcccgtaagcagtgcctgtggttcccgttcaattccatgtcatctggagtgaagaaggagtttgggcatgaattcgacctgtacgagaataaggactacattagaaactgtataatcggcaagggacgatcgtacaaaggaactgtgtcaattactaagtcggggatcaagtgccagccatggtcctcaatgattccgcacgagcacagctttctcccgtcaagctaccggggcaaggatctgcaagagaactattgtaggaacccccggggcgaagagggaggtccgtggtgcttcacctcaaacccagaggtgagatacgaagtctgtgacatcccgcaatgtagcgaggtggaatgcatgacctgcaatggagagtcctatcggggactcatggaccacaccgaatcaggcaagatttgccagcggtgggatcatcagaccccacaccgccacaagttcctgccagaacgatacccggataaggggttcgacgacaattactgccgcaaccctgatggacagcctcgcccgtggtgttacaccctggacccacatactcgctgggagtactgcgccatcaagacctgcgccgataatacgatgaacgataccgacgtgccgcttgaaaccaccgaatgtatccaggggcagggagagggatacaggggcactgtgaatactatctggaatggcatcccatgccagagatgggactcgcagtatccgcacgaacatgacatgaccccggaaaactttaagtgtaaagacctgagagaaaactattgtcggaacccagatggctcggagtcaccatggtgcttcactaccgacccgaacatccgcgtcggttattgttcgcagattcctaactgcgacatgtcccacggacaggattgctacaggggaaacgggaaaaactacatggggaacctgtcccagaccaggtctgggctgacttgctcaatgtgggacaagaacatggaagacctgcatcgccacatcttctgggaaccggacgcaagcaaactgaatgagaactactgtagaaaccccgacgatgatgctcacgggccgtggtgctacaccgggaaccctcttattccttgggactactgtccgatctcacggtgtgagggagacacgacccctaccatcgtgaatcttgatcacccagtcatttcgtgcgctaaaacgaaacaactgcgggtcgtgaatgggatcccaacccgcactaacatcggttggatggtcagcctgcgctaccgtaacaagcacatctgcggtggctcgctcatcaaagagagttgggtgctgaccgcccgccagtgttttccctcccgggatctgaaagattacgaggcatggttgggaatccatgacgtgcacggacggggagatgagaaatgcaagcaggtgctgaatgtgtcacaactggtgtacggaccagagggatcggatctggttctgatgaagctggcgcgccctgcggtgcttgacgacttcgtcagcacgattgacctcccaaactacggatgcacgatcccagaaaaaacttcatgttccgtgtatgggtggggatacactgggttgatcaattacgacggactgctgagagtggctcacctctacattatgggcaacgagaagtgttcgcaacatcacagaggaaaagtcactctgaatgaatccgagatctgtgccggtgccgagaagattggaagcgggccgtgcgagggagactacggagggcctctcgtgtgcgagcagcacaaaatgcggatggtgttgggtgtcatcgtccctggacggggctgcgcaatcccgaaccggccgggaattttcgtgcgggtggcctattacgcgaagtggatccacaagattattctcacttacaaggtgccacagtcc

SEQ ID NO: 13627 - DNA, 2184 bp, synthetic construct
  misc_feature 1..2184: note = source = /note="Description of Artificial Sequence: Synthetic coding sequence"
  source 1..2184: mol_type = other DNA
atgtgggttaccaagctgctgccagccctgctgcttcagcacgtcctcctgcatctcctgctgctgcctattgccatcccatacgcggagggacaaagaaagcgcaggaacaccatccacgagttcaaaaagagcgctaaaaccactctcatcaagatcgacccggcgctcaaaatcaagaccaagaaagtgaatactgccgaccagtgcgccaatcgatgcactcgcaacaagggtttgccattcacttgtaaggcgttcgtgttcgataaggcccggaagcagtgcctttggttccccttcaactcgatgagctccggggtcaagaaggagttcggccatgagttcgacctctacgagaataaggactatatccgtaattgtatcattggaaagggaagaagctacaagggcacggtgagcatcaccaagtccgggatcaagtgccagccgtggtcgtcgatgattccgcacgaacattcatttcttccttcatcataccgcgggaaagacctgcaagaaaactactgccggaacccacgcggagaagagggagggccttggtgcttcacctcgaacccagaagtccggtacgaggtgtgtgacattcctcaatgctcagaggtagaatgcatgacctgcaatggcgagtcttacagaggactgatggatcacacggaatcaggcaagatctgccaacggtgggaccaccagactccgcaccgccacaagttcttgcccgagaggtatccggacaagggattcgacgataactactgtcgcaatcctgatggacagccacgcccttggtgttacaccttggatccgcacactcgctgggaatactgcgcgatcaagacctgcgccgacaatactatgaacgacactgacgtgccgctggaaacgaccgagtgtatccaaggccagggagaagggtacagaggaacggtgaacactatctggaacgggattccatgtcagagatgggatagccagtacccccacgagcatgacatgaccccggagaacttcaagtgtaaagacttgcgcgaaaactactgtagaaatcctgacggctccgagtcgccgtggtgctttactactgatccaaacattagggtggggtactgctcgcaaatcccaaactgcgatatgtcacacggtcaagactgctatcgcggaaacggaaagaactacatgggcaacctcagccagacccggagcggcctcacctgctctatgtgggacaagaatatggaggacctccaccggcatatcttctgggagccggacgcctcgaagttgaacgaaaactattgtcggaacccagacgacgatgcccacgggccatggtgttacactggaaaccctctgataccatgggactactgcccgatctcacggtgcgagggagataccacgccgaccatcgtcaatctggaccatccggtgatctcgtgcgccaagaccaagcagttgcgggtggtgaacggcatccccactaggactaacattggatggatggtcagcctgcgttacaggaataaacacatctgcgggggcagcctgatcaaggagtcatgggtgctgaccgcgcgccaatgttttccgtccagggacctgaaagactacgaggcatggctcggaatccacgacgtgcatggaaggggagacgaaaagtgcaaacaagtgctgaacgtgtcccaattggtgtatgggccagaaggatctgatctggtgctcatgaaactggccagaccggcagtgctggacgacttcgtcagcactattgaccttccgaattacggctgcacgatcccagagaaaacctcatgttcggtgtacgggtggggctacaccggactgattaactacgacggtctgctgagagtggcacatctgtacattatgggaaacgagaaatgctcgcaacatcaccggggaaaggtcactctgaacgaatccgaaatctgcgcgggggcggagaagatcggttccggaccttgcgaaggcgattacggcggaccactcgtgtgtgaacagcataagatgagaatggtcctgggagtcatcgtgccggggcggggttgtgcaatccctaataggccaggaattttcgtccgggtggcctactacgctaagtggattcacaaaatcattctgacctacaaagtgccccagtcg

SEQ ID NO: 13628 - DNA, 2184 bp, synthetic construct
  misc_feature 1..2184: note = source = /note="Description of Artificial Sequence: Synthetic coding sequence"
  source 1..2184: mol_type = other DNA
atgtgggtgaccaagctgctccctgccctgctgcttcagcacgtgctccttcatctgcttctgcttcccattgcaattccttacgcagagggacaacgaaaaaggcggaacaccattcacgaattcaagaagtcggcaaagaccaccctcattaagatcgatccagcacttaagatcaagaccaagaaggtcaatactgcagatcaatgtgccaaccggtgtactagaaacaagggccttcctttcacttgcaaggcatttgtgtttgacaaggctcgcaaacagtgcttgtggtttccatttaacagcatgtcgagcggagtcaaaaaggagtttggacatgagtttgatctttatgagaacaaagattacattagaaattgcattattggcaagggtaggtcgtacaagggcaccgtgtcgatcacgaaatcaggcattaagtgccaaccctggagctccatgattccacacgaacactcctttttgccctcctcctaccgagggaaagacctgcaagaaaactactgcagaaaccctcgcggtgaagagggtggcccgtggtgttttacgtccaacccagaagtgcgatacgaagtgtgtgatattcctcaatgttcggaagtggaatgcatgacctgcaatggggaatcctacagagggttgatggaccataccgaatcggggaagatttgccaacggtgggaccatcagacccctcatcgccataagttcttgcccgaaagatacccagataaaggtttcgatgataactattgccgcaatccagatggtcaacctcgaccttggtgctacacccttgatcctcataccagatgggagtactgcgccataaagacctgtgctgataacactatgaatgataccgatgtgcctctggagactactgaatgtattcagggacaaggcgagggctaccggggtactgtgaacaccatttggaatgggataccctgtcagcgttgggattcccagtacccccatgaacacgacatgactccggagaatttcaaatgtaaggacctcagggagaactattgccgaaacccagacggctccgaatcaccttggtgctttactacggaccctaatatcagagtgggttactgtagccaaataccgaattgtgacatgtcgcatggacaggattgctatcgggggaacggaaaaaactacatgggcaatttgtctcaaactcgctcgggacttacgtgctcgatgtgggataagaacatggaagatctgcatcgtcatatcttctgggaacctgatgccagcaaacttaacgagaattactgccgcaatcctgatgacgacgcccacggaccctggtgttacactggtaaccctttgatcccatgggactactgtcctatctcgaggtgtgagggcgatactactcctactattgtgaatctcgaccaccctgtgatctcgtgtgcaaagactaagcaactgcgcgtggtcaacggaattccgacccgaactaacatagggtggatggtttctctgcgctataggaacaagcatatctgtgggggatcgctcattaaggaatcctgggtgctcactgcaaggcaatgctttccatctcgggacttgaaagattatgaggcgtggcttggtattcacgatgttcatggacgcggcgatgaaaagtgtaagcaagtgctgaacgtctcgcaacttgtctacggtccagaaggatccgacctcgttcttatgaaactggcaagaccggctgtgctggacgattttgtgagcactattgatctgcccaactacggatgtactatccccgagaaaaccagctgttcggtgtacggttggggatacactggactcatcaactacgatggacttctccgcgttgcacatctgtacattatgggaaatgagaagtgtagtcaacatcacagaggtaaggtgactttgaatgaaagcgaaatatgtgccggagcagagaagattggttccggcccatgcgaaggagactacggcggcccactggtctgtgaacagcacaagatgagaatggtgctcggtgtcatagttccaggaagaggatgtgcgattcccaatcgaccagggattttcgtcagagtggcttactacgcaaagtggatccataagatcatactgacctacaaggtccctcaatcg

SEQ ID NO: 13629 - DNA, 2184 bp, synthetic construct
  misc_feature 1..2184: note = source = /note="Description of Artificial Sequence: Synthetic coding sequence"
  source 1..2184: mol_type = other DNA
atgtgggtgaccaagttgctaccggcgctgcttttgcaacacgtcctcctacacctcctgctcctacctatcgcgataccgtatgccgaagggcaacgcaaaaggcgcaataccatacatgaatttaagaagtccgctaaaacaacgcttatcaagatagatccggccctcaaaatcaagactaagaaagtcaatacggctgaccagtgcgccaatcggtgtacgcgtaataaaggcctcccctttacatgcaaggcatttgtgttcgataaggctcgtaaacagtgcctgtggttccctttcaacagtatgtcgtccggagttaagaaagagttcggccatgaatttgacctatacgaaaacaaggattacatccgcaactgcattatcgggaaaggtcgaagctataaaggcacggtctcgattacaaagtccgggattaagtgccaaccatggtcctctatgattccgcatgaacactcgtttttgccttcttcttacagagggaaggatctccaggaaaactactgtcgaaaccctcgtggcgaggagggtggcccctggtgcttcacgtcgaaccccgaagtgcggtatgaagtatgcgacatcccacagtgctccgaggtcgagtgcatgacctgtaacggtgaatcctatcgtggtcttatggaccacacagagagtgggaaaatttgtcaacgctgggatcatcagacaccacaccgtcacaagtttctgcccgaaagatatcccgataagggcttcgatgataactattgccggaacccagatggccaacctcgcccatggtgctatactctggaccctcatacacggtgggagtactgcgccatcaagacctgcgctgacaacacaatgaacgacacagatgttcccctcgaaaccacagagtgtattcagggtcagggagagggctatcggggtacggtcaatacgatctggaacggaatcccctgccagaggtgggactcacagtaccctcatgaacacgatatgacacccgaaaactttaagtgtaaggatttgcgagagaactattgtcgaaatcctgatggcagtgagtccccatggtgctttactacggaccctaatatacgtgtcggatactgcagtcagatccctaactgtgatatgtctcatggacaggattgttatcgcgggaacggtaaaaattatatggggaacctgtcgcaaacacgatccggcttgacctgtagcatgtgggataagaatatggaggatctgcaccgacacatattctgggaacctgatgctagtaagttaaatgaaaattactgtcggaacccagatgacgacgctcacggtccgtggtgctatacaggaaacccccttatcccttgggactattgtcccatctctcgttgtgagggtgataccaccccaactatcgttaatctagatcatcccgtcatatcctgcgctaagaccaaacaattgagggtggttaacggaataccaacgaggacaaacattggttggatggtgtccctgcgatatagaaataaacacatttgtgggggttctctgattaaggagtcgtgggtacttaccgcgcgccagtgctttccgtcccgagacttgaaggactacgaggcctggctcggaattcatgatgtgcatggtcgcggggacgaaaaatgtaaacaagtccttaacgtttcgcagctcgtgtatggccccgaaggttcggacttggtgctgatgaagcttgcgagacctgctgtactagatgatttcgtgtctaccatagacttgccgaactatggctgcactatccccgagaagacctcttgtagcgtttacggttggggctatacgggattgataaactacgacggtctgcttagagtggcgcacctctacatcatggggaatgagaagtgctcacagcatcaccgaggcaaggtcactctcaacgagagcgaaatctgcgccggcgctgaaaagattggaagtggcccctgtgaaggagactacggtggcccgttggtttgcgagcaacataagatgcgtatggtccttggggttattgttcccggtcggggttgcgcgatcccaaaccgccctggcatctttgttcgcgtcgcctactacgctaagtggatccataaaatcatcctaacctataaagtcccgcaatct

SEQ ID NO: 13630 - DNA, 2184 bp, synthetic construct
  misc_feature 1..2184: note = source = /note="Description of Artificial Sequence: Synthetic coding sequence"
  source 1..2184: mol_type = other DNA
atgtgggtaaccaaactgcttcctgcactgctgctgcaacatgtgctcctgcatctgctcctgcttcctatcgcaatcccatacgctgagggacaaaggaagcgcagaaataccattcacgaattcaagaaatccgcgaaaacaacactcatcaaaatcgatccagctcttaagattaagaccaaaaaggtcaacaccgcggaccagtgcgctaacagatgcacaaggaacaaaggattgccatttacctgcaaagcttttgtctttgacaaggcgaggaaacaatgtttgtggttcccttttaacagtatgtcatcaggcgttaaaaaagagttcggccatgaatttgatctgtacgaaaacaaggactacatcaggaactgtatcataggtaagggcaggtcttataaagggacagtctctatcacaaagagtggcattaagtgtcagccgtggagcagcatgatcccgcacgagcatagttttctgccctccagttatcgcggcaaggatctgcaggaaaattactgccgtaatccacggggagaagaaggaggtccttggtgtttcacctctaacccagaggtcaggtatgaagtttgcgacatcccccagtgctcagaagttgagtgcatgacctgcaacggtgagagctaccgcgggctgatggatcacacagagtctggaaagatctgccagcgctgggaccaccaaactccacatcgccacaaatttctgccggaacgttatcccgataagggatttgacgataactattgcaggaacccagatggtcagcccaggccatggtgttacaccctggatccgcacaccaggtgggagtactgtgccataaaaacatgcgctgataacaccatgaatgataccgatgtgcctctcgaaaccaccgaatgtatacaaggccagggcgagggctacaggggaacagtgaacactatttggaatggaatcccctgccagcgttgggattctcagtacccccacgagcacgacatgacacccgagaactttaagtgcaaagacctgcgcgaaaattactgcaggaacccagacggttccgagtctccctggtgcttcaccacagacccgaacattagagtgggctattgttctcagattccaaattgcgatatgagccacggacaagattgctacaggggaaatgggaaaaactacatgggcaacctgtcccagactcgaagcggcctaacgtgcagcatgtgggataaaaacatggaagatcttcacagacacattttttgggagccagatgcatctaaactgaatgaaaactactgcagaaaccctgatgatgatgcccatggcccatggtgttacaccggcaaccctttgattccttgggactattgcccgatcagcagatgcgaaggagataccacccccaccattgtgaacttagaccatcctgtgatctcatgcgccaaaaccaaacaattgagggtggttaacggaatccctacccgcactaacataggctggatggtcagtcttaggtaccgcaataaacatatatgtgggggcagtctcattaaggaaagttgggttctcacagctagacaatgttttcctagccgtgaccttaaagattatgaagcttggctgggaatccatgacgtgcatggtagaggagacgagaaatgcaagcaggtgcttaacgtgagccagctcgtatacggtcctgaaggctctgatctcgtactgatgaaactggccaggccagcagttcttgatgactttgtgagtacaatagacctgccgaactacggctgcacaattcctgaaaaaacatcgtgttctgtgtacggatggggttacaccggactgattaattacgatgggttgctccgcgtggcacacctgtacattatggggaacgaaaaatgttcccaacaccacagagggaaggtgaccctgaacgagtctgagatttgcgctggagcagaaaagattgggagcggaccttgcgaaggggattatggaggtcccttagtgtgtgaacagcataaaatgcgcatggttctgggagtaatcgtgccaggccgaggctgcgctatccccaaccggccaggtatcttcgtaagggtcgcttattatgcgaaatggattcataagattatactcacatacaaagtgccacagagc

SEQ ID NO: 13631 - DNA, 2184 bp, synthetic construct
  misc_feature 1..2184: note = source = /note="Description of Artificial Sequence: Synthetic coding sequence"
  source 1..2184: mol_type = other DNA
atgtgggtgaccaagctgctccccgcgctcctgctccagcatgtgctgcttcaccttctgctgttgccgattgctatcccgtacgccgaaggccaacgcaagcgccgcaacactatccacgagtttaagaagtcggcaaagaccactctcatcaagattgaccctgccctgaaaatcaaaacgaagaaagttaacactgcagaccaatgcgctaatcgctgcacccgcaataagggcctgccatttacctgcaaggcgttcgtgttcgataaggcccgtaaacagtgtctgtggttcccgttcaattcaatgtcatccggagtcaagaaggagtttggacacgaatttgacctttacgagaataaggactacattcgcaattgcatcattggtaaagggagatcttacaagggaacggtgtccattactaaatcgggaattaagtgccagccgtggtcgagcatgatcccgcatgagcactcattcctgccttctagctacagaggaaaagatctgcaggaaaattattgccgcaacccgaggggtgaagaaggagggccttggtgtttcacgtcgaaccctgaagtgcgctacgaagtgtgcgacatcccccaatgctcagaggtcgaatgcatgacctgcaacggagagtcgtacagaggactgatggaccataccgagtcgggcaagatctgccagaggtgggaccaccagactccgcacagacacaagttcttgccagaacggtacccagataagggattcgatgacaattactgtcgcaatcctgatggtcaacctcggccgtggtgctatacgctggaccctcatactcggtgggaatactgcgcaatcaagacttgcgctgacaacaccatgaatgacactgacgtgccgttggagactactgagtgcatccagggccaaggagaaggataccgcggaactgtgaacaccatctggaacggaataccgtgccaacgctgggacagccagtacccccatgaacacgatatgaccccggagaacttcaagtgcaaagacctgcgggagaactactgccggaacccggacggatcagaatcgccctggtgcttcaccaccgatccaaatatcagagtcggatactgttcccagatcccaaactgcgatatgagtcacggccaggattgttacagaggcaacggaaagaattacatggggaacttgtcgcaaacccgaagcggtctgacctgtagcatgtgggataaaaatatggaagatctccacaggcacatcttctgggaaccggatgcctccaaactcaatgaaaactactgcaggaatccggatgatgacgcccacgggccctggtgttacaccggaaacccgctgatcccttgggattactgcccgatatccagatgcgaaggcgacaccaccccaactatcgtgaacctggaccatccagtgatctcctgtgccaaaaccaaacagctgcgcgtggttaacggcatcccaactagaaccaacatcgggtggatggtgtcccttcggtacagaaacaagcatatctgcggcggcagcctgattaaggaaagctgggtcctgaccgctcggcagtgctttccatcgcgggacctgaaggactacgaggcgtggctggggatccacgacgtgcatggacggggagacgaaaagtgtaagcaggtcctgaacgtgtcccagttggtgtacggaccagagggaagcgacctggtgctgatgaagctcgcccgcccagcagtcctcgacgatttcgtgtcaactatcgatttgcccaactatggctgtactatcccggagaaaacctcgtgctccgtctacgggtggggatacactgggctcatcaattacgacggtctgcttcgggtggcgcacctctacatcatgggaaacgagaagtgctcgcaacaccatcgcggaaaggtcactctcaacgagagcgaaatctgcgcaggtgccgaaaagatcggctcaggtccctgcgagggagactacggaggaccactcgtgtgtgagcaacacaagatgcggatggtgctcggtgtcatcgtgccgggaaggggctgtgcgattcctaaccggccggggatcttcgtgcgagtcgcctactatgcgaagtggatccataaaatcatcctcacgtacaaagtcccgcagtcc

SEQ ID NO: 13632 - DNA, 2184 bp, synthetic construct
  misc_feature 1..2184: note = source = /note="Description of Artificial Sequence: Synthetic coding sequence"
  source 1..2184: mol_type = other DNA
atgtgggttaccaagctgctacccgccctcctgctacagcacgtgctcttgcatctgttactgctgccgatagcaattccctatgccgaaggccagcgcaagagaagaaacacaatccacgagtttaagaaatcagccaagaccaccctaataaagattgacccagctctcaagattaaaacaaaaaaagtgaatacagccgaccagtgcgccaacagatgtactaggaataagggtctgcccttcacttgtaaagccttcgtctttgataaagcccggaaacagtgcctgtggtttccctttaatagtatgagcagtggagtaaaaaaggaattcgggcacgaatttgatctgtatgagaacaaggactatattcgtaattgcatcatcggcaagggccgctcctataagggaaccgtttccataacgaagtccggcatcaagtgtcagccctggtccagcatgatcccccacgagcacagttttcttccttccagctaccggggcaaggatctgcaggaaaattactgtagaaaccccaggggggaggagggtggcccttggtgctttacaagtaacccggaagtaaggtatgaggtctgtgacattccacagtgctcggaggtggaatgcatgacgtgtaacggagagtcctatagaggcttaatggaccacacggagtccggcaagatttgccagagatgggaccaccagacaccccacaggcacaagttcctccccgaacgctaccccgacaaaggtttcgatgacaattattgccgcaatcctgatggccaaccgcgcccttggtgctacacccttgatccacatacccgctgggagtactgcgctatcaagacttgtgcagacaataccatgaacgataccgacgtgccactcgaaacaacagagtgcatacagggccagggggaaggatatcgtgggaccgtgaacactatttggaatgggatcccttgccaaagatgggattcgcagtacccacacgaacatgatatgactcccgaaaatttcaagtgcaaagacttaagggaaaactattgcagaaaccccgatgggtcagagagcccttggtgtttcacgacagacccaaacatcagggtcgggtattgttcccagatccctaattgtgatatgtcgcacggccaagattgctatagaggaaacgggaagaattacatgggtaatctctcacagaccagaagcggcctcacctgcagcatgtgggacaagaatatggaggacttacaccggcacatattctgggagcctgatgcctctaagcttaatgagaattattgcagaaaccctgatgacgacgctcatggcccctggtgttatactggtaacccgctcattccctgggactactgtcccatctccaggtgcgagggagacaccacacctaccatcgtgaatctggaccaccccgtaatatcttgtgccaagacaaaacagctgagggtcgtcaacgggatcccaacaagaactaatatcggatggatggtgtcacttcggtatcgcaataaacacatctgtggtggctccctgatcaaggagtcatgggtcctgacagccagacagtgctttcctagcagggacttgaaagactacgaggcctggctgggaatccacgatgttcacggcaggggcgatgagaaatgcaaacaggtgctcaatgtgagtcagctggtgtacggccctgaaggaagcgacctcgtcctcatgaagctggctcgtccagcagtcttagacgattttgtgagtactatagatcttcctaactatggttgtactatccctgagaagacctcatgctcagtatacggttggggatacaccggcctcataaactatgatggtctattacgagttgcccacctctacataatggggaacgaaaagtgttcccagcaccatcggggtaaggtgacgctgaatgagtctgaaatatgtgccggtgcggaaaaaatcgggagtggtccgtgtgagggcgactatggcggcccacttgtatgcgaacaacataaaatgcggatggtgctaggcgtgattgtgcccgggagagggtgcgccatacctaacagaccaggcatattcgtacgcgttgcatattacgcgaagtggatccacaagatcatattaacctataaggtcccgcagtcc

SEQ ID NO: 13633 - DNA, 2184 bp, synthetic construct
  misc_feature 1..2184: note = source = /note="Description of Artificial Sequence: Synthetic coding sequence"
  source 1..2184: mol_type = other DNA
atgtgggtcaccaagctgctgcctgcactgcttctccaacacgtcctgcttcatcttctccttctgcccatcgcaattccatatgcagaaggacaaagaaagcgaagaaacactattcatgagttcaaaaagtcagccaaaactaccttgatcaagatcgatccagcactgaagattaagactaagaaggtgaataccgcagatcagtgtgccaatagatgtaccagaaacaaggggctgccctttacttgcaaggcctttgtttttgataaggcaaggaagcaatgtctgtggttcccattcaactccatgtcgtcgggcgtgaagaaagaatttggtcatgagttcgacctgtacgaaaacaaagactacatacggaactgcataattggaaagggacggtcctacaagggaactgtctccattactaaatcgggtattaagtgccagccctggagctcaatgattcctcatgaacatagctttctgccttcaagctaccggggtaaggatctgcaagaaaactattgtagaaatcctcgcggggaagaaggcggcccatggtgttttacctcaaaccctgaagtgagatatgaggtgtgcgatatcccgcaatgctcagaggtcgaatgtatgacttgcaatggggagtcgtaccgcggactgatggaccacactgagtccgggaagatttgtcagaggtgggaccaccagaccccccatagacataagtttctgcctgagaggtacccagacaagggttttgatgacaactactgtcgcaatcccgatgggcagcctcggccgtggtgctacactcttgatccacatacgagatgggaatactgtgcgataaagacttgtgcagacaacactatgaacgacaccgatgtccctcttgaaaccaccgaatgtattcagggacagggagagggataccgaggaaccgtgaacactatctggaatggcattccatgccaaagatgggattcccagtacccgcatgagcacgacatgacgccagaaaactttaagtgcaaagacctgagagaaaactactgccgaaaccccgacggaagcgaatcgccttggtgctttaccactgatcccaacattagggtcggctactgctcccaaatacctaattgtgatatgtcccatggtcaggactgttatagagggaacggaaagaactacatgggaaacctttcccaaactagatcggggttgacctgttcgatgtgggataagaacatggaagatcttcatagacatatcttttgggaaccagatgcatccaagctgaacgagaactactgtagaaacccagatgatgatgcacatggtccttggtgttacaccggcaatcctcttattccttgggattactgcccgatttcccgctgtgaaggagataccactcctacgatcgtgaatcttgatcatccagtgattagctgtgccaagacgaagcagctgcgggtcgttaatggaatcccaactcggaccaatattgggtggatggtcagcttgcggtaccggaacaagcatatctgtggagggtcgctgattaaagaatcttgggtgttgaccgccaggcaatgtttcccctcaagggatctgaaagactatgaggcatggttgggtatacatgacgtgcatggtcgcggtgatgagaaatgcaaacaggtgctgaatgtctcgcaactcgtgtacggtcctgaaggatcagacctggtcttgatgaaactggcacggccagcggtgctcgacgatttcgtctccactattgatctgcctaactatggatgtactatccctgaaaagacctcctgttcggtctacggatggggttacactggtctgattaactacgatggtctgctgagagtggcccacttgtacataatgggaaacgagaaatgttcccagcatcatcgcggtaaagtgaccctgaatgagagtgagatttgcgcgggggcagaaaagattgggtcgggaccttgtgaaggcgactacggcggcccactggtctgcgagcaacataagatgaggatggtgcttggcgtcatcgtgcctggacggggctgcgccattccaaacagacccggaatctttgtgagagtggcgtactatgcgaagtggatccataagataattcttacgtacaaggtgccccagagc

SEQ ID NO: 13634 - DNA, 2184 bp, synthetic construct
  misc_feature 1..2184: note = source = /note="Description of Artificial Sequence: Synthetic coding sequence"
  source 1..2184: mol_type = other DNA
atgtgggtgaccaaactcttgccggccctgcttcttcaacatgtgctgctgcacctcctgctcctgcccattgctatcccatacgctgaaggccagcgcaaacgcaggaataccatccatgagttcaaaaagtcagcgaaaactaccctgatcaaaatcgatcctgctctgaaaatcaaaactaaaaaggtgaataccgcagaccaatgtgctaataggtgcaccagaaataagggcctcccattcacgtgcaaggctttcgttttcgataaggcccggaagcagtgtttgtggtttccgttcaactcgatgtcatccggtgtcaagaaggagttcgggcatgaattcgatctgtacgaaaacaaagactacatccgcaactgcatcatcgggaaaggacggagctacaagggaactgtgagcattaccaagtcgggcatcaagtgtcagccctggtcctcaatgatcccgcacgagcactcattcctcccgagctcgtatagagggaaggacctccaagagaactactgccgtaacccgcggggagaggaaggaggaccatggtgcttcacctcgaaccctgaggtgcggtacgaggtgtgcgatatccctcagtgctcagaagtggagtgtatgacttgcaatggtgagtcctaccgggggctcatggaccacaccgaatcggggaagatctgccagcgatgggatcaccaaacgcctcatcggcacaagttcctccctgaacgatatccggacaaggggttcgacgacaactactgtcgaaacccggacggccagccccgcccatggtgttacaccttggatccgcacactcggtgggaatactgcgcaatcaagacttgtgcggataacactatgaacgacactgacgtgcctcttgaaacgaccgaatgtatccaaggacaaggagaaggttacaggggaactgtcaataccatttggaacggtatcccgtgccaacgatgggactctcagtaccctcacgagcatgatatgactccggagaacttcaaatgtaaggacctcagggaaaactactgcaggaacccagacggatccgagtcaccgtggtgctttactactgaccccaacattcgtgttgggtactgctcccagatcccaaactgtgatatgtcccatggtcaggactgctacagaggcaacggaaaaaactatatgggcaacttgagccaaacccgctcggggctgacgtgctccatgtgggataagaacatggaggacctgcacagacacatcttctgggaaccggacgcatccaagctcaatgagaattactgccgaaatccagatgatgacgctcatggaccgtggtgttatactggcaatccattgattccatgggattactgtccgatctcaagatgcgaaggcgacacgaccccaaccatcgtaaatctggatcacccagtgatctcgtgtgccaagactaagcaactgcgggtggtgaatggcataccgacccgcaccaatatcggctggatggtgtcgctgcggtatcgcaataaacacatttgtggcggatcgctgattaaagaaagttgggtgctgacggcccgccagtgctttccgtccagagatctgaaggattacgaggcttggcttggaattcacgatgttcatggtcgcggggacgagaaatgcaagcaggtgctgaacgtctcgcagctggtgtacggtccggaagggagtgacctcgtgctgatgaagttggcccggccggccgtgttggacgactttgtgtcgactatcgacctccccaactacggatgcactattcctgagaaaaccagctgctcagtctacggatggggctatacgggactcatcaactacgacggactcctgcgcgtcgcccatctctacatcatgggaaacgaaaagtgcagccagcaccatcgcggcaaggttacgctgaatgaatcggagatctgcgccggagccgaaaagattggctctggcccgtgtgagggggactacggaggaccgctcgtgtgtgaacagcacaagatgagaatggtgttgggagtcatcgtgccaggtcgcggatgtgcaatcccgaacagacccggaatcttcgtgagggtcgcatactatgccaagtggatccataagattatacttacctacaaagtgccccagtca

SEQ ID NO: 13635 - DNA, 2184 bp, synthetic construct
  misc_feature 1..2184: note = source = /note="Description of Artificial Sequence: Synthetic coding sequence"
  source 1..2184: mol_type = other DNA
atgtgggttaccaagttactcccagcgctgcttctgcaacatgttttgctgcacctgctgctgttgccaattgctatcccatacgctgaaggacagcggaagaggcgcaataccatccacgagtttaaaaaatctgctaagacgactttgattaagattgaccctgccttgaagattaaaacgaagaaagttaacactgcagaccagtgtgctaataggtgcacgcgtaataagggtctgccgttcacctgcaaagcgtttgtatttgataaggctcgcaagcagtgcctgtggttcccattcaactccatgagcagcggtgtgaagaaagagtttggtcacgagttcgacctgtatgaaaataaggattacatccgaaactgcatcataggcaagggtaggagctataaaggtaccgtttcaattaccaagagtgggattaaatgtcagccgtggtcttctatgatccctcatgaacactcattccttccaagctcctatcgcggcaaggacctgcaggagaattactgccgcaacccacgtggcgaggagggtggaccttggtgtttcacttccaatccggaggtgagatacgaggtgtgcgatatccctcaatgctcggaggttgagtgtatgacttgtaacggagagtcgtaccgcggtctgatggaccataccgaatccgggaaaatctgccagagatgggatcatcagaccccccatcgccataaattcctgcccgaacgctaccctgacaaaggcttcgatgataattactgtagaaacccagacggtcagccacgcccgtggtgttacaccctggatcctcacacccggtgggagtattgtgccataaagacgtgtgccgataataccatgaacgacactgatgtgccactggaaaccacggaatgtatccaaggtcaaggggagggttaccgaggcacggtcaatacgatctggaatggtatcccttgccagcgctgggatagccaatatccacatgagcacgacatgacccctgagaattttaaatgcaaagatctccgcgaaaactactgtagaaatcctgatggtagcgagagcccgtggtgtttcacgaccgatccgaatatccgagtcggttattgtagccagattccaaactgcgatatgagtcatggacaggattgctacaggggcaacggcaagaactatatgggcaatctgagccagactcgcagcggcctcacctgtagcatgtgggataagaatatggaggacttacaccgccacattttttgggagccagacgccagcaaactgaacgagaactactgccggaatccagacgatgatgcccacggaccatggtgttatacggggaatccattgatcccatgggattactgcccaattagccgatgtgaaggtgatacgaccccgactatcgtgaatctggatcatccagtcatcagctgtgctaaaacaaaacaacttcgcgtagtgaacggtatcccgacacgcacgaacattggctggatggtgagtctgcgctatcgaaataagcacatttgcggtggcagcctgatcaaggagagctgggtcctgaccgcacgccaatgctttccgtcgcgcgatctgaaagattatgaggcatggctgggaattcatgacgtgcatggccgtggagatgaaaagtgcaagcaggttctgaatgtctctcagctcgtgtacggtccggaggggagcgacctagtgttgatgaaacttgcgcgcccagcggtcctggatgactttgtgagcacaatcgatctgccgaactatggttgcacgataccagagaaaacgagctgttctgtttacggatggggttatacgggcctaatcaactatgacggactgctgcgagtcgcgcatctctatataatgggcaatgaaaaatgcagccagcatcaccgcggtaaagtgaccctgaatgagagcgagatttgcgcaggtgcggagaaaatcggttccggtccctgtgagggtgactacggtggccctctcgtctgtgagcagcacaagatgcgcatggtgcttggggtaattgtaccgggtaggggctgcgcgatccctaatcgcccgggtatctttgttagagttgcgtattacgcgaagtggattcacaaaattattttgacgtacaaggtcccacaatca

SEQ ID NO: 13636 - DNA, 2184 bp, synthetic construct
  misc_feature 1..2184: note = source = /note="Description of Artificial Sequence: Synthetic coding sequence"
  source 1..2184: mol_type = other DNA
atgtgggtgactaagctgctgccagctctactcctgcagcacgtcctcctgcatcttctgctcctgcctatcgctattccctatgctgaaggacagagaaaaaggcggaacactatacatgaattcaagaagtctgctaagacaactttaataaagatagatcccgcgctaaaaatcaagacaaaaaaagtgaatactgccgatcagtgtgccaatcgctgcactcggaacaaaggactccctttcacttgtaaagccttcgtgtttgataaggctagaaaacagtgtctctggtttccatttaactcgatgagttctggagtgaaaaaagaattcgggcatgagtttgacctgtacgagaataaagattatataagaaattgcatcatagggaaagggcgatcctataaaggaacagtgtccataactaaatctggaatcaagtgccaaccctggtcttcgatgatccctcatgaacattctttcctgccctcctcctatcgagggaaggatctgcaggaaaactattgtcggaaccctaggggggaggaaggagggccctggtgctttacttctaatccagaagttcgatatgaggtgtgtgatatcccacagtgctccgaagtcgaatgcatgacttgtaacggggagtcttataggggactgatggatcatactgaaagtgggaaaatctgtcagcggtgggatcatcagactcctcatcggcacaaatttctgccggaacgctatcccgataaaggattcgatgacaattactgtagaaaccctgatggacagccccggccctggtgctatacacttgatccacatactcgatgggaatattgcgccatcaagacttgtgctgataatactatgaacgacacagatgtccctctggaaacaacagaatgcatacagggacagggggaaggatacagaggaacagttaatacaatctggaacgggataccatgtcagcgatgggacagtcagtatccccatgaacacgatatgacacccgagaatttcaaatgcaaagatcttcgagaaaattattgtaggaatcctgatggatctgaatctccatggtgttttacaacagatcccaatataagagttgggtattgtagtcagatccccaactgcgacatgagtcatgggcaggattgttatcgggggaatggaaaaaattatatgggaaatctttcccagacacgttcaggactaacatgtagtatgtgggacaaaaatatggaagacctacaccgacatatcttttgggagcctgatgcctccaagttaaatgaaaattattgtagaaaccccgatgacgatgcacatggaccctggtgttatacagggaaccccttaattccctgggattactgccctatatcaaggtgcgaaggagatacgactcccacaatcgtgaacctggatcatcctgtgatttcttgtgcaaaaacgaagcagctcagagttgttaatgggataccaactagaacaaacatcgggtggatggtgtcgctccgataccgaaacaaacatatctgtgggggatctctcataaaagaatcatgggtgctgacagctaggcagtgctttcccagtcgcgacctgaaagattatgaagcgtggctgggaatacatgatgtgcatggaaggggagacgagaagtgtaagcaggttctgaacgtgtcccagttagtatatgggcctgaagggtcagatctcgtgctcatgaaacttgcaagaccagccgtcctggatgatttcgtatcaacaatcgatctgccaaactatgggtgtacaatacctgaaaaaactagttgttccgtctatgggtggggatatactggactcatcaactacgacggactactccgggttgcacatttgtatatcatggggaacgaaaaatgcagtcagcaccatagagggaaagtgacactcaatgaatccgagatatgtgccggagccgaaaaaatcggatcaggaccatgcgaaggggattatggggggcccctcgtgtgtgaacagcacaaaatgaggatggtgctgggggtgatagtgcctgggcggggatgcgctattcccaacaggcctgggatattcgttagagttgcgtactatgctaagtggatacacaagatcatactaacttataaagttccccagtcg

SEQ ID NO: 13637 - DNA, 2184 bp, synthetic construct
  misc_feature 1..2184: note = source = /note="Description of Artificial Sequence: Synthetic coding sequence"
  source 1..2184: mol_type = other DNA
atgtgggtcacgaagctcctccccgcactcctgctccagcatgtgctcctgcatctcctcctgctgccgatcgcaatcccatacgcagagggacagcgcaagagaagaaacaccatccacgagttcaagaagtcagccaagactacccttatcaaaatcgaccctgcgctgaagatcaagaccaaaaaggtgaatactgcagatcagtgcgctaataggtgcactcggaacaaaggcttgcccttcacttgcaaggcgttcgtctttgataaagcccgcaagcaatgtctgtggttccctttcaactcgatgtcgtccggcgtcaagaaggaatttggacacgagttcgatctgtacgaaaacaaagattacattagaaactgcatcatcggcaagggaaggtcctacaaaggaaccgtgtctatcaccaagtccggaatcaaatgtcagccatggtccagcatgatcccccatgagcatagcttcctgccatcgtcctatagagggaaggacctgcaagagaactattgccggaatccgcgcggagaggaaggcggaccgtggtgcttcacttccaacccagaggtgcggtacgaagtgtgtgatatcccacaatgctcggaagtggagtgcatgacttgcaatggagagtcctaccgcgggttgatggatcataccgagtccggcaagatctgccaacgctgggaccaccagaccccacataggcacaaattcctgcccgagcggtacccagacaagggattcgatgataactattgcagaaacccggacgggcagccacgcccttggtgttacaccttggacccgcacacccggtgggagtactgcgcaatcaagacgtgcgccgacaataccatgaatgacactgatgtgccactcgagactaccgagtgcatccaagggcagggcgagggataccggggaactgtcaacaccatctggaatggcatcccgtgccagaggtgggattcccagtacccgcatgaacacgatatgactcccgagaatttcaagtgtaaagatctcagagagaactactgtcgcaatcccgacggttcggaatcgccatggtgttttactactgaccccaacatccgcgtcggctactgctcacagattccaaattgtgacatgtcgcacggtcaggattgttaccggggaaatggtaagaactacatgggcaatctttcgcaaaccagatcaggcctgacctgttcgatgtgggacaaaaacatggaggacctccaccgccatatcttttgggagcccgacgcgtcaaaactcaacgaaaactactgtcggaatccggacgatgacgcacatggaccttggtgctataccgggaatcctcttatcccatgggactactgccccatttcccggtgcgaaggcgacaccaccccgaccattgtcaacctggatcatccggtgatctcgtgcgccaaaactaagcaattgagagtggtaaatggcatccccactcggacgaacatcggttggatggtttcactgagatacaggaataaacatatctgcggaggaagccttatcaaggaatcttgggtcctgaccgctcgccagtgcttcccgagccgggatctcaaggactacgaggcatggttgggcatccacgacgtgcacggtcggggcgacgagaaatgcaagcaagtcctgaacgtcagccaactggtgtacggaccggagggatcggatcttgtcctgatgaaactggccaggccggcggtgctggatgatttcgtgtctactatcgacctgcctaactacgggtgcaccatcccggagaaaacctcctgttccgtctacggatgggggtataccgggttgattaactacgacggtcttttgcgagtggcccacctgtacatcatgggaaacgaaaagtgcagccaacatcaccgcggaaaggtcacgctgaatgagtccgaaatttgcgcgggcgccgaaaagatcggaagcggaccctgcgaaggagactacggtggaccgttggtgtgcgaacaacacaaaatgaggatggtcctgggcgttatagtgccgggacgcggttgcgcaatcccgaaccggcccgggatcttcgtcagagtcgcctactacgcaaagtggatccacaaaatcatcctgacctacaaggtcccgcagagc

SEQ ID NO: 13638 - DNA, 2184 bp, synthetic construct
  misc_feature 1..2184: note = source = /note="Description of Artificial Sequence: Synthetic coding sequence"
  source 1..2184: mol_type = other DNA
atgtgggtgaccaagctgctgccggccctccttctgcaacacgtgcttctccatctcttgcttctgccgatcgcgatcccttacgccgaaggacaaagaaaacggcgcaacactatacatgagtttaagaagagcgcaaagaccaccctgatcaagatcgatcctgccctgaagattaagacgaagaaagtgaacaccgcagaccaatgcgcgaatcggtgcacccggaacaagggacttccgttcacctgtaaagcgttcgtgttcgataaagctaggaaacaatgcttgtggttccctttcaactcgatgagcagtggtgtgaaaaaggagttcggacatgagttcgacctgtacgagaacaaagattacatccggaactgtatcatcggaaagggacggagctacaagggcaccgtgagcatcactaaatccggaataaagtgccagccctggtccagcatgattccgcatgaacactccttcctcccctcatcctacagagggaaggatcttcaggaaaactattgcaggaatccgcggggggaggaaggggggccgtggtgcttcacgtctaaccccgaagtgcgctacgaggtgtgcgatatcccgcagtgctcagaggtcgaatgtatgacctgcaacggtgaatcatatcgcgggctcatggatcataccgaatcgggaaaaatctgccagcgctgggatcaccaaaccccacaccggcataagtttctgccagaaagatacccggacaaaggtttcgacgataactactgtcgaaacccagacggtcagccgaggccctggtgctatacgctggaccctcatactcggtgggagtattgtgctattaagacttgcgcagacaatactatgaatgacactgatgtgccgctggaaaccaccgagtgcatccagggccagggggagggataccgcggaaccgtgaacactatctggaatggcatcccttgccagagatgggattcccagtacccgcacgagcacgatatgacccctgaaaactttaagtgcaaggacttgcgcgagaactattgccgcaacccagacggctccgagtcaccgtggtgctttactaccgatccgaacatccgagtgggttactgctcgcaaattccgaattgtgacatgtcgcacggacaggactgctaccgcgggaatggaaagaattacatgggaaacttgtcacagacgcggagcggattgacttgttcgatgtgggataagaatatggaggacctgcaccgccacatcttttgggaaccggacgccagcaagctgaatgagaactactgccggaatccggacgacgacgcgcacggaccctggtgctacactggaaacccactcatcccctgggattactgtcccatctcacgctgcgagggagataccaccccaacgatcgtgaatctggaccacccagtcatctcctgtgcaaagaccaagcaattgagagtggtaaacggcatcccaacccgaaccaatataggatggatggtgtcgctccgctaccggaacaaacacatttgcggtggatcgctgatcaaggaatcctgggtcttgactgccaggcaatgcttcccatcgagagatctgaaagactacgaagcgtggctcgggatacacgatgttcatggtagaggcgacgaaaaatgcaagcaagtcctcaatgtttcccagctcgtgtacggaccggaaggttctgacctggtgcttatgaaactggcccgccctgcagtgttggatgatttcgtcagtactattgacctgccaaactatggctgcactatccccgaaaagacttcgtgctcggtgtacggttggggatacaccggactgatcaattacgatggactcctccgagtggcccatctgtacatcatggggaacgaaaagtgttctcagcaccatcgcggtaaagtgactctgaatgaatcggaaatctgtgcaggcgccgaaaagattggctccggcccgtgcgagggcgactacggaggaccacttgtctgtgagcagcacaagatgaggatggtcctgggcgtgatcgttccggggagaggttgtgcgatcccgaaccggcctggcatcttcgtgagagttgcctactacgcaaagtggattcacaaaatcattctcacctataaggtcccacagtcc

SEQ ID NO: 13639 - DNA, 2184 bp, synthetic construct
  misc_feature 1..2184: note = source = /note="Description of Artificial Sequence: Synthetic coding sequence"
  source 1..2184: mol_type = other DNA
atgtgggtgaccaagctcctgccggccctacttctgcagcatgttcttctccacctactccttctgcccatagccatcccctacgctgagggtcagcgcaaaagacggaacaccattcatgagttcaagaaaagcgccaaaacgaccctgatcaaaattgatcccgcactgaagatcaagaccaagaaggttaataccgctgaccagtgcgcaaaccgctgtaccaggaacaaagggctacccttcacttgtaaggcctttgtttttgacaaggcaaggaagcagtgcctgtggtttccattcaattctatgtcatccggagtgaaaaaggagttcggtcacgagttcgacttgtacgagaataaggactacattaggaattgtatcattggtaagggacggtcatataaggggactgtgtccatcaccaagagcgggatcaaatgccagccatggtcaagcatgattccacacgaacactcctttttgccaagcagctatcggggtaaagatctgcaggagaattattgccgaaatccaaggggagaggaaggcgggccgtggtgctttacctctaaccccgaagttaggtacgaggtttgtgacattcctcaatgctctgaggtcgaatgcatgacatgtaacggagaaagttatcgcgggctcatggaccacaccgaatcaggaaaaatctgccaacggtgggatcatcagaccccccaccgccataagtttctacctgagagatatcctgataagggattcgatgacaactattgcagaaaccccgatggacagccacgaccttggtgctatacattggatcctcataccagatgggagtattgcgcaatcaagacttgtgccgacaacaccatgaacgacactgacgtgcctctggagacgaccgagtgcatccaggggcagggagagggctaccggggaacagttaacacaatatggaatgggataccctgccagaggtgggatagtcagtatccccatgagcacgatatgacccccgagaatttcaaatgtaaggacctccgggaaaactactgcagaaaccccgacggcagcgagtctccttggtgctttacaacagaccccaatatcagggttggttattgttctcagattcctaactgcgacatgagccacggacaggactgctatcggggaaacgggaaaaattacatgggcaatctgagtcagacacgaagcggtctcacatgtagcatgtgggataagaacatggaggacttgcaccggcacatattctgggagcccgatgcaagtaagcttaacgagaactactgcagaaatcctgacgacgacgcacatgggccttggtgctatactggcaatcccttgattccttgggattactgccccatctctaggtgtgagggcgatactacacccaccattgtgaatttggaccacccagtgatctcctgcgctaaaaccaagcagctgagggtcgtgaacggtatacccacaaggacaaatatcggatggatggtgtccttgcgctatcggaacaaacacatttgtgggggatctcttatcaaggagtcctgggtcctgacagcgaggcagtgcttcccttcccgcgatctcaaggattatgaggcctggctgggtatacacgacgtgcacggccgaggggatgagaaatgtaagcaagtactgaacgtcagccagctggtctacgggcctgagggatctgacctggttctcatgaagctcgcccggccagctgtcctcgacgatttcgtgtccacaatcgatcttccaaactacggatgcaccatacctgaaaagacatcttgctcagtttatggctggggctacacaggcctaatcaactatgacgggctactcagagtggcacatctgtacataatggggaatgagaagtgctcccaacatcaccgcggtaaagttacactgaacgagtcggagatttgcgcaggcgcagagaaaatcggcagcggcccatgtgagggcgactacggaggcccgctggtctgcgaacagcacaagatgcgcatggtgctgggggtaattgtgcccggcagagggtgtgccataccaaaccggcctggcatattcgtcagagtggcctactacgcaaaatggattcataagataatcctgacctataaagtcccgcagtct

SEQ ID NO: 13640 - DNA, 2184 bp, synthetic construct
  misc_feature 1..2184: note = source = /note="Description of Artificial Sequence: Synthetic coding sequence"
  source 1..2184: mol_type = other DNA
atgtgggtgaccaagctgctccctgccctgctgctgcagcatgtgctcctgcacctactgctgttacccatagcaatcccatacgctgaaggtcaaaggaaacgcagaaacactattcacgagttcaagaaatctgctaagacaacgctgatcaaaatcgatcctgcactaaaaataaaaacaaagaaagtgaacaccgcagatcagtgcgctaacaggtgcacccgtaacaagggtcttccttttacatgcaaggcatttgtattcgataaggctagaaagcaatgcctgtggttcccctttaacagcatgagctctggcgtgaaaaaagagttcggccatgagtttgacctgtacgaaaacaaagactacataaggaactgcataataggcaagggtcggtcctacaagggaaccgtgagtatcactaagagcggaatcaagtgtcagccttggagcagcatgattccgcatgagcactcatttctgccctctagctataggggtaaggatctccaagaaaactactgccggaaccctaggggagaggaaggtgggccttggtgctttaccagcaacccagaggtccggtacgaggtgtgtgacattccccaatgctccgaagtcgagtgcatgacgtgcaacggagaaagctatagaggcctaatggaccataccgagagcgggaagatatgccaaagatgggatcaccagactccgcatcgccacaagttcttaccggagagatatcccgacaaagggttcgacgacaattattgcagaaacccagatggccagcccagaccctggtgttataccctggacccacataccaggtgggagtattgtgctattaagacgtgtgctgataacactatgaacgacacagacgttcctctggaaacaactgaatgcatccaaggtcagggagagggatatcgtggcacagtgaatacaatctggaatggcatcccgtgccagcggtgggattctcagtatccccatgagcatgacatgacccccgaaaattttaagtgcaaggacttaagggaaaattactgccgaaaccccgatggctccgaatccccctggtgtttcactaccgaccctaatatcagggtaggatactgctcccagatccctaactgtgacatgagtcacggccaggattgttaccgggggaacggaaagaactatatgggcaatctcagccaaacacggagtggtcttacatgttccatgtgggacaaaaacatggaagatctgcacaggcatatcttctgggagccagacgcgtccaaactgaacgaaaattattgtcgcaatcccgacgatgacgctcacggtccgtggtgttatacaggcaatcccctcatcccctgggactattgtccgatctcacgatgtgagggagatacgactcccacaatcgtaaatttggaccaccccgttatctcttgcgcaaaaaccaaacagctgcgcgtggtcaacggcatccctaccaggacaaatataggatggatggtctcactcaggtatcgaaataaacatatctgtggtggatcgctcattaaggaatcctgggtgctgaccgcccggcaatgcttcccctcccgcgacctcaaggattacgaagcatggctcggcattcacgacgttcacgggcgtggcgacgaaaagtgcaaacaggtcttgaacgtaagccagcttgtgtatgggcctgaggggagtgatctcgtcctcatgaagttagcgcgacctgccgtgctcgacgattttgtttctacaatcgacttacccaactacgggtgcactattcctgaaaagactagctgtagcgtctacgggtggggttatacagggctcattaattacgatggccttttgagggttgcccacctgtacatcatggggaatgagaaatgctcccagcatcacaggggcaaagtgacactaaacgagagcgagatttgtgccggagccgagaaaatcgggtccggaccttgcgagggtgattatggtggccctttggtctgcgaacagcacaagatgcgtatggtcctcggagtgatagttcctggcaggggctgtgccatcccaaatcgcccaggtatatttgttcgagtggcctattacgcaaaatggatccataaaatcatactgacctacaaagtgccacagagc

SEQ ID NO: 13641 - DNA, 2184 bp, synthetic construct
  misc_feature 1..2184: note = source = /note="Description of Artificial Sequence: Synthetic coding sequence"
  source 1..2184: mol_type = other DNA
atgtgggttacaaagcttctgcctgcccttctgctgcaacacgtcctcctccatcttctgctcctgcctatcgccattccatatgcggaaggccagcgaaagaggagaaacaccatccatgagtttaaaaagtcagcgaaaactacgctcataaagattgacccagcactgaagatcaagacaaaaaaagttaacactgccgaccagtgcgccaatcgctgtactcgtaataagggactaccattcacctgcaaggcctttgtatttgacaaagccaggaaacagtgcctatggtttcctttcaactccatgagtagcggggtgaaaaaagaattcgggcacgagttcgacttatacgagaacaaggattatattaggaactgtatcattggcaaaggcaggagctacaaaggtactgtgtctatcacgaaatccggcataaagtgccagccttggagcagcatgatcccccatgaacacagtttcctcccgagtagctatagaggaaaagatctgcaagagaactactgccgaaatccaaggggtgaggaaggaggcccctggtgctttacctccaaccccgaagtcaggtatgaagtttgtgacatccctcagtgttccgaggttgagtgcatgacctgtaatggagaatcctataggggactcatggaccataccgagagcgggaaaatatgccagaggtgggatcaccagactccgcatcgacataagtttctgcccgaacgctacccagataaaggtttcgacgataattactgtcgaaacccagacggtcagccccggccgtggtgctacacattggatcctcacactcgatgggaatactgtgctatcaagacttgtgccgacaacaccatgaatgataccgacgtgcctctcgagaccacggagtgcatccaaggacaaggcgagggataccgtggcactgttaacaccatctggaatgggatcccatgccagagatgggattctcagtacccacacgaacatgatatgacaccagagaatttcaagtgcaaggatctccgggagaactactgtcggaaccctgacggctcagagtctccatggtgttttaccactgacccaaacatccgcgtgggttactgctctcagatcccgaattgtgacatgtctcacggccaggattgttacaggggaaatggtaaaaactatatgggaaacctgtcgcagacacgatccggcctcacatgttctatgtgggataaaaatatggaggatctacacaggcatatattctgggagcccgatgcttcaaagctgaatgaaaattactgtagaaatcctgatgatgatgctcacggcccctggtgctataccgggaatccactgatcccatgggattactgcccaattagcagatgtgagggagatacaaccccaaccatagttaatctggatcacccagtgattagctgtgcaaagactaaacaactcagggtggttaatgggatcccgacaagaaccaatatcggttggatggtgagcctgcggtataggaacaaacacatttgtggaggatctctgattaaggagagttgggtcctgacagccaggcagtgctttcctagcagagatctaaaggactacgaagcttggttggggattcacgacgtgcatggaaggggggacgagaagtgcaaacaggtgctaaatgttagccagctggtctatggaccagagggttccgacttggtacttatgaaactggcccgcccggcggttctcgatgactttgtttccacaattgatctgcctaattacggctgcactattcccgaaaaaacctcctgtagcgtgtacggttggggatacacaggcctgatcaactacgatggcttactcagagttgcacacctctatattatgggaaacgagaaatgttcccagcaccataggggcaaagtcacgctcaatgagtctgaaatctgcgccggcgccgaaaagatcgggagcgggccttgcgagggggattacggcggcccacttgtttgtgaacaacacaagatgcgaatggtgctgggggtcatagtgccaggaagggggtgtgcgattcctaatagacctgggatttttgtccgagtggcttattacgccaaatggatccacaagattatccttacatacaaagtccctcagtcg

SEQ ID NO: 13642 - DNA, 2184 bp, synthetic construct
  misc_feature 1..2184: note = source = /note="Description of Artificial Sequence: Synthetic coding sequence"
  source 1..2184: mol_type = other DNA
atgtgggtgaccaaattgctgcccgcgctcttgctccaacacgttttattgcatctacttctgttgccaatcgcgattccctacgccgaggggcagcgtaaacgacggaacacgatacatgagtttaagaagtctgccaagaccacgttgatcaagatagaccccgctctcaagattaagacaaagaaggttaatacagccgatcaatgcgcaaaccgatgtacaaggaataaaggtctcccattcacctgcaaggctttcgtatttgacaaggcacggaaacaatgtttatggttcccattcaactcgatgagttcgggtgtgaaaaaggagttcgggcatgagtttgacctgtacgagaacaaggattacattagaaattgcattatcggaaagggccgctcttacaaggggactgtctcaatcaccaaatccggaatcaagtgccagccatggtcatcaatgatcccccatgagcactccttcctcccaagctcctatcgtggcaaggatctgcaggagaattattgccgaaacccccgcggcgaggagggcggcccatggtgtttcacatctaatccagaagtgcggtatgaagtgtgcgacatccctcagtgttcggaggtcgaatgcatgacgtgtaacggcgaaagctaccgcgggctcatggatcataccgaatcagggaagatatgccagcgttgggatcatcagaccccccaccgacacaagttcttgccagagcgatacccagacaaggggttcgatgacaattattgcagaaacccagatggccagccccgtccatggtgctacacattggatcctcacacgaggtgggaatactgtgctattaaaacatgtgctgataacacaatgaatgataccgacgttccccttgagaccacggagtgcattcaaggccaaggggaaggttatcgtggaacagtgaacactatctggaatggcataccatgccaacgatgggacagccagtacccccacgagcatgatatgacacctgagaatttcaaatgtaaggacctacgagagaattattgcagaaatccagatgggagcgaatctccttggtgcttcactaccgaccctaacattcgggtcgggtattgttctcagattccaaattgtgacatgagtcatggccaggactgctacaggggtaatggcaaaaattatatggggaacctctcacaaacgcggtctggcttgacatgctccatgtgggataagaatatggaggatctgcatcgtcacattttctgggagcctgatgctagcaaactcaacgagaactactgcaggaacccagatgatgatgctcacggaccatggtgctatacaggaaatccccttataccttgggactactgtcccatttcccgttgtgagggagatactacgcccacgatcgttaacctggaccaccccgttattagctgcgcgaagactaaacagcttcgtgtagtgaacggaatacccacacggaccaacattggctggatggtaagccttcgataccgaaataaacatatttgcggcggaagtttgattaaagaaagctgggtgctgaccgcccgccagtgtttcccgtcaagagatttgaaggactacgaggcctggctcggtatccatgacgtacatgggcgcggcgatgaaaagtgtaagcaggtacttaacgtttcccagctcgtctacggcccagagggatcagacctagtgctcatgaagcttgcccgacccgctgtattggacgattttgtgtccactatagatctgcccaactacggctgtacaattccagagaaaacctcatgctccgtatacggctggggctatacagggctgatcaactacgatggactcctccgcgttgcacatctgtacattatgggcaacgaaaagtgttctcagcatcacagagggaaggtgaccctgaatgaatccgagatctgcgcaggggccgagaaaatcgggagcggcccctgcgagggggattatggaggcccactggtgtgcgagcagcacaaaatgagaatggttttgggggtgattgtgcccggtcgtggttgtgccatccccaatcgccctggcatcttcgttagagttgcatactatgcgaagtggatccataaaattatcttaacctacaaagtcccgcaaagt

SEQ ID NO: 13643 - DNA, 2184 bp, synthetic construct
  misc_feature 1..2184: note = source = /note="Description of Artificial Sequence: Synthetic coding sequence"
  source 1..2184: mol_type = other DNA
atgtgggtgaccaagctccttccggccctgttgctccagcacgtactgctgcacctcttgctgctcccgatcgccatcccttacgcggaggggcagcggaagagaagaaacaccatccatgagttcaagaagtcagcgaaaacgaccctgatcaaaattgacccagccctgaaaatcaagactaagaaagtaaacaccgccgaccagtgcgcaaaccgctgcaccagaaacaaaggactcccgttcacctgtaaggctttcgtgttcgacaaggcaaggaaacaatgcctctggttccccttcaacagcatgtcatcaggcgtgaagaaggagttcgggcacgaattcgacctttacgaaaacaaagactacatcagaaattgtattatcggtaagggacggtcctacaagggtactgttagcattactaagtctggaatcaaatgtcaaccttggagcagcatgatcccacatgagcacagctttctgccatcctcctatagaggcaaggacctccaggagaattactgccgcaacccgcggggggaggaaggtggcccatggtgtttcacctcaaacccggaggtgcggtatgaagtgtgtgatattccccaatgcagtgaagttgaatgcatgacttgcaacggagaaagctaccgcggacttatggaccatactgagtcgggtaagatctgccaacgctgggaccaccaaactcctcaccgacataagttcttgccggagagatacccagataagggatttgatgacaattactgccggaaccccgacggccaaccgcgcccgtggtgctacaccctcgacccgcacaccaggtgggaatactgcgcaattaagacttgtgccgataacactatgaacgataccgacgtgccgctcgaaactactgaatgcatccagggacagggggaaggctaccggggtaccgtgaatacgatctggaacggcatcccgtgccagcgctgggatagccaatatccacatgagcatgacatgactccagaaaacttcaagtgcaaggacctcagagagaactactgtagaaacccagatgggtccgagtccccgtggtgttttacgaccgaccctaatatccgcgtcggatactgctcacaaatcccaaactgcgatatgtcccatgggcaggactgctatcggggaaatgggaagaactacatgggcaatctgtcgcagactcgctccggtctgacctgttcaatgtgggacaaaaacatggaggacctccaccggcacatcttttgggaaccggacgcatcaaaacttaatgagaactattgccggaacccggatgatgacgcgcacggcccctggtgttacacgggaaaccctctgatcccttgggattactgcccgatctccaggtgcgagggagataccaccccgaccatcgtgaacctggatcatccggtcatcagttgtgcaaagaccaagcagctcagggtggtgaacggcattccgactcggactaacattggatggatggtgtcgctgagataccggaacaaacacatctgcggagggtccctcatcaaggagagctgggtgttgactgctagacagtgcttcccaagccgcgatctgaaggactatgaagcctggctcggtattcatgatgtgcacggaaggggggacgaaaagtgcaaacaggtgctgaacgtgtctcagcttgtgtacggaccggaggggtcggacctcgtcctgatgaagctcgcccgcccggcggtgctcgacgacttcgtttcaactatcgacctgcctaattacggctgtaccattcctgaaaagaccagctgctccgtgtacggctggggctacactggattgatcaactacgacggcctgctgcgggtggctcacctctatatcatgggaaatgagaagtgctcccaacaccaccgcgggaaggtgactctgaacgagtccgagatctgcgcaggtgccgaaaagatcggatcgggaccctgtgaaggggattatggaggtccgcttgtgtgcgagcagcacaaaatgcggatggtcctgggcgtcattgtgccaggcagaggatgcgccatcccgaaccggcctggcatcttcgtccgcgtcgcgtactacgcaaagtggatccacaagattatcttgacgtacaaggtgccccagtcg

SEQ ID NO: 13644 - DNA, 2184 bp, synthetic construct
  misc_feature 1..2184: note = source = /note="Description of Artificial Sequence: Synthetic coding sequence"
  source 1..2184: mol_type = other DNA
atgtgggtgacgaagctcttgccggcgctgcttttgcagcatgtccttctgcacctgctcctcctgccgatcgccattccgtatgctgagggacagcgcaaacggcggaacaccatccatgaattcaagaagtcagcaaagaccactctgatcaaaatcgatccggcgctcaagatcaaaactaagaaggtgaataccgcagaccagtgcgctaacaggtgcactagaaacaaaggactcccattcacgtgcaaggctttcgtgtttgataaggcgcggaaacagtgcctctggtttccattcaatagcatgagctcaggtgtgaagaaagaatttggtcatgagttcgatctctacgagaacaaggactacatccgcaattgcatcatcggaaagggacggtcatacaagggcactgtcagcattaccaagtctgggatcaagtgccaaccttggtcgtcaatgatcccacacgagcactcgtttctgccaagctcctaccgtggcaaggacctccaagagaactattgccgcaatccgcgaggggaggaaggcggaccgtggtgcttcacgtccaacccagaagtccgatacgaggtttgcgatattcctcaatgctcggaggtggagtgtatgacctgcaacggagaatcctaccggggactcatggaccacactgagtcgggcaaaatctgtcagaggtgggaccaccagacgccacatcgccacaagttcctgccggaacggtacccggacaaagggttcgatgataactattgcagaaaccccgacgggcagccgcggccctggtgttacactctcgacccgcatactagatgggaatactgcgccatcaaaacgtgcgcggacaacaccatgaacgacactgatgtccccttggaaaccaccgagtgtatccagggacagggagaaggctatcgcggaactgtgaacaccatctggaatgggattccatgccagcgctgggatagccaatacccccatgaacacgatatgaccccggaaaacttcaaatgcaaagaccttagggaaaactactgccgcaacccggacggatccgaaagcccgtggtgttttacgactgacccaaacatcagagtcggctactgctcacaaatcccgaattgcgacatgagccacggacaagactgttaccgcggaaacggcaagaactacatgggtaacctgtcacaaacccgctcgggcctgacttgctcaatgtgggacaagaatatggaggatctccacagacacatcttctgggaacccgatgcatcgaagctgaatgagaattactgccggaatccagatgatgacgcgcatgggccttggtgctacaccggaaatcccctgataccttgggactactgccccatcagccggtgcgagggtgacaccactccaaccatcgtgaacctggatcacccagttatctcgtgcgccaagactaaacaacttcgtgtggtgaacggaatccctactcgcacgaatatcggatggatggtgtccctccggtaccgaaacaaacatatttgcgggggatcgctgatcaaagagtcatgggtgctgaccgcacgccagtgcttcccgtcccgagacttgaaggactacgaagcctggttgggaatccatgacgttcatgggcggggtgatgagaagtgtaagcaagtgttgaacgtgagccaattggtgtacggaccagaagggtcggacctggtcctgatgaagctcgctcggccggcggtgctggacgacttcgtgtctactattgatctccccaattatggttgtactatcccagaaaagacctcgtgcagcgtgtacggatgggggtacaccgggctgatcaattacgacggactgctccgcgtggcccatttgtacattatgggtaacgaaaagtgctcccagcaccaccgcggaaaggttaccctgaacgaatcggagatctgcgccggcgcggagaagatagggagcggcccttgtgagggagattacggagggcctctggtgtgtgaacagcacaaaatgagaatggtcctgggtgtcatcgtcccgggtcggggatgtgcgataccgaatcgccccggaatcttcgtcagagtggcgtattacgccaagtggatccacaagattatcctgacctacaaggtgccgcagtcc

SEQ ID NO: 13645 - DNA, 2184 bp, synthetic construct
  misc_feature 1..2184: note = source = /note="Description of Artificial Sequence: Synthetic coding sequence"
  source 1..2184: mol_type = other DNA
atgtgggtgacaaagttgctgccagctctgctgttgcagcacgtcctcctgcacctcctgttgctgcccattgctatcccgtacgctgagggtcaaagaaagaggcgcaacacaatccatgaatttaagaagagtgccaagacaactctcatcaaaatcgaccctgcccttaagatcaagaccaaaaaagtcaacaccgccgaccagtgcgccaacagatgcacccgcaacaagggtctgcctttcacatgcaaggcattcgttttcgacaaagctcgcaaacagtgtctctggttcccatttaactccatgagttcgggggtaaagaaggaattcggacatgagttcgacctgtatgaaaacaaggactatataagaaactgtattatcgggaagggccggagctacaagggcaccgtgtcaataacaaaatctgggattaagtgtcagccatggagctccatgatcccccacgaacatagctttttacccagcagctatcgcggaaaggaccttcaggagaactattgcagaaatcctcgcggagaggaggggggaccttggtgtttcacgagtaaccccgaggtacgatacgaggtgtgtgacattccacagtgcagcgaggtcgagtgtatgacctgtaacggcgagagttacagaggtttgatggaccataccgagtccggcaagatatgccagagatgggatcaccaaaccccgcatcgccacaagtttctgcctgaaaggtaccctgataaaggttttgatgacaattattgccgtaaccccgacggacagccccgtccttggtgctacacactggatccacatactcgatgggagtactgcgcaattaagacgtgtgccgataacaccatgaatgacaccgacgtgccattggagaccactgaatgcatccaaggccagggtgaagggtaccgtggaaccgtcaataccatctggaatgggattccctgtcagaggtgggattcccagtacccacacgagcatgacatgacaccagaaaactttaagtgtaaagatcttagagaaaattactgtcggaacccggacggaagtgagagtccatggtgtttcacaactgatcctaacatccgagtgggatattgttctcagatacctaactgtgatatgagtcacggacaggattgctaccgcggaaatggtaagaactacatgggcaatctgtcccagaccagatctggcttgacttgcagcatgtgggataaaaacatggaggacctccaccgacacatcttctgggagccggatgcatctaaactgaacgagaactactgccgaaacccagacgatgacgcccatggaccgtggtgctacacaggcaacccactaataccgtgggattactgtccaattagccgatgcgagggggataccactcctacaatagttaaccttgatcaccccgtcatctcttgtgccaaaaccaagcaactgagagttgtaaacggcatccccacccgtactaatatcggatggatggtgtctttacgttatcgcaataagcacatatgtggcggaagtctaataaaggaaagctgggttctgacagcgcggcagtgcttcccatcgcgggacttaaaagactatgaagcctggctcggtatccacgatgtgcatggaaggggagatgagaaatgtaagcaggtgcttaatgtgagccaactggtttacggtcccgagggcagcgacctggtgctaatgaagctggctcgtcctgcggtgttggacgactttgtcagcacgattgacctgcctaactatggatgcacgatcccggagaaaactagttgttccgtgtatggttggggctacaccggcttgatcaactatgacggtttgctgcgagtggcccatctgtatatcatgggcaacgagaaatgcagtcagcatcaccgtggaaaggtgacacttaatgagagtgagatctgtgccggcgctgagaaaattggctcggggccatgtgaaggggactatgggggtcctctagtgtgtgagcaacacaagatgagaatggtcctaggcgtgatcgtgccaggacggggatgtgcaatccccaatagacctgggattttcgtcagggttgcttattatgccaaatggattcacaaaatcatcctcacatacaaggtgcctcagagc

SEQ ID NO: 13646 - DNA, 2184 bp, synthetic construct
  misc_feature 1..2184: note = source = /note="Description of Artificial Sequence: Synthetic coding sequence"
  source 1..2184: mol_type = other DNA
atgtgggtgacgaaattgctcccagcactgctcctgcagcatgtcctgctgcacctgttattgctgcctattgccatcccctacgcggaaggacaacgtaagagacgaaacactattcacgagttcaaaaagagcgcaaaaacaactctgattaagattgacccagccctaaaaattaagaccaaaaaagtgaataccgccgatcagtgcgccaacagatgcacgcgcaataaaggattaccttttacttgcaaggccttcgtcttcgacaaggcgagaaagcagtgtctgtggtttcccttcaatagtatgagttcgggagtgaagaaagagtttggtcatgagtttgacctctatgaaaacaaagattatatccgtaattgtataataggtaaaggccggtcttataagggcaccgtcagcattacaaaaagtgggatcaaatgtcagccctggtccagcatgattccgcacgaacattcttttctgccatcaagctaccggggaaaagatttgcaagagaactactgcaggaacccacgcggcgaagaaggcggcccctggtgttttaccagtaatccggaagtacggtacgaagtgtgtgacattccacagtgttctgaggtcgaatgcatgacatgtaatggcgagagctacaggggcctgatggaccataccgaatcaggaaaaatatgtcagcggtgggaccaccagacgcctcacaggcataagtttcttccagagaggtatccagataaagggttcgatgataactactgccggaaccccgatggtcagcccagaccctggtgctacactctggatccccatacccggtgggagtactgcgctataaagacatgcgcagataacaccatgaacgatacagacgtccccctggagaccaccgagtgcattcagggacaaggagagggttatcgaggtactgtcaatacaatctggaacggcattccttgccagaggtgggattcgcaatacccccatgaacacgatatgactcccgagaacttcaagtgcaaagatctgcgggaaaactattgccggaacccagatggaagcgaatccccctggtgttttaccacggatcctaatattcgggtgggttactgcagccaaattccgaactgtgacatgagccacggtcaggattgctaccgggggaacgggaagaattacatggggaatctcagccaaacacgaagcggcttaacctgcagcatgtgggacaagaacatggaggacctgcaccggcacatattctgggagcctgacgcaagtaaactgaacgaaaattactgccgaaacccagatgatgacgcccacggaccttggtgttacacagggaacccacttattccctgggattactgtcccatcagcagatgcgaaggagatactacccctactatcgtcaacctagaccaccccgtgatatcatgcgcgaagaccaagcagctccgagtagtgaacgggattccaacccggactaacatcgggtggatggtgagcctgcgctatcggaacaaacacatttgcggcggatcactgatcaaggaaagttgggtgctgactgcacggcagtgttttcctagcagggacttgaaggattacgaggcatggttaggcattcatgatgtgcacgggcgtggggacgaaaaatgcaagcaagtgctgaacgtgtctcagctggtatacggtcctgaggggagcgacctggtccttatgaaattggcgcgacccgccgtgttggatgactttgtatcaacaatagacctgcccaactacgggtgtactatccctgaaaagacttcatgtagcgtttatggctggggctacaccggactcattaactacgacgggctgcttcgagttgcacacctgtacatcatgggcaatgaaaagtgcagtcaacaccacagagggaaagtgactttgaacgaatccgagatttgtgctggtgcggaaaaaatcggcagcggcccttgtgagggggattacggcgggccgctcgtgtgcgaacagcacaaaatgaggatggtcctgggggtcatcgtgcctgggcggggctgcgcaatacccaatcggcctgggatttttgttagggtggcatattatgccaaatggatccacaagattatcttaacgtacaaggtgccacagtca

SEQ ID NO: 13647 - DNA, 2184 bp, synthetic construct
  misc_feature 1..2184: note = source = /note="Description of Artificial Sequence: Synthetic coding sequence"
  source 1..2184: mol_type = other DNA
atgtgggtaacaaagcttttacctgcgctgctgctacagcacgtactgttgcacttgctacttctgcccatagccattccttatgccgaaggccagcggaagcggcggaacacaatccacgaattcaagaaatcagccaagaccacccttataaaaatcgatccagcactcaaaatcaagaccaagaaagtcaataccgcagaccaatgcgcaaaccggtgtactcgaaacaagggcttgcctttcacatgtaaagctttcgtcttcgacaaagcgagaaagcagtgcttgtggtttccctttaacagcatgagcagcggcgtgaaaaaggaatttggccacgagtttgatttatacgagaataaggactatattaggaattgcattatcggcaaggggcgcagctacaagggaaccgtttccataactaagtctggcatcaagtgccagccttggagcagcatgatcccacatgaacattcgttccttccaagtagctacagggggaaggacctgcaggaaaactactgtagaaatccacggggagaggagggggggccttggtgttttacctcgaatccagaggtccgatacgaggtttgcgatattccgcagtgcagcgaagttgagtgcatgacctgcaacggagagtcctaccgaggtctgatggaccatacagagagcggcaagatctgtcagcgatgggaccatcagaccccccataggcataagttccttccagagcgatacccagacaagggattcgacgataactattgccgcaatcccgacggacagccccgaccatggtgctacacattggacccccatacgaggtgggaatactgtgcgattaagacctgcgctgataataccatgaatgatacagatgttccactggagactaccgaatgtatccaggggcagggggagggatatagggggacggtgaatacaatctggaacgggataccctgccagcgctgggacagccagtatccccacgagcacgatatgactcccgaaaacttcaaatgcaaagatttgcgggagaactactgccgcaaccccgatggcagcgaatctccctggtgttttacaacagatcctaatattcgcgtcggatactgctctcagatacccaattgtgatatgagccacggtcaggattgttatagagggaacggcaagaattacatgggtaatctctcccagacccgttccggcctgacttgtagcatgtgggataagaatatggaagacctgcatagacacatcttttgggagccagatgctagcaaacttaacgagaattactgtcgaaaccctgatgatgatgcacatgggccgtggtgctatacagggaacccactgatcccctgggactattgcccaatttccaggtgtgagggggatactactcccacgatagtaaatctcgatcacccagtcatttcatgtgccaaaacaaaacaactgagagttgttaacggaattccgactcgaaccaatattggctggatggtaagcctgagatacagaaataagcacatctgtggaggtagtctgatcaaagagagctgggtgctgacagccaggcagtgtttccccagcagggatctgaaagattatgaggcctggctcgggattcacgatgtccacggacgcggcgacgagaagtgcaaacaggtcttgaatgtcagccagctggtgtatggacctgagggcagcgacctggtcctaatgaagctggcgcggccagcggtcctggatgactttgtatcaaccatcgacctgccaaactatggatgtaccatccccgagaagacgtcgtgctccgtgtacggatggggctacaccgggcttatcaactacgacgggctgctcagagttgcacacctgtatattatggggaacgagaagtgttctcagcaccacaggggtaaggtgactctgaacgaaagtgaaatctgtgccggtgccgaaaagatagggtccggaccttgcgaaggggactatggtggccctttggtgtgtgaacagcataaaatgagaatggtgctgggcgtcatcgtaccagggcggggatgtgctatacctaatcgccccggcatctttgtcagggtcgcctattacgctaaatggattcacaagattattttgacctacaaggtgccccaaagc

SEQ ID NO: 13648 - DNA, 2184 bp, synthetic construct
  misc_feature 1..2184: note = source = /note="Description of Artificial Sequence: Synthetic coding sequence"
  source 1..2184: mol_type = other DNA
atgtgggttacgaaactcctgcctgcgctgctcctgcagcatgtgctcctgcatctccttcttcttccaattgcaattccttacgcagaaggccaacgtaagaggaggaacaccatccatgagttcaagaagtcggcaaagactactctgattaagattgaccctgcacttaagatcaagaccaagaaggtcaacacggctgaccagtgcgcaaaccgatgtactaggaacaaaggtctgccttttacctgtaaggcattcgtctttgataaagcaagaaaacaatgtctgtggtttccttttaactcgatgtcaagcggggtgaagaaggaatttggtcacgaattcgacttgtacgaaaacaaggattacattcggaattgcattattgggaaaggtagatcgtacaagggaaccgtttcgataactaagtcaggaataaagtgtcaaccttggagctccatgattccacatgaacattcatttctcccgtcctcctacagggggaaggatctccaagagaactactgtaggaaccctcggggtgaggaaggtggtccctggtgttttacctcgaacccggaagtccgctacgaagtctgtgacatccctcagtgttcggaagtggaatgcatgacgtgtaacggggaatcctaccgtggactgatggaccacaccgagtccggaaagatctgtcagcgttgggatcaccagaccccacatcgccacaagtttcttcccgaacgttaccctgacaagggattcgatgacaactattgtcggaatcctgatggccagccacgcccttggtgctatactcttgacccacacaccagatgggaatactgtgccattaagacctgcgcagataacactatgaacgacaccgacgtgcctcttgagactaccgaatgtattcagggccaaggtgaaggataccgcggaaccgtgaacaccatatggaacggaattccatgtcaacggtgggactcgcagtacccgcatgaacatgatatgactcccgaaaacttcaaatgcaaggacttgcgcgaaaactactgtagaaacccagatggctccgaatcaccttggtgttttacgactgatcctaacatccgcgtcgggtactgttcacagattcctaattgcgatatgagccacggtcaagactgctaccgtgggaatggcaagaattacatggggaacctcagccagactcgttcaggactgacttgtagcatgtgggacaaaaacatggaagatctgcacaggcatatcttctgggaaccggatgccagcaagttgaatgagaactattgccgaaatcccgatgatgatgcgcatggaccgtggtgttatacgggtaatccccttattccttgggactactgcccaatttcgcggtgcgaaggtgataccactcctaccatcgtgaatttggatcatccagtgatttcctgtgcaaagactaaacaacttcgggtggtgaacggaataccaacccggaccaacattgggtggatggtgtcactgaggtacaggaacaagcatatctgtgggggatcacttatcaaagagtcgtgggtgctgaccgcacggcagtgtttcccctccagggacctcaaggattacgaagcatggcttggtattcacgacgtgcatggaagaggagatgaaaagtgtaagcaggtgcttaacgtgtcacaactggtgtacggtcctgaaggctcggatcttgttctgatgaaacttgcacgacctgccgtcctcgatgattttgtctccacgattgatcttcccaactacggctgtacgatacctgagaaaacctcatgctcagtgtacgggtggggttacactggactgatcaactacgacggcctccttagagttgcccatctgtatatcatgggaaacgaaaagtgttcgcagcatcaccgagggaaggtgactttgaatgagagcgagatttgcgccggagcagagaaaatcggctccggaccttgtgaaggggattacggaggcccacttgtgtgtgaacaacacaagatgaggatggtgcttggtgtgattgtgcccggtagggggtgtgcaattcctaatcgtcccggtatcttcgtgagggtcgcgtactacgcgaaatggattcacaaaatcattctgacctacaaggtgcctcaatcc

SEQ ID NO: 13649 - DNA, 2184 bp, synthetic construct
  misc_feature 1..2184: note = source = /note="Description of Artificial Sequence: Synthetic coding sequence"
  source 1..2184: mol_type = other DNA
atgtgggtcactaaactccttccagcacttttattacaacacgtcctcttgcacttgcttttgcttccaattgctataccatatgcagaggggcaacgtaaacgtagaaatactatccatgaatttaaaaagtccgctaaaactacgcttattaaaatcgatcccgcactcaaaattaagactaaaaaagttaatactgcagaccagtgtgctaacagatgcacgagaaacaaagggttaccatttacatgtaaagcgttcgtcttcgataaagcaagaaaacagtgtttgtggttccccttcaattccatgtcctctggggtgaaaaaagagtttggacacgagttcgatctctacgaaaataaagactatattaggaattgcattatcggaaagggtagaagctacaagggaactgtgtcaattacaaaaagcggtataaagtgccaaccctggtctagcatgattccgcacgaacatagtttcttgccaagctcttatcgtggaaaggacttgcaagaaaattattgtcgaaaccctcgaggagaagaaggcggcccatggtgctttacttcgaatcctgaagttagatacgaggtgtgtgacattccacagtgttcagaggttgagtgtatgacttgtaatggtgaatcatatagaggtcttatggatcatacagaaagtggaaaaatttgccaacgttgggatcaccagactcctcatagacataaatttcttcccgaacgatacccggataaagggttcgacgataattactgtcggaatccggatgggcaaccacgtccgtggtgttacacattagatcctcatacgcgctgggaatattgcgctatcaagacatgcgctgacaatacaatgaatgatacggatgtcccacttgagactaccgaatgtatccaagggcaaggtgaaggctatcgaggaacagttaatactatctggaacggtattccatgtcaacgctgggattctcagtatccacatgagcacgacatgacgcctgagaactttaagtgcaaagacttacgggagaattattgtcgaaatcctgatggatctgaaagcccatggtgttttaccacagacccaaacattcgggtgggatactgctctcaaatcccaaactgcgatatgtcacacggacaagattgttatcgaggtaatgggaagaattatatgggaaatctttcgcaaaccaggtcaggactaacatgctctatgtgggataagaatatggaagatctacaccgacatatattctgggaaccagacgcgtccaaacttaatgaaaactattgcagaaatccagatgacgatgctcatggtccgtggtgctatacaggaaatccacttatcccatgggactactgccctatcagtcgatgcgaaggagatacgacacccacaatagtcaatcttgatcatcccgtgatttcctgtgcaaaaactaaacagcttagggtggtgaacggtataccaacaagaaccaatatcggttggatggtgagtctccgatatcgcaataagcatatctgcggaggcagtctcattaaggagtcttgggttcttacggcacggcaatgttttccgtccagagacctgaaagattatgaagcttggttaggcatacacgatgttcatggacgtggggacgagaaatgtaagcaagttttaaatgtgtcgcagctcgtgtatggaccagaaggttctgatctggtgctaatgaagcttgcgcgtccagcagtgcttgacgactttgtatccactattgatttaccaaattacggttgtacaataccagagaaaacaagctgcagtgtttatggatggggttataccggattgattaattatgatggtctcttgcgtgttgcccatttatacatcatgggaaatgaaaaatgctcacagcatcacagaggaaaggtgactcttaacgaatctgaaatttgcgcaggagctgaaaagattggttctggaccttgcgagggtgattacgggggtcctctggtttgtgagcagcacaagatgagaatggtgctgggagttattgtgcccgggagaggctgtgccatccctaaccgtcccggtatctttgtaagggtcgcttactatgcgaagtggatacataaaatcattcttacatataaggtcccacaaagt

SEQ ID NO: 13650 - DNA, 2184 bp, synthetic construct
  misc_feature 1..2184: note = source = /note="Description of Artificial Sequence: Synthetic coding sequence"
  source 1..2184: mol_type = other DNA
atgtgggtgaccaagctccttcccgcgctcttgttgcaacacgttcttctccatctgctcctcctgcccattgccataccatatgctgagggccagagaaaaagacgaaacacaatacacgaatttaaaaaatccgcaaagaccaccctgatcaagatcgatcctgcactcaagataaagacaaaaaaggtaaacactgcagaccagtgtgccaatagatgcacgaggaataagggccttccctttacttgtaaggccttcgtcttcgacaaggctcggaaacagtgtctctggttcccctttaattcgatgagttctggagtaaaaaaggagtttggccacgagtttgacctatatgaaaataaagattacattcgcaattgcattatcggcaagggccgctcttacaaagggaccgtttcaatcactaagtcaggtattaagtgccagccttggagctctatgataccacacgagcacagtttccttccttcctcctaccggggcaaggacttacaggagaactactgtcggaacccaagaggggaggagggaggaccatggtgcttcacaagtaatcctgaagtgaggtatgaagtctgtgacatccctcagtgcagtgaggtggagtgcatgacgtgcaacggcgaatcttatcggggcctcatggaccacactgagtccggtaaaatctgccaacgttgggaccatcagacgcctcatagacataagttcctccctgaacgctaccctgacaagggatttgatgataactactgtcgcaacccggatggtcagcccaggccttggtgctatacactggatccccacacgcggtgggagtactgcgcaataaaaacgtgtgcggacaataccatgaacgacacagatgtacccctggagaccaccgaatgtatccaaggtcagggtgagggctatagaggaactgtcaacaccatttggaatggcataccatgtcagcgatgggattcgcagtacccacatgagcacgacatgacaccggagaatttcaagtgcaaggaccttagggaaaactattgccgcaaccccgatggtagcgagagtccttggtgcttcaccacagaccccaatattagggtaggctactgtagccagatcccgaattgcgatatgtctcatggccaggactgctacaggggcaacggcaagaattacatgggtaacctgtcacagacgcggtccggtcttacatgttcaatgtgggacaaaaatatggaggatctccataggcacatcttctgggagcctgacgccagcaagctcaacgagaactactgtcgcaaccctgacgacgacgcccacgggccttggtgttatacagggaatccattgatcccatgggactattgtcctatctcgcgctgtgagggcgacaccactcctaccattgtgaacctggatcatcccgtcatctcctgcgccaaaaccaagcaactgagagtagtgaatggcatcccgactaggaccaatatagggtggatggtgtcactgaggtacaggaacaaacacatttgcggtggaagcctgatcaaggagagttgggtcctaactgcgcggcaatgtttcccaagtcgggatctgaaagattatgaagcctggctgggcatccatgacgtgcatgggaggggggatgagaagtgtaagcaggtgctaaatgtttcacagctggtatacggtccagaaggaagtgacctcgtgcttatgaagctcgcccgccctgcagtgctggacgatttcgttagcacaatcgatctgccaaactatggctgcactatcccagagaagaccagctgcagcgtttatggttggggctacacaggattaattaattacgacggtctgctgagggtggcccatctgtacatcatgggcaatgaaaaatgttcccagcaccaccgtgggaaagtaaccctaaatgagagcgagatctgcgccggcgccgagaagattggtagcggaccctgtgaaggtgattacggcggccctttggtgtgtgagcaacacaagatgaggatggttctaggggtgattgtgcctgggcgcggatgtgccattccaaatagaccagggattttcgtgagagttgcgtattatgcgaagtggatacacaagatcatcctgacgtataaagtgccacaatcg

SEQ ID NO: 13651 - DNA, 2184 bp, synthetic construct
  misc_feature 1..2184: note = source = /note="Description of Artificial Sequence: Synthetic coding sequence"
  source 1..2184: mol_type = other DNA
atgtgggttaccaaacttttaccagcattattattacaacatgtattacttcatcttttattactaccaattgctattccatatgctgaaggacaacgaaagagaagaaatactattcatgaattcaaaaaatcagctaaaacaactttaattaagattgatccagcattaaaaataaaaactaaaaaagttaacacggctgatcaatgtgcaaatagatgtaccagaaataaaggtttaccatttacttgtaaagcatttgtttttgacaaagcacgaaagcaatgtttatggtttccatttaattctatgtcatcaggagttaaaaaagaatttggacatgaatttgatttatatgaaaataaagattatataagaaattgtattattgggaaaggtagaagctataaaggtacagtttcaataacaaaatcaggtattaaatgtcaaccatggtcttcaatgatacctcatgaacattcatttttgccttcaagttatagaggaaaagatttacaagaaaactattgtagaaatccaagaggagaagaaggaggaccatggtgttttacctctaatccagaagttagatatgaagtatgtgatataccacaatgtagtgaggttgaatgtatgacatgtaatggagaatcatatcgtgggttaatggatcatactgaaagtggtaaaatttgccaaagatgggatcatcaaactccacatcgacataaatttcttccagaaagatatccagataagggatttgatgataactattgtcgtaatccagatggacaaccaagaccttggtgttatactcttgatcctcatactcgatgggagtattgtgctattaaaacatgtgctgataatacaatgaatgataccgatgtaccacttgaaacaacagaatgtattcaaggacaaggagaaggatatagaggaactgtaaatacaatttggaatggaattccatgtcaaagatgggactcacaatatccacacgaacatgatatgaccccagaaaatttcaagtgtaaggatttaagagaaaattattgtagaaatcctgatggaagtgaatcaccatggtgttttacaacagatccaaatattagagtaggttattgtagtcaaattccaaattgtgatatgtcacatggtcaagattgctatagaggaaacggaaaaaattatatgggaaatcttagtcaaactagatcaggattgacatgttcaatgtgggataaaaatatggaagatcttcatagacatattttctgggaaccagatgcttctaaattaaatgaaaattattgtagaaatccagatgatgatgcacatggaccttggtgttatacaggtaatcctttaattccatgggattattgtccaatatcaagatgtgaaggagatacaacaccaacaatagtaaatttggatcatccagtaatttcatgtgcaaaaactaaacaattaagagttgtaaatggaatcccaactcgaactaatattggatggatggtaagtttgagatatagaaataaacatatttgtgggggaagtcttattaaagaaagctgggttcttactgccagacaatgtttcccatcaagagatcttaaagattatgaagcatggttaggtattcatgatgttcacggaagaggagatgaaaaatgtaagcaagttttaaatgttagtcaattagtatatggaccagaaggatcagacttagttcttatgaaattagcaagaccagcagttttagacgattttgttagtactatagatcttccaaattatggatgtacaattccagaaaaaacaagttgttcagtatatggatggggatacacaggtcttatcaattatgatggactacttagagtcgctcatttatatattatgggaaatgaaaaatgtagtcaacatcatagaggaaaagtaactttaaatgaatcagaaatttgtgctggtgcagaaaaaataggtagtggaccatgtgaaggagattatggaggaccattagtttgtgaacaacataagatgagaatggttcttggagtaatagtaccagggagaggatgtgcaattccaaatagaccaggtatttttgttagagtcgcatattatgcaaaatggattcataagattattttaacttataaggttccacaaagt

SEQ ID NO: 13652 - DNA, 2184 bp, synthetic construct
  misc_feature 1..2184: note = source = /note="Description of Artificial Sequence: Synthetic coding sequence"
  source 1..2184: mol_type = other DNA
atgtgggtgactaagctgcttcctgcacttcttctccaacacgtgctgctccaccttttgctgctgccaattgcaattccctacgccgaaggacaacgtaagagacggaatacgatccatgagtttaagaaatcagcaaaaaccacgctgataaagattgaccctgccctcaaaatcaaaactaagaaggttaatactgcagatcaatgcgccaatagatgtacgcggaataagggacttcctttcacctgtaaagcgtttgtctttgacaaggcacggaaacagtgtctgtggtttccatttaactcgatgagctcgggtgtgaagaaggaatttgggcatgaattcgacctgtatgaaaacaaagattacataaggaattgcatcattggaaagggaagatcgtacaagggtactgtatctatcaccaagagcggaattaagtgtcagccatggtcgagcatgatcccacatgagcattccttccttccctcctcctaccgggggaaggatcttcaggaaaactactgcagaaatccacggggcgaggaaggtggcccttggtgttttacctcgaaccccgaggtgaggtacgaggtgtgtgacatcccgcaatgctcggaggtggaatgcatgacttgtaacggcgagagctaccggggcctcatggatcacactgaatctggtaagatttgtcagaggtgggatcaccaaaccccgcatagacacaaatttcttcctgaacgttacccagacaaaggattcgacgataactattgtagaaatccagatggccagcctagaccttggtgctacactcttgacccacacactcgttgggagtactgcgccatcaagacctgcgccgataacactatgaacgataccgacgtcccccttgaaactactgaatgcatccaaggtcagggagagggatatcgcggaactgtgaataccatctggaatggcatcccatgtcaacgttgggatagccagtaccctcacgaacacgatatgaccccagaaaacttcaagtgtaaggatctgcgtgagaactattgtcgaaaccctgatggtagcgagtcaccatggtgtttcaccaccgacccaaacatccgggtcggatactgttcgcagataccaaactgcgatatgtctcatggacaagattgttaccgtggaaatggtaaaaactacatgggaaatctgtcccaaactcgttcaggcctcacgtgttcaatgtgggacaagaacatggaagatcttcacagacatatcttctgggaacctgacgcttcgaaactcaacgagaattactgtaggaatccagatgacgatgcgcacggcccgtggtgttacactggaaaccccttgattccatgggactactgcccaatttccagatgtgagggtgacaccactcccaccatcgtgaacctggaccatcctgtgatatcatgtgcaaaaactaaacagctgcgggtggtcaacggaatcccgacgagaaccaacattgggtggatggtgtcgctgagataccgaaacaagcatatttgcgggggaagccttatcaaagaatcatgggtgctgactgcacgccagtgttttccatcgagagatctgaaagactacgaagcatggctggggatacacgacgtgcatggtcgcggagatgagaaatgcaagcaagtgcttaatgtgagccagcttgtgtatggaccagagggttccgaccttgtcctgatgaagctggccaggccggcagtgcttgatgatttcgtgtccactattgatctcccaaactacggctgtaccattcctgagaaaaccagctgtagcgtgtacggctggggctacaccggtctgatcaactatgatggacttctcagggtggcacatctttacatcatgggtaacgaaaagtgttcccaacaccatcggggaaaggtgactcttaacgagtcggagatatgcgccggagcagaaaagattggttcaggaccatgtgaaggagattacggaggtcctctggtgtgcgaacaacacaagatgcgcatggtcttgggtgtgattgtgcctggccgcggttgtgcgatcccaaaccgtccaggtatattcgtccgtgtggcatactacgcaaagtggattcataagatcattctgacctacaaggtcccacaatcg

SEQ ID NO: 13653 - DNA, 2184 bp, synthetic construct
  misc_feature 1..2184: note = source = /note="Description of Artificial Sequence: Synthetic coding sequence"
  source 1..2184: mol_type = other DNA
atgtgggtgactaagctgcttcctgccctgctgctccagcatgttcttctgcaccttctgctgctgccaatagcaattccatatgcagaaggccagagaaagcggaggaatactatccacgaatttaagaagagcgccaagactaccctgattaaaatcgacccagctcttaaaataaagaccaagaaggtgaacaccgccgaccagtgtgcaaacagatgcacacggaacaagggactgcctttcacctgcaaggcctttgtctttgacaaggccaggaagcagtgcctctggttcccgttcaactccatgtctagcggtgtgaagaaggaatttggtcacgagttcgatctgtatgagaacaaagactatattagaaattgtattataggcaagggcagaagctacaagggaactgtctctattactaagagcggaataaaatgtcaaccttggtcctcaatgattccccacgaacacagtttccttccttcctcttaccgcggcaaggatctgcaggaaaattattgtaggaatccccgcggcgaagaaggagggccttggtgtttcacaagcaatcccgaggtgcggtacgaagtctgcgatataccccagtgcagcgaagtcgagtgtatgacttgtaacggtgagtcatacagaggccttatggatcacaccgaatccgggaagatctgtcagagatgggaccaccagactcctcaccgccacaaattcttgcccgaacggtaccctgacaaaggtttcgatgataactactgcaggaatcccgatggtcagccccggccctggtgttacacgctggatcctcacaccaggtgggaatattgtgctattaagacgtgtgccgacaacaccatgaacgacaccgacgttcctcttgaaacaactgaatgcatccaggggcaaggcgaggggtatcggggcacagtaaataccatatggaacggtattccctgtcagaggtgggatagtcagtatcctcacgagcacgatatgaccccggagaacttcaagtgtaaagacctgcgggaaaattactgtagaaatcccgacggctcagagagcccctggtgcttcacaacagatccgaacataagagttgggtactgtagccagatacccaactgtgatatgtcccacggacaggactgctatcgcgggaatggaaagaattacatgggcaatcttagtcagacacgctcaggactcacctgcagtatgtgggacaagaacatggaggacctgcatcggcatattttttgggagccagacgctagcaagcttaatgagaattattgcaggaacccagacgacgatgctcacggcccatggtgttataccgggaatcccctgatcccttgggattattgtcctatatctcggtgtgaaggtgacaccacccccacgatcgttaatctggaccacccagttataagttgcgccaagacgaaacagctgagagttgttaacggtatccccacgagaaccaacattgggtggatggtctccttgaggtaccggaataagcacatttgtggcggttccctcattaaagagtcatgggtgctgacggctcgacagtgcttcccatctagagacctcaaggattacgaggcttggctggggattcacgacgtccacggccgaggggacgagaagtgcaaacaggtgctgaatgtgagccagctggtgtacggacctgaaggctcagatctcgtgctcatgaagctcgcacgccccgccgttttggacgactttgtcagcaccatcgacctgccaaactacggatgcactattcccgaaaagacatcttgtagcgtgtatgggtggggatacaccggcctgattaattatgatggattgcttcgagtagcccatctttatattatgggcaatgaaaaatgttctcagcatcaccgaggtaaggtgaccctgaacgagtccgagatatgcgctggggctgaaaagataggctctggaccatgtgaaggcgactacggcgggcctcttgtgtgcgagcaacataagatgaggatggtcctgggagtgatcgtgccagggaggggatgcgcgataccaaatagacctggaattttcgttagagtggcatattacgcaaagtggattcacaaaattatcctcacctacaaggtgcctcagagt

SEQ ID NO: 13654 - DNA, 2184 bp, synthetic construct
  misc_feature 1..2184: note = source = /note="Description of Artificial Sequence: Synthetic coding sequence"
  source 1..2184: mol_type = other DNA
atgtgggtgaccaaactgctgccagcactgctgctgcagcacgttctgcttcatctgttgctcctgccgatcgctattccgtacgcagagggacagcgcaagcgccggaacaccatccacgagttcaagaagtccgctaagacgaccttgattaagatcgaccctgctctgaagataaagacgaagaaagtgaacactgccgaccagtgtgccaacagatgcacccggaacaaagggctgccgttcacttgtaaagccttcgtgttcgacaaggcccggaaacaatgcctgtggtttccatttaactcaatgtcgtccggtgtgaaaaaggagtttggtcacgagttcgacctgtacgagaataaagactacatccgcaattgcatcattggtaaaggacgctcgtacaaaggaactgtctcgatcactaaatcgggcatcaagtgtcagccttggtcatcaatgatcccgcacgagcacagcttcttgcccagctcttaccgcggaaaagacctgcaggagaactactgtcgcaacccgcggggagaagagggaggcccgtggtgctttacttccaatccagaagtgaggtacgaggtgtgcgacatcccgcagtgctccgaggtggagtgcatgacctgtaacggagagagctaccgcggactgatggaccacaccgaaagtggaaagatctgccagcgctgggaccaccaaaccccccatcgccacaaattcctgccagagagatacccagacaaagggtttgacgataactattgcagaaatccagatggacagcctaggccatggtgctacaccctcgacccgcacaccaggtgggaatactgcgcaatcaaaacttgtgccgataacactatgaacgacaccgatgtacctctggaaaccaccgagtgcatccaaggacagggagagggatacagaggcactgtcaataccatttggaacggaattccctgtcagagatgggactcgcagtatccacatgagcacgacatgactccagaaaacttcaagtgtaaggacctgagagagaattactgtcgaaacccggacggatctgagtcgccctggtgcttcacgactgatccgaacattagagtcggatactgttcgcagatcccaaactgcgatatgtcgcatggtcaggactgttaccgggggaacggtaagaactatatgggaaatctttcgcagacgcggtcgggtcttacctgctccatgtgggataagaatatggaagatctgcacagacacatcttctgggaaccggacgcgagcaagctgaatgaaaactattgtaggaacccggatgatgacgcgcatggaccctggtgttacacgggcaacccactgatcccctgggattactgcccgatctcgcggtgtgagggcgatactacccctaccatcgtgaatctcgaccatccagtcatctcgtgcgcaaaaaccaaacagctgcgcgtggtcaacggcatcccgaccaggacgaacatcgggtggatggtgtcactgcggtacaggaacaagcacatttgtggagggtccctgatcaaagaatcatgggtgctcaccgctcggcaatgcttcccatcgagagacttgaaggactacgaggcgtggttggggatccacgacgtgcacggacggggcgatgagaagtgtaagcaggtgctcaatgtctcccagctcgtgtacggacccgagggctcggatctcgtgctgatgaagctggccagaccggcagtgctcgacgacttcgtgagcactatcgatctgcccaattacggctgtactatcccggaaaagacttcatgctctgtgtacggatggggctacacggggctgatcaattacgacgggcttctgcgcgtggcgcatctgtacatcatgggaaacgagaaatgctcccagcatcacagaggaaaggtgactcttaatgagtcagaaatctgtgccggagcggaaaagatcggctctggaccatgcgaaggcgattacggagggccgctcgtctgcgagcaacacaagatgcgcatggtgctgggcgtgatcgtcccgggaagagggtgcgcaatccctaaccgcccgggtattttcgtcagagttgcctactacgcaaagtggattcacaagattatccttacctacaaggtccctcagtcc

SEQ ID NO: 13655 - DNA, 2184 bp, synthetic construct
  misc_feature 1..2184: note = source = /note="Description of Artificial Sequence: Synthetic coding sequence"
  source 1..2184: mol_type = other DNA
atgtgggtgaccaagctgctgcccgccctgctgctgcagcatgtgttgctgcacctgctgcttctgccgatcgcgatcccgtacgcggagggacagcgcaagagaagaaacactatccacgaattcaaaaagtcagctaagactactctgatcaagatcgacccagcactgaagatcaagactaagaaagtgaacaccgcggaccaatgcgccaataggtgcactcggaacaagggcctgcctttcacctgtaaggccttcgtgttcgacaaagcccgaaaacagtgcctgtggttcccctttaactcaatgtctagcggagtgaaaaaagagttcgggcacgaattcgatctgtacgagaataaggactatatcaggaactgtatcatcggcaagggacgcagctacaaggggaccgtttccattaccaagtcaggaatcaagtgtcagccatggtcctcgatgatcccacacgaacactcattcttgccgtcaagttatagagggaaggacctccaggagaattactgcagaaatccgcgaggagaggaaggaggaccttggtgtttcactagcaatccagaggtcaggtacgaggtttgtgacatcccacaatgctccgaggtcgagtgcatgacctgcaacggcgagtcatacagaggactcatggatcataccgagtcagggaaaatctgccaaagatgggaccaccagaccccgcaccggcataagttcctcccggagcggtacccagacaagggctttgacgacaactactgccggaaccctgatggtcagccaaggccgtggtgttacactctcgatccgcacactcgctgggagtactgtgcaattaagacttgcgcggacaataccatgaatgacaccgatgtaccgctggaaactactgagtgcatccagggtcaaggagaaggctataggggtaccgtcaacactatctggaacggaatcccttgccaacgctgggatagccaatacccgcacgagcatgatatgactcctgaaaacttcaaatgcaaggatctgcgcgagaattactgtaggaatccggacggctccgaatccccctggtgcttcaccaccgacccaaatatccgggtcggatactgcagccaaatcccgaattgcgacatgtcacacggacaagactgttatagaggcaacggaaagaactacatgggaaacctcagccagactaggtcggggctgacctgttcgatgtgggacaagaatatggaagatttgcacagacacatcttctgggaaccggacgcatcgaagctcaacgaaaactactgccgcaacccagatgatgacgctcacggaccatggtgctatacgggaaatccactcatcccgtgggactattgccctatttcgcgatgcgagggggatactacgcctaccatcgtcaatctggatcatccggttattagctgtgcaaagactaagcaactgagagtggtcaacggaatcccgactaggaccaatatcggatggatggtgtcgctgcggtacaggaacaagcacatctgcggtggttcactgattaaggagtcatgggtcctgaccgcgcgccagtgcttcccctccagagatctgaaggattacgaggcctggctgggaatccatgacgtccacggacggggcgacgagaagtgtaagcaagtcctgaacgtgtcgcagctggtgtacggaccggagggctctgacctggtgctgatgaaactcgctcggcctgccgtgctggacgactttgtgtcaaccatcgatctccccaattacggatgtacgatcccggaaaagacctcatgttcagtgtacggatggggatacactgggcttatcaattacgatggactgctccgcgtggcgcacttgtacatcatgggcaatgagaagtgctcccagcatcatcggggaaaggtgacccttaacgaatccgaaatttgcgcaggcgcagagaagattggatcgggtccatgcgagggagactacggcggcccactggtgtgtgaacaacacaagatgcggatggtcctcggagtcatcgtcccaggacgcggctgtgctatcccaaaccgccccggaatcttcgtgcgcgtcgcctactacgccaaatggatccacaaaatcattcttacctacaaggtgccgcagtcc

SEQ ID NO: 13656 - DNA, 2184 bp, synthetic construct
  misc_feature 1..2184: note = source = /note="Description of Artificial Sequence: Synthetic coding sequence"
  source 1..2184: mol_type = other DNA
atgtgggttacgaaattattacccgcactgctcctacaacacgtgctccttcacctactgttactgcccattgccattccctatgccgaaggacagcgcaaacgtcgtaacaccatccacgagttcaaaaaatcagccaagaccacccttataaagattgaccccgcccttaagattaagactaagaaagtgaatactgcagatcaatgcgccaatcggtgtacccgcaacaaaggcttacccttcacctgcaaagccttcgtcttcgataaggcgcggaagcagtgcctgtggttcccctttaactccatgagcagcggggtgaaaaaggagtttggacatgaattcgatctctacgagaacaaggattacatcaggaattgcattatcggcaagggccgctcttataagggcaccgtctcgataacgaaaagtggtataaaatgtcaaccgtggagtagcatgattccgcatgagcatagctttctaccttcatcttaccgtggtaaggatctgcaggagaactattgcaggaatcccaggggcgaggagggcggcccctggtgcttcacctcaaaccccgaggtgcggtatgaagtctgtgatatcccacagtgtagcgaggtcgagtgtatgacttgcaatggcgagtcttaccgaggactcatggaccatacagaatcagggaagatttgccagcgctgggaccatcagactccacataggcataagttcttgcctgagcgctaccctgataagggatttgacgacaactactgccgtaatccggatggacagccccgcccatggtgttatacgctggacccgcacaccagatgggaatactgcgccattaagacttgcgccgacaacaccatgaacgacaccgatgtgcccctggagactactgagtgtattcagggccagggcgagggatatagaggtacagtgaacaccatttggaatgggataccttgtcagagatgggactcccaatacccacatgagcacgacatgacacctgagaatttcaagtgtaaggatctccgagaaaattactgtaggaacccggatgggtctgaatcaccctggtgcttcactacagatccaaatataagagttggatattgctctcagattccaaattgcgacatgtcacacggtcaggactgctaccgcggcaatggcaagaactatatggggaatttgagtcaaacaaggtccgggctgacctgttctatgtgggataaaaacatggaggacctgcacagacatatattttgggaacctgatgcttctaagttgaatgaaaattactgccggaaccctgatgacgacgcccacggcccttggtgctataccgggaatcctctgatcccctgggactattgtccgatcagccgatgtgaaggggataccacgcctacaatcgtgaatctggatcacccagtgatttcgtgtgctaagactaagcagctcagggtggtcaatggcataccaacccggaccaatattgggtggatggtgtcgctgcggtatagaaataaacatatttgcgggggttcgctcatcaaggaatcctgggtcctgacagcccgtcaatgctttccatcaagagatctcaaagactatgaggcctggttgggtatacatgatgtccacggaaggggagatgaaaagtgtaaacaagtactgaacgtgagccagctggtgtacggccctgaaggcagtgatctagtgctgatgaagttggcacgccccgctgtgctggatgacttcgtaagcacaattgacttgcccaattatggttgcaccatccccgagaagacctcttgcagtgtttacgggtggggatacaccggcttgattaattatgacggcctgctccgtgtcgcgcacttgtacatcatgggcaatgagaaatgttcgcagcaccaccgaggcaaggtcacactcaacgaatcagaaatttgtgccggcgcagaaaaaattggatcaggtccatgcgaaggagactatggtgggcccttggtttgtgagcagcataagatgaggatggtcctgggggtcatcgtccctggtagaggctgcgccattcctaaccgtccaggtatatttgttagggtcgcctactatgcgaaatggatccacaagattatcttgacctataaagtacctcagtcc

SEQ ID NO: 13657 - DNA, 2184 bp, synthetic construct
  misc_feature 1..2184: note = source = /note="Description of Artificial Sequence: Synthetic coding sequence"
  source 1..2184: mol_type = other DNA
atgtgggtaaccaagttgttgcctgctctgcttctgcagcacgtccttctgcacctgctgctgctgcccatcgccattccatacgccgagggtcagcggaagcgaaggaataccatccacgagttcaagaagagcgcgaagactactctcattaaaatcgacccggccctcaaaatcaaaacaaagaaggtcaatacagccgatcagtgcgcaaatcgatgtactagaaacaaaggtctccccttcacctgcaaggcattcgtgtttgataaggccaggaaacagtgcctgtggttcccctttaattccatgagctccggcgtgaagaaggaatttggacacgaatttgacttgtatgagaataaagactacatacggaactgcatcatcggaaaaggccgctcttataagggtacagtcagcatcacgaagtccggaattaagtgccagccctggagctctatgattccccatgagcactcctttctgccttccagttacaggggtaaagatttgcaggagaactactgtagaaaccctcggggagaagagggcgggccttggtgcttcacctccaatccagaagtcagatatgaggtctgtgacatcccgcagtgctcagaagtcgaatgtatgacttgcaatggcgagtcctatcgcggactcatggatcatacagaaagtggcaagatttgtcagcggtgggaccaccagactccgcaccgacataaattcctccccgagcggtaccccgataaggggtttgatgataattactgccgcaacccagatggtcagcctagaccatggtgttatacattggatccccacacacgctgggaatattgtgcgatcaagacatgcgccgataacacaatgaacgacaccgacgtaccactcgagacaaccgagtgcatacaggggcagggcgagggctacaggggtactgtaaatacgatatggaacggcattccctgtcaacgatgggatagccagtacccccacgaacatgatatgactcccgagaatttcaagtgcaaagacctcagggagaattactgcagaaatccagatggcagtgagtccccctggtgttttacaactgacccaaatatcagagttggatactgctctcagatccccaactgtgacatgtcccacggtcaggattgctaccgggggaacggaaaaaattatatgggaaatctctcccagaccaggtcaggactgacctgttccatgtgggataagaatatggaagatttgcaccgacatatcttctgggagcccgatgcctccaagctcaacgaaaactactgtaggaatcccgatgacgatgcccacggaccctggtgttatacaggaaaccccctgattccctgggactactgcccaatttccagatgcgagggcgataccacaccaaccattgtgaacctggaccacccagtgatttcctgcgcaaagacaaagcaactgcgggtggtgaatggaatacctactagaaccaatattgggtggatggttagtctcaggtatagaaacaagcacatctgtggtgggtctttgatcaaagaaagctgggtgctcaccgcccgacagtgcttcccttctcgcgatcttaaagactacgaggcctggttgggtatccacgatgttcacggtcggggggacgagaaatgtaagcaggttctgaatgtctcacagctcgtatacggaccagaggggtctgatctcgtgctcatgaagctcgccagaccagctgtccttgatgatttcgtgagtactatcgatctgcccaattatggttgtaccatcccagaaaagacatcttgtagcgtgtacgggtggggttatacagggctgatcaattatgatggcttgctgcgcgtagctcacctgtacatcatggggaacgagaagtgctctcagcatcatagaggcaaagtgacactcaacgaaagtgagatttgtgcaggtgccgagaagatcggttccggcccatgtgagggggattatggcgggcctctcgtttgcgagcaacataagatgaggatggtcctgggcgtcatcgtaccgggccgggggtgtgcaatccccaaccggccaggcatattcgttagagtggcctactacgccaaatggattcataagatcattctgacatataaggttccacagtct

SEQ ID NO: 13658 - DNA, 2184 bp, synthetic construct
  misc_feature 1..2184: note = source = /note="Description of Artificial Sequence: Synthetic coding sequence"
  source 1..2184: mol_type = other DNA
atgtgggtgaccaagttgctgcctgccttgctgcttcaacatgttctccttcatctgctgctgctccctatagccattccttacgcagaaggacagagaaaacgaagaaacactattcatgaattcaagaagtcggccaaaaccactttgattaagattgacccggcacttaagatcaaaaccaagaaggtgaacactgcagaccagtgcgcgaacagatgtactcggaacaagggtttgccattcacttgtaaggcatttgtgtttgataaggcacggaagcagtgcctctggtttcctttcaattcgatgtcaagcggcgtgaagaaagagtttggacatgaatttgacctctacgagaacaaagattacatcagaaactgcattataggaaaaggccgatcatacaagggtactgtgagcatcactaaaagcgggataaagtgtcaaccgtggtcctcaatgattcctcacgaacactcttttctgccatcttcctatcggggcaaagatctgcaagagaactactgtcgtaatcccagaggagaagaaggaggaccctggtgttttacgtcgaaccccgaggtcagatacgaagtgtgtgacatacctcaatgttctgaagtcgagtgtatgacctgtaacggggaatcgtaccgaggactgatggaccacaccgagtcgggaaagatctgtcaacgatgggaccatcagactcctcaccgtcataagtttcttccagaaaggtatcccgacaaggggtttgatgacaattactgtagaaaccccgatggacaacctcggccctggtgttacaccctggaccctcatactcggtgggaatattgcgctatcaagacctgtgccgacaatactatgaatgacaccgacgtgccactcgagactactgagtgcattcaaggtcagggagaaggttacaggggcaccgtgaacaccatttggaacggtatcccctgtcaaagatgggattcacaataccctcatgaacatgatatgactccggagaatttcaaatgcaaggaccttagagaaaactactgccgcaaccctgacggctccgaaagcccttggtgctttaccaccgatcccaatattcgcgttgggtactgttcgcaaattccaaactgtgatatgtcacatggccaagattgctacaggggtaacggaaagaactacatgggaaatctcagccagacccgctcgggattgacctgtagcatgtgggataagaatatggaggatctgcatcgacatatcttttgggaacctgacgcaagcaagctgaacgagaattactgtaggaaccctgatgatgatgcacacggaccttggtgctacactggtaacccgctgattccctgggactactgcccaatctcgcgctgcgaaggcgacaccaccccaacgattgtgaaccttgatcatcctgtgatttcgtgtgccaagaccaagcagcttagagtcgtgaacggcatccctaccagaaccaatattggctggatggtcagccttagataccggaacaaacacatttgtggcggatcgctgataaaagaatcgtgggtgttgaccgcccgacagtgtttcccgtcgagagatctcaaggactacgaagcctggctggggatccacgatgtgcatggacggggcgatgaaaaatgtaagcaggtgctcaacgtgtcgcagctggtgtacggcccagaaggcagcgatcttgtgctcatgaagctcgcacgcccggccgtgcttgacgattttgtgagcaccattgatctgcctaattacggctgcacgatccccgagaaaacgtcctgttccgtgtacggttggggatacactggactgattaactatgatggacttctgagggttgctcatctctacattatgggaaatgagaaatgtagccaacaccacagaggtaaggtcactctgaacgaatccgagatctgcgcaggtgcggagaagattggaagcggaccttgcgaaggtgattacggaggtcctcttgtctgtgagcaacataagatgaggatggtgctgggcgtgattgtgcctggacggggctgcgcaatcccgaacaggccaggtattttcgtgcgagtcgcatactatgcaaagtggatccataagattatccttacctacaaagtgccacagtcg

SEQ ID NO: 13659 - DNA, 2184 bp, synthetic construct
  misc_feature 1..2184: note = source = /note="Description of Artificial Sequence: Synthetic coding sequence"
  source 1..2184: mol_type = other DNA
atgtgggtgaccaaattgctgccagccctgctgcttcaacatgtgctgctgcatttgctgttgcttccgatcgctatcccttacgccgaaggacagcggaagcgccgcaatacgattcacgagtttaagaaatcagcaaagactaccctgatcaagatcgatcccgcactgaagatcaagacgaagaaggtcaacactgcagatcaatgtgccaatcgctgtacgcgcaacaagggattgccgttcacctgcaaggccttcgtgttcgataaggcgcgcaaacagtgtctgtggtttccgttcaacagcatgtcgtccggagtgaaaaaggaatttgggcatgagtttgacctgtacgagaacaaggactacatcaggaattgtatcatcggaaaggggcggtcctacaaaggaactgtgtcgatcactaagtccggaatcaagtgtcaaccatggtcatcgatgattccccacgaacatagcttcctcccgtcatcctaccggggcaaagatctccaggaaaactattgtcgcaaccctcggggagaggagggaggaccatggtgcttcacctccaatcctgaagtaagatacgaggtctgcgacatcccacagtgctccgaggtggagtgcatgacttgtaatggggaatcatacagaggactgatggaccataccgagtcaggaaaaatctgccagcgctgggatcaccaaactccgcaccgccataagttcctgcccgaacggtatccggacaagggcttcgatgataactactgccggaatcccgacggtcagccccggccgtggtgctacaccctggacccgcatacgagatgggagtactgcgcgatcaagacctgcgcggacaacactatgaacgacactgacgtccccttggagactaccgagtgcattcagggccaaggggagggctaccgagggaccgtgaatacgatctggaacggcatcccatgccaacggtgggacagccagtacccccatgagcatgacatgaccccggaaaacttcaagtgcaaggacctccgggagaactactgcaggaaccccgacggatcggagtcaccttggtgcttcactaccgatccgaacatccgcgtcggctactgttcccaaatcccgaattgcgacatgagccacgggcaagattgctatagggggaacggcaagaattacatgggtaatctgtcgcagacccgcagcggcctgacctgctccatgtgggacaaaaacatggaggaccttcaccgacacatcttctgggaaccagacgcttcaaaacttaatgaaaactactgccgcaacccggacgatgacgctcacggcccttggtgctacactggaaacccgctgattccgtgggactactgcccgattagccgctgcgaaggcgacactacccctactatcgtcaacctcgaccatccagtcatctcgtgcgcgaaaaccaagcaactcagggtcgtgaacggaatccctacgcggactaatatcggttggatggtttccctgagatatcggaataagcatatatgcggcgggtcactgatcaaagaaagctgggttctcaccgctcggcagtgtttcccctcccgggatctgaaggattacgaggcctggctggggatccatgatgtgcacggtcgcggagatgaaaagtgcaagcaggtgcttaatgtctcccagttggtctacggccccgaaggatccgacctggtgctcatgaagctggcacggccggcggtgctggatgacttcgtgagcaccatcgatctgcctaactacgggtgcactatccctgagaaaacttcgtgctcggtctacggatggggatacacgggattgatcaactacgatggactgttgcgcgtcgcccacctgtacatcatgggtaatgaaaaatgctcgcagcaccaccggggaaaggtgaccctcaacgaaagcgaaatttgtgccggcgcggagaagatcggttccggcccgtgtgaaggggattacggaggcccgcttgtgtgcgagcaacataagatgcgcatggtgttgggagtgatcgtgcctggacgcggttgcgcaatcccgaaccgcccggggatcttcgtgcgcgtcgcctactacgctaaatggatccataagattatcctcacttacaaggtgcctcaatcg

SEQ ID NO: 13660 - DNA, 2184 bp, synthetic construct
  misc_feature 1..2184: note = source = /note="Description of Artificial Sequence: Synthetic coding sequence"
  source 1..2184: mol_type = other DNA
atgtgggtgaccaaactcctgccagccctgctcctgcaacacgtgctcctgcatctgctgttgctgccgattgcaatcccgtacgctgagggccaacggaagagacgcaacactatccacgagttcaagaaaagcgccaagactactctgatcaagatcgaccctgcactgaagatcaagacgaaaaaagtgaataccgctgaccaatgcgcgaaccgttgtactagaaataagggattgccattcacctgcaaagccttcgtctttgacaaagcaagaaagcaatgtctgtggttcccgttcaattccatgtcatccggcgtcaagaaggaattcggtcatgagttcgacctgtacgagaataaggattacatccggaattgtattatcggaaagggccgcagctacaaagggactgtctcgattacgaagagcggaatcaagtgccagccgtggtcctcgatgatacctcatgaacactccttcctgccgtcctcctaccgcggaaaagacctccaggaaaactactgtcgcaatccccggggggaggaaggaggcccgtggtgtttcacctcgaatccagaagtcagatacgaggtctgcgacatcccgcaatgctcggaagtcgaatgcatgacgtgcaatggcgaatcctaccgcggcctcatggaccataccgagtccggcaagatctgccagcggtgggaccaccagactcctcaccgccacaaatttctccctgaaagatacccggacaaaggtttcgatgacaattactgccggaaccctgacggacaacctcggccgtggtgttataccctcgacccgcacacccgctgggaatactgcgcaatcaagacctgcgcagacaacactatgaatgatacggacgtgcctctggagactactgagtgtattcaaggacagggcgaaggataccgggggaccgtcaacactatctggaacggaatcccgtgccagcgctgggacagccagtatccacacgaacacgacatgaccccggaaaacttcaagtgcaaagacttgcgggagaattactgtcgcaacccagacggaagcgagtccccatggtgttttactactgaccccaacattcgcgtggggtactgctcacagattccgaactgcgatatgtcgcacggacaggattgctaccgggggaatggcaagaattacatgggaaacctgtctcaaactcgcagcggcctcacgtgcagcatgtgggacaaaaacatggaagatctgcatagacacattttctgggagcccgacgcttccaagctgaacgagaactactgccgcaacccggatgatgatgcgcacggtccatggtgctacacgggcaatcctcttatcccgtgggactactgcccgatctccaggtgcgagggcgatactactcctactatcgtgaacttggaccatccggtgatctcctgcgctaagaccaaacagctgagggtggtgaacggaattccgacccgcactaacattgggtggatggtttccctgcgctatcggaacaagcatatctgtggagggagcctgatcaaggagtcatgggtgttgactgcaagacagtgtttcccgtcgcgcgatctcaaggattacgaggcatggctcggaatccacgacgtgcatggaaggggagatgaaaagtgcaagcaagtgctgaatgtctcccagctggtgtacggaccggaaggaagcgacctggtgctgatgaaactcgcaagaccggcggtgctggatgatttcgtgtcgactatcgaccttcctaattacggctgcactatacccgaaaaaacgtcttgctccgtctacggatgggggtacaccggactcatcaattacgacggactgctgcgggtggcccacctttacatcatgggcaacgaaaaatgctcccaacaccatagaggcaaagtgaccctcaacgaatccgagatctgcgccggagcggagaagatcgggtccggtccttgcgagggagactacggagggcctctggtctgcgaacagcataagatgcgaatggtgctcggagtgatcgtcccgggtcggggatgcgctatccccaacagaccgggaatctttgttagggtggcctactacgcgaaatggatacataagattatcctcacctacaaggtccctcaaagc

SEQ ID NO: 13661 - DNA, 2184 bp, synthetic construct
  misc_feature 1..2184: note = source = /note="Description of Artificial Sequence: Synthetic coding sequence"
  source 1..2184: mol_type = other DNA
atgtgggtgactaagctgcttcctgcactccttctgcaacatgtgcttctccatcttctgcttctccctatcgcaattccctacgcagaagggcagagaaaaaggagaaacactatacatgaattcaagaagagcgccaagactaccttgattaagattgatccggcgctgaaaatcaaaaccaagaaggtgaatactgcggatcaatgtgcaaaccggtgtacccgaaacaaggggctcccatttacttgtaaggcctttgtgttcgataaggcaagaaaacaatgtctgtggttcccctttaacagcatgtcgtcaggcgtcaaaaaagaatttggacacgagtttgatctgtacgagaacaaggattacatcagaaactgtatcattggcaagggaagatcgtacaaaggtaccgtgtccattaccaaatcgggtattaagtgccaaccttggtcgtcgatgataccacacgagcactcatttctgccttcgtcgtacaggggtaaggatctccaggagaactactgtagaaaccccagaggagaggaagggggtccttggtgtttcacctccaatcctgaggtgcgctacgaggtgtgcgacataccccagtgttcggaagtggagtgcatgacttgtaatggggaatcataccggggacttatggaccataccgaatcaggcaaaatctgccaacgatgggatcaccagaccccccatcggcacaagttccttccagagcgttaccccgacaaaggttttgatgataactactgtcgtaatcctgatggacagccacgaccttggtgttacaccctcgaccctcatacccgctgggaatactgtgccatcaagacctgtgccgataacactatgaatgacaccgatgtccccctggagactaccgaatgtatccaaggtcagggagagggataccgcggtaccgtgaacactatctggaacggaattccttgtcaaaggtgggactcgcaatatccacatgaacatgatatgacccccgaaaactttaagtgcaaagacctgcgagagaactactgcaggaatcccgatgggtcagaatcgccttggtgttttactactgatcccaacattagagttggatactgcagccagattccgaactgtgatatgtcgcacggccaagattgttacagaggcaacggtaagaactacatgggaaacctttcacagactcgttccggattgacctgttccatgtgggataagaacatggaagatcttcatcgacacatcttctgggagcctgatgcttcgaaactgaacgagaactattgcagaaacccggacgacgatgctcatgggccttggtgctacacgggaaacccattgataccgtgggattactgtccgatatcaagatgtgagggcgacacgacccctaccattgtgaatctggatcatcctgtcatttcctgtgcaaagactaaacaacttcgggtcgtgaacggtatccctactcgcaccaacattggatggatggtcagcctgcggtacagaaacaagcacatttgtggaggctcacttatcaaggagtcgtgggtgctgaccgccaggcagtgttttccttcgcgtgatttgaaagattacgaagcgtggctcggaatccacgacgtccatggaagaggcgatgagaagtgcaagcaggtgctgaacgtgtctcaactcgtgtatggtcctgaaggttccgacctggtgctgatgaaactggcacggcccgccgttctcgatgattttgtgtcgaccatcgacctgccgaattacggatgtaccattcctgaaaagacttcctgctcggtctacgggtggggttacaccggcctgatcaattacgacggactgctccgggtggcacatctgtacattatggggaatgaaaagtgttcacagcatcataggggtaaggtcacgctgaatgagtccgaaatttgtgctggggcagaaaagattgggtccggcccttgtgagggagattacggcggacctctggtctgcgaacagcataagatgcgtatggtcctgggcgtgatcgtgccgggacgcgggtgcgcaattccaaacaggcctggaattttcgtgagagtggcatactacgcaaaatggatccacaaaatcattctgacctacaaggtaccacaaagc

SEQ ID NO: 13662 - DNA, 2184 bp, synthetic construct
  misc_feature 1..2184: note = source = /note="Description of Artificial Sequence: Synthetic coding sequence"
  source 1..2184: mol_type = other DNA
atgtgggtgaccaagctgctgccagctctactactgcaacacgttctgctgcacctcctgttgttgcccatcgccatcccctacgctgaaggacagcgaaagagaagaaacaccattcacgaattcaaaaaatccgcaaaaacaacattgataaagattgaccccgcgttaaaaataaagaccaagaaagtgaatacagccgatcaatgtgccaaccggtgtacacgaaataagggcctgccttttacctgcaaagcattcgttttcgataaagcacgcaagcagtgcttgtggtttcctttcaattccatgtctagcggagtaaaaaaggagtttggccacgagttcgacctctacgaaaacaaggactatatcagaaattgtatcatcggtaaaggacgaagttacaaaggcacggtgagcatcaccaaatccgggatcaagtgtcagccgtggagctccatgatacctcacgaacattcctttctgccaagcagctacaggggcaaggatttgcaggaaaattactgccggaacccccgaggagaggagggaggcccttggtgttttacatccaaccccgaagttcggtacgaagtatgcgacattccacagtgttctgaagtggagtgcatgacgtgtaatggagaatcctaccgaggcctgatggaccacacggagtcaggaaagatctgtcagcgctgggaccaccagaccccacatcgtcacaaattcttacctgagcggtaccctgacaaaggcttcgacgacaactattgtcgcaaccctgacggccagccccgcccctggtgctataccctggaccctcacaccaggtgggagtactgcgcgataaaaacgtgcgccgacaataccatgaatgatacagatgtgccattagaaactacagagtgcattcagggccaaggtgagggatacaggggtaccgtgaataccatttggaacgggattccttgccagcgttgggatagtcagtaccctcatgagcacgatatgactcctgagaattttaagtgtaaggacttaagggagaactattgccgaaaccccgatggttccgagtccccttggtgctttactaccgatcccaatatccgcgttggctattgtagtcagatcccgaattgtgatatgtcccatgggcaggactgctaccggggaaatggcaagaattacatgggcaacctcagtcagactagatcaggtcttacctgcagcatgtgggataagaacatggaagatctgcaccggcacatcttctgggagcctgatgcgagtaagcttaacgaaaattattgtcggaaccccgacgatgatgctcatggtccatggtgctataccggaaatcccctaatcccctgggattactgtcctattagccggtgcgagggtgatacaaccccaacaattgtgaatctggaccacccagtgatctcttgtgccaaaaccaagcagctgagggtcgtaaacgggataccgacacgcacaaatatcggatggatggtttctctgcgttatcggaataagcatatttgtgggggttcattgattaaagagagttgggtcctgacggcaaggcagtgcttcccctcacgtgatttaaaggattacgaagcatggctcggaattcacgacgtgcacggtcgtggagatgaaaagtgtaagcaggtcctcaacgtcagtcagcttgtctatgggccagaaggctcggacctggttcttatgaagctcgcccgtccggccgtcttggatgatttcgtttccaccattgacctccccaattacggttgtaccatccctgaaaagacgagctgttcggtctatggttgggggtacaccggccttatcaattatgacggcctgctgagagtcgcacacctgtatatcatgggaaacgaaaagtgctcccaacaccaccgcgggaaagtcactttaaacgagtctgagatctgtgccggcgccgagaaaataggctcgggaccctgcgagggtgactacggcgggccgctggtatgcgagcaacataaaatgcgaatggtcttgggggttatcgttcccgggaggggctgcgcaattccaaatcggcctggtatcttcgtgcgtgttgcatactacgcaaaatggattcataaaataattcttacgtacaaggtaccccaaagc

SEQ ID NO: 13663 - DNA, 2184 bp, synthetic construct
  misc_feature 1..2184: note = source = /note="Description of Artificial Sequence: Synthetic coding sequence"
  source 1..2184: mol_type = other DNA
atgtgggtgactaaacttcttcctgccctgctgctgcaacacgttctgctgcacctcctgctgctgcccatagcaattccttacgcagaaggtcaacgcaaaagaagaaatacgattcatgagttcaagaaaagcgcaaagaccaccctgatcaaaattgatcctgcacttaagattaagactaagaaagtgaataccgctgatcaatgtgctaacagatgtacccggaacaagggactccccttcacctgcaaggcctttgtgttcgataaagcaagaaagcagtgcctttggttccccttcaactccatgagctcaggagtgaagaaggaatttggtcacgagtttgatctgtacgagaacaaggactacattaggaactgtatcattgggaagggccggtcgtacaagggaactgtctcaatcaccaaatccggcattaagtgccagccatggtcgtcaatgattccacatgagcattcgtttcttcctagctcgtaccggggaaaagatcttcaggagaactattgtcgaaaccctagaggcgaagaggggggaccatggtgtttcacttccaatcccgaggtgcgctacgaggtctgtgatatcccgcaatgctccgaagtggaatgtatgacgtgtaacggtgagtcgtatagggggctgatggatcacaccgaatcaggcaagatttgtcaacggtgggatcaccagaccccccacagacataagtttctcccagaacgctaccctgacaagggctttgatgataactactgcagaaaccctgatggtcaacccaggccctggtgctataccctggatccacacactcgctgggagtactgtgcaattaagacttgcgcggataataccatgaacgacactgacgtgcctctggagactaccgagtgtattcaaggacagggcgagggataccgtggaaccgtgaatacgatttggaatggaatcccctgtcagcggtgggattcgcaataccctcatgagcatgatatgacccctgaaaacttcaaatgtaaggatctgcgtgagaattactgtaggaacccggacggatccgaatcaccttggtgcttcaccaccgatcctaacataagagtgggatactgttcgcagattccaaattgtgacatgtcgcacggacaagactgttacagagggaacggaaagaactacatgggtaacctgagccagacgagatcaggtcttacttgtagcatgtgggacaaaaacatggaagatctgcatcgacatatcttttgggaacctgatgcatcaaaacttaatgagaactactgccgtaaccccgatgatgatgcacatggtccgtggtgttacacgggtaatcccttgattccatgggactactgtcctattagccggtgtgagggagatactactccaaccatcgtgaaccttgaccacccagtgatctcatgtgcaaaaacgaaacagctgcgcgtggtgaatggcatccctacgaggacgaacattggctggatggtgtccttgcgttatcgcaacaagcatatctgtggaggttccctcattaaggaaagctgggtcctgaccgcaagacagtgttttccctctcgagatcttaaggactacgaagcatggcttggaatccatgatgtgcacggacgaggggatgaaaaatgtaagcaggtgctgaatgtgtcgcagctcgtgtacggaccagaaggctccgaccttgtccttatgaagctggccagacctgcagtgcttgatgactttgtgtcaaccattgacctgcctaattacggctgtaccattcccgaaaagacttcgtgcagcgtgtacgggtggggttacaccggcttgattaactacgatggactccttcgggtcgcacatttgtacattatgggtaatgagaagtgttcgcaacaccataggggaaaggtgaccctgaatgaatcagagatttgtgcaggcgccgagaagataggatcaggaccttgtgagggtgactacggtggcccactggtctgcgaacaacataagatgaggatggtgctgggagtcatagtgccaggtagaggatgtgcaatcccaaatcgaccagggatttttgtcagggtcgcatactacgcaaagtggattcacaagattattctgacctacaaagtgccacaaagc

SEQ ID NO: 13664 - DNA, 2184 bp, synthetic construct
  misc_feature 1..2184: note = source = /note="Description of Artificial Sequence: Synthetic coding sequence"
  source 1..2184: mol_type = other DNA
atgtgggtgaccaagctactccctgctctccttctccagcacgtgttgctgcatctgttactgctgcccattgccattccatatgccgaggggcagcgaaagcgaagaaacacaatccacgaatttaaaaagagcgccaaaaccacactgattaagattgatcctgcactcaaaatcaaaaccaaaaaagtaaataccgccgatcagtgcgccaacaggtgtacgcgtaacaagggcctcccctttacatgcaaagctttcgttttcgacaaggccaggaaacaatgtctgtggttcccctttaactccatgtctagcggcgtgaagaaggagtttgggcacgaattcgacctctacgaaaataaggactatattagaaattgcataattgggaaggggaggtcatataaaggaactgtttctattaccaagtctggaattaagtgtcagccctggagcagcatgatcccccatgagcacagcttcttgcctagctcctatagaggtaaagacctgcaagagaactactgtcgcaaccccagaggtgaagagggggggccttggtgctttacctctaaccccgaagtccgttatgaggtctgcgacatccctcagtgctctgaggtcgagtgtatgacgtgtaacggggaatcctataggggtctcatggatcacaccgaaagtgggaaaatttgtcagcgatgggaccatcaaaccccccacagacataagttcctgcctgagagatacccggataaaggattcgacgataactattgtcgcaatcctgacgggcaaccaaggccttggtgctacacacttgatccacacaccagatgggagtattgcgccattaaaacatgtgcagacaacactatgaatgacactgatgttccattagagaccacagagtgtattcagggacagggagaaggatatagaggaaccgtgaacacgatctggaatgggataccctgccaacgatgggattcacagtacccccatgagcacgacatgacgccagaaaatttcaagtgtaaggacttgcgcgagaactactgccggaatccggatgggtccgagtcaccttggtgtttcactactgacccaaatattagagttggttactgctctcaaatacctaactgtgatatgtcccacggtcaggactgttacagaggtaacggcaaaaattatatggggaatctgagccagacacggtccggactgacatgctcaatgtgggacaagaacatggaggatctgcacagacacatcttttgggaacctgatgccagtaaactcaatgaaaattattgtcgaaatccagatgacgatgctcatggtccctggtgctacaccggtaacccattaatcccatgggactactgccctataagccgatgtgaaggggatacgactccaactatcgtcaacctggaccatcccgtcatcagttgtgcaaagacaaagcagctaagggttgttaatggaatccccacgcgtactaatatcggctggatggtctcactgaggtatcgaaacaaacacatatgcgggggcagtctgataaaggaaagttgggtgctgaccgcccgacagtgttttcccagtcgagacttgaaggactacgaggcgtggctgggtatccacgacgtacacggacgaggggatgaaaagtgtaagcaggtgctcaacgtctctcagctggtctatggacctgagggctcagacctggtgttgatgaagctcgccaggccagctgtgcttgatgacttcgtctcaaccatcgacctccctaattacggctgtaccattccagaaaaaacatcctgcagtgtctacggatggggctataccggccttataaattacgatggactactcagagttgcccatttgtatattatgggcaacgagaagtgtagtcagcatcatcgaggtaaagtgacgttaaatgagagcgaaatttgtgctggagccgaaaaaatagggtctggaccttgcgaaggtgattatggggggccactggtgtgcgaacaacataaaatgagaatggtgctgggagtgatcgtaccgggacggggatgtgccattcccaacaggccaggcatcttcgtgagagtggcgtactacgcaaaatggatccataagataatcctcacatacaaggtaccacagtca

SEQ ID NO: 13665 - DNA, 2184 bp, synthetic construct
  misc_feature 1..2184: note = source = /note="Description of Artificial Sequence: Synthetic coding sequence"
  source 1..2184: mol_type = other DNA
atgtgggttacgaagttactccctgcgctgttgctgcagcacgtgctgctgcacttacttctgctacctattgctatcccatacgccgaggggcagagaaagcgtcgtaatactattcatgagttcaagaaatcagccaaaaccactctgatcaagattgatcccgccttgaagatcaagaccaaaaaagtgaataccgcagaccagtgtgccaaccggtgtacacgaaataaaggactaccttttacttgtaaggcttttgtgttcgataaagcaagaaagcaatgcctatggttcccctttaattccatgtcttccggcgtgaaaaaagaatttgggcacgagtttgatctgtatgagaataaagactacattcgcaattgcatcattggcaaaggtcgttcttacaagggaaccgtgtcaatcacaaaaagcggaattaagtgtcaaccttggtcctcaatgatcccccacgagcatagcttccttcccagctcataccgcggcaaagacttgcaagaaaattattgcaggaacccccggggcgaggagggaggtccgtggtgtttcactagcaatcctgaagtgaggtatgaggtgtgtgacatcccacagtgtagtgaagtggagtgcatgacctgcaacggagagtcctacagagggctgatggatcacacagaaagtggaaagatctgccagagatgggatcatcaaaccccacaccggcataaattcctaccagaacggtacccagacaagggctttgacgacaactactgccggaacccagacggccagcccagaccttggtgctacacactggatcctcacacccgttgggagtactgcgccatcaagacatgcgccgataatacaatgaacgataccgacgtgccactggagactacagagtgcattcaaggacagggcgagggctatcgtggaacagtaaacacaatctggaacggtattccatgtcagcgttgggacagccagtatccacacgaacatgacatgactcccgagaatttcaagtgtaaagacttgagagagaattactgccgcaaccctgatggatccgaatctccctggtgtttcacaacagaccctaatatcagagtcggatattgttcgcagatccctaactgtgacatgtcgcacggccaagattgctaccgtggaaatggtaagaactacatgggcaacctgagccagaccagatcagggctgacctgcagtatgtgggataagaacatggaggacctccaccgccacatcttctgggagccggatgcctcaaagctcaatgagaattattgtaggaatccagatgacgatgcccatgggccctggtgttacacaggcaatccattgataccctgggactattgccccatatctcgctgcgagggtgacaccacgcctacaattgtcaatttagaccatcccgttataagctgtgccaagaccaaacagttacgggtagttaatggaatcccaacccgcaccaacatcgggtggatggtgtccctccgatatcggaataaacatatctgcggaggctccctgattaaggaatcgtgggtgctgaccgctcgccagtgtttcccatctcgggatctgaaagattatgaggcatggttaggtatccacgacgtgcatggacggggtgacgagaagtgcaagcaagttctgaacgtatcacagctggtgtacggacctgaaggaagcgacctagtacttatgaaactggcacggccagccgtcctggatgactttgttagcaccatcgacttgccaaattatggctgtaccatcccggagaagaccagttgctcagtctacggctggggatatactgggctcataaactacgatggactcctccgtgtggcacacctgtacattatgggaaatgaaaagtgctcccagcatcacagggggaaagtgacattaaatgaaagtgaaatctgtgcaggcgcagaaaagatcggtagcggtccttgtgagggggactatggtggtcctctggtgtgcgagcagcacaagatgcgcatggtgctgggcgtgattgtgcccggtcggggttgcgcgatcccaaaccgcccaggaatttttgtccgggtcgcctattacgccaaatggattcataagattatcttgacctacaaagtgcctcagtca

SEQ ID NO: 13666 - DNA, 2184 bp, synthetic construct
  misc_feature 1..2184: note = source = /note="Description of Artificial Sequence: Synthetic coding sequence"
  source 1..2184: mol_type = other DNA
atgtgggtgacaaagctgttacctgccctcctgctccagcatgttctgcttcacctgttactcctgcccattgctatcccttacgcagagggacagcggaaacggcgtaacacaattcacgaatttaaaaagagtgccaaaaccacccttatcaagatcgacccagcccttaaaatcaagacaaagaaagtgaatacagccgatcagtgtgcaaatcggtgtaccaggaataagggacttcccttcacctgcaaggcttttgtctttgacaaggcaaggaaacagtgcctgtggttccctttcaattctatgagcagcggggttaagaaggagtttggtcacgagttcgatctctacgaaaataaggattatattagaaattgtattatcggaaaggggcgttcttacaaggggacggtgtctattactaaatccggaatcaagtgccagccttggtctagcatgattccccatgagcattccttccttccttcctcctaccggggcaaagacctccaggagaattactgtcgtaacccacgtggtgaggagggcggcccctggtgcttcacgtcaaaccctgaagtaagatatgaggtctgtgatatcccacagtgcagcgaggtggagtgcatgacctgcaatggagaatcttatcgcgggctaatggaccatacagagtcgggaaagatttgccaacgatgggatcatcagaccccccaccgtcacaagttcctgcctgagcgctatccagataaggggttcgatgacaactactgtagaaacccagacggccagccccggccttggtgttatacacttgacccgcatacgcgatgggagtactgcgccatcaaaacttgtgccgacaatactatgaacgacactgatgtgccactcgagaccaccgaatgcatacagggacagggggaggggtaccggggaaccgtgaatacaatttggaacgggataccttgtcagagatgggattcccagtacccccatgaacatgacatgacgccagagaatttcaagtgtaaagatctgcgcgagaattactgtcgcaaccctgatgggagcgaatccccatggtgttttacgactgaccccaatatccgggttggctattgctcacagatccccaattgcgatatgtcccatggccaggattgctatcggggaaacggcaagaactatatgggtaatctcagtcaaacacggagcggcctcacttgttcaatgtgggataaaaacatggaagacctgcaccgccacattttttgggaacctgacgcatccaaacttaacgaaaactattgcagaaacccggatgatgatgcccacggtccttggtgttacacaggcaacccgctgatcccttgggactactgcccaatcagtagatgcgagggggacacgacccccaccattgtgaacctagatcacccggtgatcagctgcgctaaaaccaagcagctgcgcgtcgtaaatggaattcccaccaggaccaatataggttggatggtgtccctgcgctaccggaacaaacatatctgtgggggaagtctgattaaggagtcttgggtgctgaccgccaggcagtgcttccccagtcgcgatctgaaggattatgaggcttggttgggcatacatgacgtgcacggaagaggggacgaaaaatgcaaacaggtcttaaatgttagccagcttgtgtacggacctgaagggagcgacctcgtgctgatgaaactcgcccgacctgccgttttggacgattttgtgtctactatcgacctccctaactatggctgcacgatccccgagaaaacatcttgtagcgtgtatggatggggctatacaggcctgattaactatgatggcctcctgagagtggctcacctgtacatcatgggcaacgagaaatgcagccagcaccatagggggaaggtgactctgaacgagtcggagatctgtgcaggcgctgagaagatcggcagtggaccctgtgaaggtgactacggggggccgcttgtctgtgagcagcacaaaatgcggatggttctgggggtgattgtaccaggaagggggtgtgctatccctaaccggccgggcatctttgttcgggtggcctactatgcgaaatggatccacaagataatattgacgtacaaggtgccgcagtct

SEQ ID NO: 13667 - DNA, 2184 bp, synthetic construct
  misc_feature 1..2184: note = source = /note="Description of Artificial Sequence: Synthetic coding sequence"
  source 1..2184: mol_type = other DNA
atgtgggtcaccaagttgctgccggccctgctcctccagcacgtccttctgcacctgctgctcttgccgattgccatcccgtacgccgaaggacaacggaaaaggcgcaacacgatccacgaattcaaaaagagcgccaaaactactctcattaagatcgacccggccctgaagatcaaaacgaagaaggtgaacaccgccgaccaatgcgccaatagatgtaccaggaacaagggactcccgttcacttgcaaagccttcgtctttgacaaggcccggaagcagtgcctgtggttcccttttaactcgatgagcagcggagtgaagaaggaatttggccacgaatttgacctgtatgagaataaagattacatcagaaactgcatcatcggaaagggccgctcttacaaagggactgtgtccatcactaagtccggtatcaagtgccagccatggagcagcatgatcccacatgagcactccttcctgccgagctcgtaccgggggaaggatctgcaagagaattactgccgcaatcctcggggagaagagggtgggccgtggtgctttacctctaacccggaggtgcgctacgaagtgtgtgacatcccccagtgcagtgaagttgagtgcatgacctgcaacggcgagtcctaccggggactgatggaccacaccgagtcaggtaagatttgccagagatgggatcaccaaactccgcatcgccacaagttcctgcctgagcggtacccggacaaaggtttcgatgacaattactgtaggaaccctgacggacagccaagaccttggtgctacactctggaccctcacacccggtgggagtactgcgccatcaaaacttgcgccgacaacaccatgaacgatactgacgttccacttgaaacgaccgagtgtatccagggccagggcgagggatacagaggcactgtcaatacgatttggaacgggatcccatgtcagcggtgggacagccagtacccacacgaacatgacatgactccggagaatttcaagtgcaaggacttgcgggaaaactattgcagaaacccagatggatccgagtccccatggtgcttcactactgatccgaacatccgcgtgggatactgcagccagatccctaactgcgacatgagccacggacaagactgctaccgggggaatggtaagaactacatgggaaatctctcgcagactaggtcgggactgacttgctccatgtgggacaaaaacatggaggatcttcaccggcatatcttctgggaaccggatgcttccaaacttaacgagaattactgtcggaatcccgacgatgacgcgcacggcccgtggtgctatactggtaacccactgatcccgtgggattattgccctatctccaggtgcgaaggggacaccactccaacgatcgtgaaccttgaccaccccgtcatctcgtgcgcgaaaactaagcaactgagggtagtcaacggaatccccacccggaccaacatcgggtggatggtgtcactgaggtaccggaacaagcatatttgcgggggaagcctgattaaagaatcctgggtcttgaccgcgaggcagtgcttcccctcgcgcgacctgaaagactacgaagcatggctgggaattcacgatgttcacggcagaggggacgaaaagtgtaagcaagtcctcaacgtctcccagctggtgtacggacccgaaggatcagacctggtgctgatgaagctggcgaggcctgcagttctcgacgatttcgtgtcaaccatcgacctcccaaattacggctgcactatcccggaaaagacttcgtgcagcgtctacggatggggatacaccgggctcatcaactacgatgggctcctgcgcgtggcgcacctgtatatcatgggcaatgaaaagtgctcccaacatcatcggggcaaagtgactctgaacgaaagcgaaatttgtgcgggcgctgaaaagatcggttcaggcccgtgcgaaggagattacggtggaccactggtgtgcgaacagcataagatgagaatggtgttgggagtcatcgtgcccggccgcggatgcgcgatcccgaatcggccgggaatattcgtcagagtggcctactacgccaaatggatccacaaaatcatcctgacctataaggtgccgcaaagc

SEQ ID NO: 13668 - DNA, 2184 bp, synthetic construct
  misc_feature 1..2184: note = source = /note="Description of Artificial Sequence: Synthetic coding sequence"
  source 1..2184: mol_type = other DNA
atgtgggtgactaaactccttcctgcactgctccttcaacatgtgctcctgcatctcctgcttcttcctattgcaatcccatacgccgaagggcaaagaaagcggaggaacactatccacgaattcaaaaagtcggcaaagaccactcttatcaaaatcgatcctgcacttaagatcaagaccaagaaagtcaacaccgccgatcaatgtgcaaatcgatgcaccagaaataagggtttgccattcacttgtaaggcgtttgttttcgacaaagcaagaaagcaatgcctgtggtttccattcaacagcatgtcctccggagtcaagaaagaatttgggcatgaatttgacctgtacgagaacaaggattacattagaaattgtattatcggaaaggggagatcgtacaagggtactgtgtcaatcactaagagcggcattaagtgccaaccatggtcgagcatgattccacatgaacattccttcttgcctagcagctaccgcggcaaggacctgcaagagaactactgcaggaatccacggggggaagaaggcggaccttggtgctttacctccaacccagaagtgcgatacgaggtgtgcgatataccccaatgctccgaggtcgaatgcatgacttgcaacggagagtcatacaggggtctgatggatcataccgaatccgggaagatttgtcagcgctgggatcaccagacgccccaccgtcataagtttctgcctgaaagatacccagacaaaggtttcgatgacaactattgtcgcaacccagacggtcagccccgtccatggtgttacacgcttgatccacacaccagatgggagtactgcgcaataaagacttgtgcagacaacactatgaacgatactgatgtcccacttgaaacgaccgaatgcattcagggacagggcgaagggtaccggggaaccgtgaacaccatatggaacgggatcccctgtcaacgctgggactcccaataccctcatgagcatgatatgactccggagaactttaagtgcaaagacttgagagagaactattgtcggaaccctgacgggtccgaatctccgtggtgttttacgaccgatccaaacatacgggtcggatactgctcccaaatccctaactgcgatatgtcccatggtcaagattgttaccgcggaaatggaaagaactacatggggaatctttctcagactcgatcgggtcttacttgctccatgtgggataagaatatggaagatctgcatagacacatcttttgggaaccagatgcgtcgaaactcaatgaaaactattgtagaaacccggacgatgatgcgcatggtccttggtgctacactggcaacccactgatcccctgggactactgtcctatcagcagatgtgaaggcgataccaccccgactatcgtgaaccttgaccatcctgtgatctcgtgcgccaagaccaagcagctgagagtggtcaacggaattcccaccagaactaacatcggatggatggtttctctgagatacagaaataagcatatttgcggaggatcacttatcaaggaaagctgggtcctgacggccagacagtgttttcccagccgcgatcttaaggattacgaggcatggcttggcattcatgacgtgcatggtaggggagatgaaaagtgcaaacaggtgctgaatgtgtctcagctggtgtacggtccggagggatccgatctcgttctgatgaagctcgcacgaccagcagtcttggacgattttgtctctaccattgacttgccaaattacggatgtaccattccggagaaaacgtcgtgctcagtctacggttggggatacactggattgatcaattatgatggccttctccgggtcgcacatctttacataatgggaaacgagaagtgtagccaacatcaccgtggcaaggtgactctcaacgagagcgaaatttgtgcaggtgcagaaaagatcggatcgggaccgtgcgaaggcgactacggaggcccccttgtctgtgaacagcataagatgcggatggtgttgggagtcattgtccccggtcgggggtgtgccattcctaacaggcccggtatattcgtgagagtcgcctactacgccaaatggatccacaagattattctgacctacaaagtgccccagtcg

SEQ ID NO: 13669 - DNA, 2184 bp, synthetic construct
  misc_feature 1..2184: note = source = /note="Description of Artificial Sequence: Synthetic coding sequence"
  source 1..2184: mol_type = other DNA
atgtgggtcactaagctgctgcccgccctgcttctccagcatgtcttgctccatctgctgttgctgccaatcgcaattccctacgctgagggacaaagaaaacggcgcaacactatccacgaattcaagaagtccgctaagaccaccctcatcaaaatcgaccccgctttgaagataaagactaagaaagtgaatacggcggatcagtgcgccaaccgctgtaccagaaacaaaggacttccatttacttgtaaggcgtttgtgttcgacaaagcgcgcaagcaatgcctctggttcccgttcaactccatgagctcgggagtgaagaaagaattcggacatgaatttgatctgtacgagaataaggactacatcagaaattgtatcataggaaagggccggtcatataagggcactgtcagcatcaccaaatcgggaattaagtgtcaaccgtggtcgtcgatgatcccacacgaacactcgttcctgccgtcatcctaccgggggaaggatctgcaagagaattactgccgcaacccccggggcgaggaaggaggaccgtggtgttttacctccaacccggaggtgagatacgaggtctgcgatatcccacagtgctccgaggtggaatgtatgacttgcaacggagagagctaccgcgggctcatggaccatactgagtccggaaagatctgtcagcgctgggatcatcagacgcctcaccggcacaaattcctgccggaacgctaccctgacaaagggttcgatgacaattactgccggaaccccgatggacaaccacgtccctggtgttacaccttggacccacacacgagatgggaatattgcgcgatcaagacctgcgcagacaatactatgaatgatactgacgtgccgctcgaaaccaccgaatgcattcagggtcagggagaaggatacagaggtaccgtgaatactatttggaatgggataccatgtcagcggtgggatagccaatatccacacgaacatgatatgaccccggaaaacttcaagtgcaaggacctcagggagaactactgcagaaacccggacggttcagaatcaccgtggtgcttcaccaccgaccctaacattagagtgggttactgctcgcagatcccgaactgcgatatgtctcacggacaggactgctaccgcggcaacggaaagaattacatgggtaatctgtcccagacgcggtcaggattgacgtgtagcatgtgggacaagaatatggaagatctgcatcgccacatattctgggagccagacgcctcaaaactcaacgaaaactattgccgaaacccagacgacgatgcacacggaccgtggtgctacactggaaaccctctcataccttgggactactgcccgatctcgcgctgcgagggtgataccactccgacgatcgtgaacctcgaccaccctgtgatcagctgcgccaaaactaagcagctcagagtcgtcaacggcattcctacccgaaccaatatcggctggatggtgtcacttcggtacagaaataagcacatctgcgggggttctctgatcaaggagtcgtgggtcctgaccgcccgccaatgtttcccgagcagagatcttaaagattacgaggcttggttgggtatccatgatgtccacggccgcggagacgaaaagtgtaagcaggtgctcaacgtgtcacagctcgtgtacggcccggaagggtcggacctggtgctgatgaagctggctagaccggccgtcctggacgactttgtgtcgaccatcgacctgccaaactacgggtgtaccatcccggaaaagaccagctgctccgtgtatggctggggatacactggcttgattaactacgacggcctgctgcgtgttgcccacctgtacatcatgggtaacgaaaaatgctctcaacatcacagggggaaggtgactctcaatgagtcggagatctgcgcgggagcagaaaagatcggatcaggaccatgcgagggagattacggcgggcctctggtttgcgagcagcacaaaatgcggatggtgctcggcgtcattgtgcctggacggggatgcgcaatcccgaatcgcccaggaatcttcgtgcgggttgcctactacgcgaagtggatccataagatcatcttgacttacaaggtgcctcaaagc

SEQ ID NO: 13670 - DNA, 2184 bp, synthetic construct
  misc_feature 1..2184: note = source = /note="Description of Artificial Sequence: Synthetic coding sequence"
  source 1..2184: mol_type = other DNA
atgtgggttacgaaacttctgcctgccctgctgcttcagcacgtgctcctgcatctgctcctgctcccaatagccattccttacgccgagggacaaagaaaacgaaggaataccattcacgagtttaagaagtccgcgaaaaccacccttatcaaaatcgatccggcgctcaagatcaagaccaagaaggtcaatacggcagatcaatgtgcgaaccggtgtactagaaataagggactcccttttacctgcaaggcctttgtgttcgataaagcaagaaaacagtgtctgtggtttcccttcaacagcatgtcgtccggtgtaaagaaagagttcggacatgagttcgatctgtatgaaaacaaggactacatccgtaactgtatcattgggaagggtcgctcatataagggaaccgtgtcaattactaagagcggaattaagtgtcaaccttggtcctcgatgattccgcacgaacacagcttcctcccatcgtcttaccgcggaaaggatcttcaagaaaactactgtcgcaacccgcgaggtgaagaaggtggtccgtggtgtttcactagcaaccccgaagtgcgatacgaagtgtgtgatattcctcagtgctcggaagtggaatgtatgacttgtaacggagaaagctaccgcggccttatggatcacacggaaagcgggaagatatgccagagatgggatcatcaaacgccacatagacataagtttctgccggagagataccccgacaaaggatttgatgacaactattgccggaatcctgatggccagcctcggccgtggtgctacactctggacccacatactcgctgggaatactgcgcaattaagacttgcgcggacaatacgatgaacgacactgatgtgccacttgagactaccgaatgtatccaaggacaaggagagggatacaggggaaccgtgaacaccatttggaacggaatcccttgccaacgctgggactcacaatacccccatgaacacgatatgactcccgaaaactttaagtgcaaggacctgcgcgaaaactactgccggaaccctgatggatcggaatcaccttggtgctttactaccgaccctaacataagagtgggttactgttctcagattcctaactgtgatatgagccatggtcaggattgttaccgcggcaacggtaagaattacatgggcaatctgtcgcagaccagatccggacttacgtgttcgatgtgggataagaatatggaggaccttcaccgacacattttctgggaaccagacgcgagcaagctgaatgagaactactgtaggaaccccgatgacgatgcgcacggtccttggtgctacaccggaaaccctttgattccatgggactactgtccaatctcgcgctgtgaaggcgatactaccccaactatcgtcaatctggaccatcctgtgattagctgtgcaaagactaagcaactgcgcgtcgtgaatgggatccctaccagaacgaacattgggtggatggtgtcactgcggtaccgtaacaagcatatttgtggtggttcgctcattaaggagagctgggtgctgaccgcgaggcaatgctttccttcgagagatcttaaggactacgaagcatggctcggaatacatgatgtgcacggcaggggagatgaaaagtgtaaacaagtcctcaacgtctcgcagctggtctacggacctgagggatcggatcttgtgcttatgaagttggcaaggccggcagtgttggacgactttgtctcgactattgatctcccaaactacggctgtaccatcccagagaaaacgtcatgtagcgtgtacggttggggctacactggacttatcaactacgacgggctccttcgagtcgcacatctctatatcatggggaatgaaaagtgctcccagcatcaccgcggcaaggtgacgcttaacgaatcggagatttgtgcaggagccgaaaagatcggttccggaccatgcgagggagactacggggggcctctggtctgtgagcagcataagatgagaatggtgctcggtgtcatcgtccctggtagagggtgtgccatccctaaccgtccaggtattttcgtgcgggtggcatactatgctaagtggattcataagattattcttacctacaaggtgcctcagtcg

SEQ ID NO: 13671 - DNA, 2184 bp, synthetic construct
  misc_feature 1..2184: note = source = /note="Description of Artificial Sequence: Synthetic coding sequence"
  source 1..2184: mol_type = other DNA
atgtgggtcaccaagttgcttccggccctcctgttacaacacgttctcctgcatctattactcctgcccatcgcgatcccatacgccgaaggacaaagaaagagaagaaatacgatccatgagtttaagaaatcagcaaagacaactttgattaagatagatccggcgctgaagatcaaaacgaagaaggtcaataccgctgatcaatgcgcaaatagatgtacccgcaataagggattaccttttacatgcaaggccttcgtgtttgataaggccaggaagcagtgtctctggtttcccttcaattccatgtctagcggggtaaaaaaagagttcggtcatgagtttgatctttatgagaacaaggattacatccgaaactgtatcattggtaaaggtagatcgtacaaggggaccgtgagtatcacaaagagtggaataaaatgccagccctggagttccatgataccccacgaacattcttttctcccctctagctaccgtggcaaagatttacaggagaactactgtagaaacccgcggggggaggagggggggccgtggtgcttcacgtcgaaccccgaggtgagatatgaagtgtgtgacatcccacagtgctctgaggtggagtgcatgacctgtaatggcgagtcataccgaggcttgatggatcacaccgagtctggcaagatttgtcagcggtgggaccaccaaactccccataggcacaagtttctgccagaaaggtatcctgataaaggattcgacgacaactattgcagaaaccccgatgggcaacctcgaccctggtgttacactctagatcctcacacacggtgggaatactgcgccattaaaacatgtgccgacaacactatgaatgatacagacgttcccctggagacaaccgaatgcattcaggggcaaggcgagggatatcgagggaccgtaaataccatatggaacggaattccatgccagagatgggattcccagtaccctcatgaacatgacatgacccctgaaaatttcaaatgtaaggacctgagggaaaactactgccgcaatcccgatggatctgagagcccatggtgtttcactacagatcctaatatcagagtagggtattgttctcaaatcccgaactgcgatatgagccatggacaggattgttaccgggggaatgggaaaaactacatgggtaatctctcccagaccagatccggactgacctgctctatgtgggacaagaatatggaagatctgcaccgtcacatcttctgggaaccagacgcctccaagcttaatgaaaattattgtagaaatccagacgacgacgcccacggcccatggtgctatactggcaatcccctcatcccttgggactactgccccatatcaaggtgcgagggtgacactaccccgacaatagtgaacctcgatcacccggtgataagctgtgccaagacgaaacaactccgcgtggtaaatggcattcccaccaggacgaatattgggtggatggtgtccttaaggtatagaaataaacacatatgcgggggatccctgattaaggagtcttgggtactcacagctcgtcagtgctttccctctagggatcttaaggattacgaggcgtggctcggcattcatgacgtccatggcaggggggacgaaaaatgtaagcaggtgctgaacgtctcacagctggtctacgggcccgaaggcagtgatctggtgctgatgaagcttgcaaggccagccgttctcgatgactttgtgagcactattgatctcccaaattacggctgcacaattcccgagaagaccagttgctctgtgtatgggtggggctacacagggcttattaattatgatggactgctgagggtcgctcacctctacattatgggaaatgaaaagtgctctcagcatcatcggggcaaggtcaccctgaatgagagtgaaatatgtgccggagcagagaagataggaagcggcccgtgcgagggagactacgggggccctttagtttgcgagcagcacaagatgcgcatggtactcggagtgatagtccctggacgtggttgtgctattccaaaccgccctggtatattcgttcgagtagcctactatgcgaagtggatccacaaaataatcttaacctacaaggtcccgcagtct

SEQ ID NO: 13672 - DNA, 2184 bp, synthetic construct
  misc_feature 1..2184: note = source = /note="Description of Artificial Sequence: Synthetic coding sequence"
  source 1..2184: mol_type = other DNA
atgtgggttacaaaattgctgcccgcccttcttcttcagcacgttttgctgcacctgttgttattgccaatcgcaataccttatgccgagggacaaaggaagcgtagaaacaccatacacgaatttaaaaagagtgctaagaccacgttgattaaaatcgatcccgctttaaaaattaaaacaaaaaaagttaacacagcagatcagtgcgcaaaccgctgcacaaggaacaaaggtttgccttttacctgtaaggcttttgtttttgacaaggccagaaaacagtgcctttggtttccatttaactccatgtcttcaggggttaaaaaggaattcgggcatgagttcgatttatacgagaataaagactacattaggaactgcatcattgggaagggtaggtcctataaagggactgtaagtatcactaagtctggtattaagtgtcagccatggtcctcaatgattcctcacgagcattcgttccttccatcctcttatagggggaaggatcttcaggagaattactgtaggaaccctcggggtgaggagggcggtccttggtgtttcaccagcaacccggaggttagatatgaagtttgtgatatacctcaatgttccgaggtggaatgcatgacgtgtaacggggaatcgtatagaggtttaatggatcataccgaaagtggtaagatctgccagaggtgggatcatcagacccctcaccgccacaaattccttccagagaggtatccagataaaggtttcgacgataattattgtagaaatccagatggacaaccacgaccgtggtgttatactctggatccacacactcgatgggagtattgtgctattaagacttgcgctgataatactatgaacgatactgatgtgcccttggaaactactgagtgcattcagggacagggggagggttatagagggactgtcaatacgatttggaatggcatcccatgtcaaaggtgggattcccaatatcctcatgagcatgatatgactcctgaaaatttcaagtgtaaggatttaagggagaattactgcagaaacccagacgggtccgagtccccttggtgcttcacaacggatcctaatatcagggtgggatattgtagtcaaatacccaactgtgatatgagtcacgggcaagattgttataggggcaacggtaagaattatatgggaaatttgtctcaaacacgtagtggccttacttgctctatgtgggataagaatatggaagatctccatcgacatattttctgggaacctgatgcctccaaacttaatgaaaactattgtcgtaatcccgatgatgacgctcacggcccttggtgttataccgggaatccacttatcccctgggattactgtccgatttcgaggtgcgaaggtgataccactcctaccatcgttaacctggaccacccagttatatcttgtgccaagaccaaacagcttagggtagtcaatggtataccgacaagaactaacatcggatggatggtgagtttgaggtatagaaataagcatatctgcggaggatcattgattaaagaaagctgggtgctgaccgcgagacaatgctttccttctcgagatcttaaagactacgaagcctggttgggaatccacgatgtgcatggtaggggggatgagaagtgtaagcaagtgcttaacgtcagccaactcgtgtacggccccgaaggttccgatctcgttttgatgaagctcgctagaccagcagtgcttgacgatttcgtgtcgacaattgaccttcccaactatgggtgtacaatacctgagaaaacaagttgcagcgtttacggttggggctacacaggcttgatcaattatgatggtctgctgcgcgttgcccatttatacattatgggaaatgagaaatgctctcagcatcataggggtaaagtgactctcaatgagagtgaaatctgtgccggtgctgaaaaaatcggctccggaccttgtgaaggagactatggggggccactggtatgtgagcagcacaagatgcgcatggtattgggggtgatcgtgcctggaagaggctgtgccatacctaacagacctggaatctttgtcagagtagcatattatgccaagtggatacataagattatacttacctataaggtgccacagagc

SEQ ID NO: 13673 - DNA, 2184 bp, synthetic construct
  misc_feature 1..2184: note = source = /note="Description of Artificial Sequence: Synthetic coding sequence"
  source 1..2184: mol_type = other DNA
atgtgggtcaccaagctgttgcccgcccttctgcttcaacacgtcttgctgcacttgctgctccttccaatagcaataccgtacgcagaaggacagcgcaaaagaagaaacactattcacgagttcaagaaatccgcgaaaactactctgataaagatcgatcctgcactgaagataaagacgaagaaagtgaacactgcggatcaatgcgcaaatcggtgtactagaaacaaaggacttccattcacttgtaaggcatttgtgtttgacaaggcgaggaaacaatgtctctggtttccttttaacagcatgtcctcgggggtgaaaaaggaatttggccacgaattcgatctctacgaaaacaaagactacatccgaaactgcataattggcaagggtcggtcatacaagggaaccgtctccatcacgaagtcgggcattaagtgtcagccttggtccagcatgatccctcatgagcattcgtttctgccttcctcgtacagaggaaaggaccttcaagaaaactactgtcgaaaccctcggggtgaggagggaggcccctggtgcttcacctctaatcctgaagtgagatacgaggtgtgtgatataccgcagtgctcggaggtggagtgcatgacttgtaatggggaaagctacagaggcctcatggatcataccgaatccgggaagatttgtcaaaggtgggaccaccagactccacatcgccacaagttcctgcctgagcgataccccgataaggggtttgatgataactactgtcggaaccctgacggacaaccaagaccctggtgttacaccctcgatcctcatacccgctgggaatactgcgcaatcaagacctgcgcggataataccatgaacgatactgatgtgcctcttgagactaccgagtgtatacaagggcaaggtgaaggctatagaggaaccgtgaataccatttggaacgggatcccttgtcagagatgggattctcaatacccccatgaacatgatatgacgcccgagaactttaagtgtaaggatttgcgggagaactactgtagaaacccagatggctcggagtccccttggtgctttactactgatcccaacatccgtgtgggatactgctcccaaataccgaactgtgatatgtcccatggccaagactgctaccgcgggaacgggaagaattacatgggaaatcttagccaaactagaagcggccttacctgttccatgtgggataagaatatggaggacctgcaccgtcatatcttttgggagcctgacgcatccaaactcaacgagaattactgtcgcaatcctgacgatgatgcccatggaccgtggtgttacactggaaatcctctgattccgtgggactactgtccaatttcaaggtgcgagggcgacaccactcctaccatagtcaatctggatcaccctgtgatttcgtgtgccaagaccaagcaactgcgggtggtgaacggaattccaactaggactaacattgggtggatggtatcgctgagatatagaaacaagcatatctgtggcggatccctgataaaagaatcgtgggtgttgaccgcccgacaatgttttccttcacgggaccttaaagactacgaagcatggctggggatacatgatgtgcatgggcgaggggatgaaaagtgcaagcaggtcctcaacgtgagtcaactggtctacggtccagaaggttcggacctggttctgatgaaactggcacgtcctgcagtgctggacgactttgtgagcactattgatttgcccaactacggttgtaccattccagagaaaacctcctgttccgtgtatggttggggctacaccgggctgattaactacgacggcctccttcgggtggctcacctttacattatgggaaacgaaaagtgttcacagcaccatcgcggtaaggtcaccctgaatgagagcgaaatttgcgcaggagcagaaaagattggtagtggtccatgcgaaggagattacggaggacctttggtgtgtgaacagcacaaaatgagaatggtgctgggagtgattgtgcctggacgcggatgtgcaattcctaacagacctggtattttcgtgcgggtcgcgtattacgctaagtggattcataagattattctgacttacaaggtcccacaatca

SEQ ID NO: 13674 - DNA, 2184 bp, synthetic construct
  misc_feature 1..2184: note = source = /note="Description of Artificial Sequence: Synthetic coding sequence"
  source 1..2184: mol_type = other DNA
atgtgggtaactaagctcttgcccgctctcctgctacagcacgttctcctgcacttgctcctgctacccattgccatcccctacgcggagggacagagaaagcgacgaaacaccatccatgagttcaaaaagtccgccaagaccactctgataaaaatcgaccctgctttgaagattaaaaccaagaaggtcaacacagccgaccaatgtgcaaatcgttgcacccggaacaagggactcccctttacatgtaaggcttttgtttttgataaggcgcgcaagcaatgtctttggttcccttttaattctatgagttctggcgtgaaaaaggagttcggccacgagtttgacctgtacgagaacaaggattatatcaggaattgcatcataggcaagggccgaagctacaagggcactgtgagcattacaaaatccggcataaagtgccagccatggtcttccatgatcccccatgaacactcattcctgccatcctcttaccgtggcaaggatctgcaggagaattactgtagaaatcctcgcggcgaagagggaggaccctggtgctttactagcaatcccgaagttcggtacgaagtctgtgacatccctcagtgctctgaggtcgagtgtatgacatgcaatggcgaaagttatcgggggcttatggaccataccgagtccgggaagatctgccagcgctgggaccatcagaccccgcaccggcataaatttctgccggagaggtatcctgataagggttttgatgataattactgccgcaatcctgatggccagcccaggccctggtgctataccctggacccacacaccagatgggagtactgcgctattaaaacgtgtgccgacaacacaatgaatgatactgacgtaccattggagaccactgagtgcatccaagggcaaggcgagggctatagggggacagtgaataccatctggaatggcattccctgtcaacggtgggacagccagtatcctcacgaacacgacatgactcctgagaactttaaatgcaaagatttgcgtgagaattattgtaggaatcccgatgggagtgagagcccctggtgtttcaccactgatcctaacattagagtgggctactgttctcagataccaaattgcgacatgagccacggccaagattgctacaggggtaacggcaagaattacatgggaaacctatcacaaacgcgcagcgggcttacatgttcaatgtgggacaagaacatggaggacctccacaggcacatattttgggagcccgatgcttccaagctgaacgagaattattgccgtaacccagacgatgacgctcacggaccctggtgctataccggaaacccccttataccttgggactactgtcctatctccagatgtgagggtgacacaactcctaccattgtgaatttggatcaccctgtcattagttgcgcaaagaccaagcaactgcgcgttgtaaacgggatacccacgagaaccaatatcgggtggatggtgtcactgaggtaccggaacaagcatatctgcggtggaagtctgattaaggagtcttgggtgctcacagcccggcaatgcttcccctctagggacctcaaagactacgaagcctggctagggattcatgacgtgcacggccgaggagatgaaaagtgcaaacaggtcctgaacgtttcccagctggtatatgggccagaagggtctgatttggtattgatgaagctggctagaccagcggtcctagacgatttcgtgagtacaatcgacctgccgaattacggatgcacaattccggagaagacgtcctgcagtgtatatggatggggctacactgggcttatcaactatgatgggctgttgagagtagcccacctatatattatgggaaacgagaaatgctcacagcaccataggggcaaagtaacactgaacgaaagtgagatctgcgccggagctgaaaagattggatcaggcccatgcgagggcgactacggcggcccactggtgtgcgagcagcataagatgaggatggttctcggggtcatcgtgccaggtagagggtgtgcaattcctaaccggcctggaatttttgtgagggtcgcctattatgccaaatggatccacaaaatcattctgacttataaagttccccagagc

SEQ ID NO: 13675 - DNA, 2184 bp, synthetic construct; identical to SEQ ID NO: 13666
  misc_feature 1..2184: note = source = /note="Description of Artificial Sequence: Synthetic coding sequence"
  source 1..2184: mol_type = other DNA

SEQ ID NO: 13676 - DNA, 2184 bp, synthetic construct
  misc_feature 1..2184: note = source = /note="Description of Artificial Sequence: Synthetic coding sequence"
  source 1..2184: mol_type = other DNA
atgtgggtgaccaagctcttgccagcactgctgctgcagcacgtgctgctgcatcttctccttctgccaattgctatcccctatgctgagggtcagaggaagcggagaaacacaattcacgagttcaagaagagcgccaagaccacgcttattaaaatcgaccccgctttgaagataaaaacaaagaaggtaaacacagccgaccagtgtgccaaccgctgcacccgcaataagggtctgccgtttacctgcaaggcgtttgtgttcgataaggcgcgcaagcagtgtctctggtttcctttcaactctatgagcagtggggtgaagaaggaattcggccacgagtttgatctctacgaaaataaggattatattcgcaattgcatcataggcaagggaagaagttataagggcactgtctccatcaccaaaagtggaatcaagtgccagccgtggtcctccatgattccccacgagcatagctttctcccttcttcatacaggggtaaagacctccaagagaactattgccggaatcctagaggggaagagggtggcccttggtgtttcacaagtaatccagaggtgcgctacgaggtctgcgatattccacagtgctctgaggtggaatgcatgacatgtaacggtgaatcttatcgaggcctgatggaccatacagaatccgggaagatctgccagagatgggaccaccagacgcctcatcgccataagttccttccagagaggtaccccgataaggggttcgatgacaactactgtcgaaatcctgatgggcagcctagaccttggtgctataccctggatccccatacacgatgggagtattgtgctatcaagacctgcgccgataatacgatgaacgacacggacgttcctctcgagactactgagtgcatccagggacaaggtgaaggctatcgggggaccgtcaacacaatttggaatggcattccgtgccagagatgggactcacagtatcctcacgaacacgacatgacccctgaaaactttaaatgcaaagacctgagggagaactattgccgcaatccagacgggtcagagagcccctggtgtttcaccacagatccaaatattagggtcgggtactgcagtcagatacctaattgcgacatgagccatggacaggattgttatcggggcaatggaaagaactatatgggcaatctgagccagacgcgcagtggacttacttgcagcatgtgggacaaaaatatggaggacttgcaccggcacattttctgggaacccgacgcgtctaaattgaacgaaaattactgccgcaaccccgatgatgatgctcacggtccttggtgctacactggtaacccgctgattccatgggactactgtccaatttccagatgtgagggagacaccacgcccactattgttaatttggatcatcccgtcatttcatgcgctaagaccaagcagctgagggtggtcaacggcattcccactcggacaaacataggatggatggtgagtctcaggtatcgaaataagcacatttgcggtggctcactcattaaggagtcatgggtgcttacagcacgccaatgtttccctagtcgggatctgaaggactatgaggcctggctcgggattcacgatgtgcatggtcgaggcgacgaaaaatgcaagcaggtgttgaacgtgtcacagttggtgtatggcccagagggctccgacctggttctcatgaagctcgccaggcccgcggtcctcgacgacttcgtgtcaacaattgacttgcctaactatggttgcaccatccctgaaaagacttcctgcagcgtctatgggtgggggtatacaggcctgattaactatgacggtctgctgcgcgtagcacacctttatatcatgggcaatgagaagtgtagtcagcaccacaggggaaaggttacacttaatgaatccgaaatttgcgctggagcagaaaagataggcagcggcccgtgtgagggtgactacggcgggccactggtgtgcgagcaacacaagatgcgcatggtgctcggggttatcgtcccaggacgcgggtgcgccatcccaaatcggcccggcattttcgtgcgcgttgcgtactacgccaaatggatccacaaaataattctgacatacaaggttccccagtcc

SEQ ID NO: 13677 - DNA, 2184 bp, synthetic construct
  misc_feature 1..2184: note = source = /note="Description of Artificial Sequence: Synthetic coding sequence"
  source 1..2184: mol_type = other DNA
atgtgggtgacaaaacttttgcccgctcttctgctgcagcacgttctcttgcatctgttgctcctgccaattgcaattccctacgctgaaggacagagaaaacgacgcaacacaatccacgagtttaaaaagagtgccaaaactactctgattaaaatcgaccctgccctgaaaataaagacgaaaaaagtgaataccgcggatcagtgtgcaaacagatgcacgagaaacaaaggactgcctttcacgtgtaaggcctttgtgttcgacaaggcaagaaaacagtgtctttggtttcctttcaatagcatgtccagtggtgtcaagaaggagttcggtcacgagtttgatctgtacgaaaataaagattatatccggaactgcataattggcaagggaagaagctacaagggcacggtctcgattacgaagagtggcattaagtgccagccttggtcttccatgatcccacacgaacatagcttcctcccgtccagttataggggaaaagacttacaagaaaattactgccgtaatcccaggggtgaggaagggggcccatggtgtttcacctccaacccggaggtgcgctacgaggtgtgtgacattcctcagtgctctgaggtggaatgcatgacctgcaacggcgagagctaccgcgggctaatggaccatacagaatcagggaaaatttgccaacgttgggaccatcagactccccataggcataaatttttacctgagcgataccccgacaaggggtttgatgataattattgcaggaatccagatgggcaaccgcggccttggtgttatacactggatccgcacacccgttgggaatattgtgctatcaaaacttgcgcagacaacactatgaatgataccgatgtgcctttggagaccaccgagtgcatacaaggccagggcgaaggctatcgcgggacagtgaacacgatctggaatgggatcccgtgtcaacggtgggatagccagtacccccacgagcatgacatgaccccagagaacttcaaatgcaaagatctgcgcgaaaactattgtaggaatcccgatggatctgagagtccttggtgctttaccaccgacccgaacatacgagtggggtattgcagccaaatacccaattgcgacatgagtcacggccaggactgttacagggggaatggcaagaactacatgggcaacctgagccagacccgaagtgggctgacctgtagcatgtgggataaaaacatggaggacctgcatcggcatatcttttgggaacctgacgcctcgaaattaaacgagaattactgccggaatccggacgacgatgcccacggtccctggtgctataccgggaatcctctgataccgtgggattactgcccaatctctcggtgtgagggggacaccacacctaccatcgtgaatcttgaccaccccgtaattagctgcgccaaaaccaaacagctaagggttgtgaacggcatcccaactaggacaaacataggctggatggtaagccttagataccgcaacaagcatatctgcggcggcagcctgattaaggaatcatgggtcctgaccgcccgacagtgctttccttcacgagatctgaaggattatgaggcttggttgggaatccacgatgttcacggccggggagatgagaaatgtaagcaggtcctcaatgtctcccagttggtctatgggccggagggcagtgacctggtgctgatgaagcttgcgcgcccagcggttcttgatgatttcgtctcaaccatagatttgcccaactatggctgtacaatcccggagaagaccagctgttctgtgtatgggtggggctacactggcctgatcaattatgatggtttactccgtgtggcccacctgtacattatgggcaacgagaagtgtagccaacatcatcggggaaaggtgactctcaatgaatctgagatctgcgcaggcgctgagaagattggaagcggtccatgtgaaggcgattacggcggcccgcttgtgtgtgagcagcataaaatgaggatggtcctcggagtcatcgtacccggcagagggtgtgccatcccgaacaggccaggaatcttcgtacgcgtagcctattatgcaaagtggatccataaaatcatccttacctataaagtgccccaaagc

SEQ ID NO: 13678 - DNA, 252 bp, synthetic construct
  misc_feature 1..252: note = source = /note="Description of Artificial Sequence: Synthetic coding sequence"
  source 1..252: mol_type = other DNA
atggccttgagttcgcagatctgggcggcatgccttcttttgttgctcctgctggcatcgctgacttccggttcggtgtttccgcagcaaaccggacaactggctgagctgcaaccacaggaccgcgccggcgcacgggcttcgtggatgccaatgtttcagcggagacggagaagagatacccatttcccgatctgcattttctgctgcgggtgttgccaccggtccaagtgcggcatgtgctgtaagact

SEQ ID NO: 13679 - DNA, 252 bp, synthetic construct
  misc_feature 1..252: note = source = /note="Description of Artificial Sequence: Synthetic coding sequence"
  source 1..252: mol_type = other DNA
atggcccttagctcgcaaatatgggcagcctgcctgctgctgctattgctcctcgcaagcctgacatctgggagcgtattcccacaacaaaccgggcagctcgccgaacttcagccccaggatcgagccggagcccgtgcttcttggatgcctatgttccagcgtcggaggcgacgagatacccatttcccgatctgcattttttgctgcggatgttgccacaggtccaagtgcggcatgtgctgcaaaacc

SEQ ID NO: 13680 - DNA, 252 bp, synthetic construct
  misc_feature 1..252: note = source = /note="Description of Artificial Sequence: Synthetic coding sequence"
  source 1..252: mol_type = other DNA
atggccctgtcctcgcagatttgggcagcatgtttgctgcttctgctcctcctggcctcactgactagcggctccgtgtttccgcagcaaactggacaactcgccgaactgcagccgcaagaccgcgctggtgcgagagcgagctggatgcctatgttccagaggcgccgccggagagatacccatttcccaatctgcatcttctgctgtggatgctgccaccggtcgaaatgcgggatgtgttgcaagacc

SEQ ID NO: 13681 - DNA, 252 bp, synthetic construct
  misc_feature 1..252: note = source = /note="Description of Artificial Sequence: Synthetic coding sequence"
  source 1..252: mol_type = other DNA
atggctctgtcctcgcagatctgggcggcatgtctcctgttgctcctgcttctggccagccttacctccggttcggtgtttccgcaacaaactggacagcttgccgaattgcagccccaggaccgcgccggggcccgtgcatcttggatgcctatgttccaaaggcggaggcggcgggatacccacttccccatctgtatcttctgttgcggatgttgccacaggtcaaagtgcggcatgtgctgcaagacc

SEQ ID NO: 13682 - DNA, 252 bp, synthetic construct
  misc_feature 1..252: note = source = /note="Description of Artificial Sequence: Synthetic coding sequence"
  source 1..252: mol_type = other DNA
atggcactgtcatcacagatctgggcggcgtgtctcctcctgctcctcctgttggcctccctgacgtccgggtcggtctttccccagcaaaccggacaactggctgaacttcaaccccaggatcgagccggcgccagagcatcctggatgccgatgtttcagagacgccgccgcagagatactcacttcccgatctgcatcttctgctgcgggtgctgccacaggtcaaaatgcggaatgtgctgcaagacc

SEQ ID NO: 13683 - DNA, 252 bp, synthetic construct
  misc_feature 1..252: note = source = /note="Description of Artificial Sequence: Synthetic coding sequence"
  source 1..252: mol_type = other DNA
atggctctgtccagtcagatctgggctgcctgcctgctcctcctgctcctgttagcgtcattgacctccggatccgtcttcccccagcagacaggacagctagctgagcttcagcctcaggacagagcgggggcaagggcgtcctggatgcctatgtttcagaggaggcgacggcgagatacccacttccctatatgtatcttttgttgcggatgctgccatagaagcaaatgcggtatgtgctgcaaaact

SEQ ID NO: 13684 - DNA, 252 bp, synthetic construct
  misc_feature 1..252: note = source = /note="Description of Artificial Sequence: Synthetic coding sequence"
  source 1..252: mol_type = other DNA
atggccctctcctcacagatttgggcggcatgtctcctcctgcttcttcttttggcctcgctgacctccggatcggtgtttccacagcaaactggacaactcgcagagctgcaaccacaagatagagccggtgcacgggcaagctggatgcctatgtttcaaagacggcgccgccgggacacccattttccaatctgtatcttttgctgcggctgttgtcacagatcgaagtgtggaatgtgttgcaagact

SEQ ID NO: 13685 - DNA, 252 bp, synthetic construct
  misc_feature 1..252: note = source = /note="Description of Artificial Sequence: Synthetic coding sequence"
  source 1..252: mol_type = other DNA
atggcactttcctcgcaaatttgggcagcatgcctgcttcttcttctcctgcttgcttcccttacctcaggtagcgtgtttcctcaacagactggacaactggcggaattgcaaccacaggatagagctggcgcacgtgccagctggatgccaatgtttcaaaggagaaggcgaagagatacgcatttcccaatctgcatcttttgctgcggttgttgccatcgatcgaagtgcggaatgtgctgtaagact

SEQ ID NO: 13686 - DNA, 252 bp, synthetic construct
  misc_feature 1..252: note = source = /note="Description of Artificial Sequence: Synthetic coding sequence"
  source 1..252: mol_type = other DNA
atggcattgtcgtcgcagatctgggctgcctgcttgttgctgctgttgctgttggcttctctgaccagtggtagcgtcttcccccaacagaccggacagctggctgagctacaaccccaagaccgagccggagctcgagccagctggatgccgatgttccagcgacgcaggcgacgggatacccacttccctatatgcattttttgctgtgggtgctgtcatcggtccaagtgcggaatgtgctgcaagacc

SEQ ID NO: 13687 - DNA, 252 bp, synthetic construct
  misc_feature 1..252: note = source = /note="Description of Artificial Sequence: Synthetic coding sequence"
  source 1..252: mol_type = other DNA
atggcactgtcgtcacaaatttgggccgcgtgtctcctgctcctcctcctcttggcctcgcttacctcggggtccgtgtttccgcagcagactggacaattggcggaactgcaaccacaagatcgggccggcgctagagcctcctggatgccgatgttccaacggcgccggagacgcgacacccacttcccgatctgcatcttttgctgcggctgctgccaccggtcgaaatgcggtatgtgctgtaaaact

SEQ ID NO: 13688 - DNA, 252 bp, synthetic construct
  misc_feature 1..252: note = source = /note="Description of Artificial Sequence: Synthetic coding sequence"
  source 1..252: mol_type = other DNA
atggccctgtcgtcacagatctgggccgcctgcctgctgcttctccttttactggccagtctcaccagtggatcagtcttcccgcagcaaactgggcagctggctgagttgcaaccgcaggaccgagctggcgcacgggcatcatggatgcccatgttccagcgtcgacgacgacgggatacacactttcctatctgtatcttctgttgcggctgctgccacaggtctaaatgcggcatgtgctgcaaaact

SEQ ID NO: 13689 - DNA, 252 bp, synthetic construct
  misc_feature 1..252: note = source = /note="Description of Artificial Sequence: Synthetic coding sequence"
  source 1..252: mol_type = other DNA
atggcactttcttcccagatttgggccgcgtgtctccttttgctcctgcttcttgctagcctcactagcggttcagttttcccacagcaaacgggacagctggcagagctccagcctcaagaccgcgcaggtgcgcgggcttcgtggatgccgatgtttcagcgcagacggagacgcgatacccattttcctatatgtatattctgctgcggatgttgccacagatcgaaatgcggaatgtgttgtaagacc

SEQ ID NO: 13690 - DNA, 252 bp, synthetic construct
  misc_feature 1..252: note = source = /note="Description of Artificial Sequence: Synthetic coding sequence"
  source 1..252: mol_type = other DNA
atggcgctgagcagccagatttgggcggcctgtctgctccttttactgctgttggctagcctgacctcagggagcgttttcccacaacaaactggtcagctggccgaattacaacctcaggatcgcgctggtgcacgagcgtcctggatgcctatgttccaacgccgccgccgccgcgatactcacttccctatttgcatcttctgctgcgggtgctgccatcgctctaagtgtggtatgtgttgcaagacg

SEQ ID NO: 13691 - DNA, 252 bp, synthetic construct
  misc_feature 1..252: note = source = /note="Description of Artificial Sequence: Synthetic coding sequence"
  source 1..252: mol_type = other DNA
atggccctttcgtcgcagatctgggcggcctgtctgctgttgttgctgctgctggcttctcttacgagcggttcagtgtttcctcagcagactgggcaactggccgaactgcaaccgcaagaccgggcgggcgcgcgggctagctggatgcccatgttccagaggcgtcgccgccgcgatacccatttcccaatctgtatcttttgctgtggctgctgccacagatccaagtgcggaatgtgctgcaaaacc

SEQ ID NO: 13692 - DNA, 252 bp, synthetic construct
  misc_feature 1..252: note = source = /note="Description of Artificial Sequence: Synthetic coding sequence"
  source 1..252: mol_type = other DNA
atggcactgtcctctcagatttgggccgcttgcctcctgctgcttctgcttctggcatccctgacctccggatcagtcttcccccaacaaacggggcagctggcagaattgcagcctcaagatagggccggtgcacgggcctcttggatgcctatgttccagagacggagacgacgggatactcatttccctatctgcatcttctgctgcgggtgttgccatcggtctaaatgcggaatgtgctgcaagaca

SEQ ID NO: 13693 - DNA, 252 bp, synthetic construct
  misc_feature 1..252: note = source = /note="Description of Artificial Sequence: Synthetic coding sequence"
  source 1..252: mol_type = other DNA
atggcgttgtcctcccagatttgggctgcctgcctgctcctgttgctcctcctcgcctcgctgacgagcggttcagtgttcccccagcagactggacagctggccgaactccaaccacaagaccgcgcaggggcacgcgctagctggatgccgatgtttcagcgccgccgccggagagatacccactttcctatctgcatcttttgctgcggctgctgccaccgctcaaagtgcgggatgtgctgcaaaacc

SEQ ID NO: 13694 - DNA, 252 bp, synthetic construct
  misc_feature 1..252: note = source = /note="Description of Artificial Sequence: Synthetic coding sequence"
  source 1..252: mol_type = other DNA
atggctttgtcgtcgcaaatctgggctgcttgcttgttgcttctgctgttgctcgcatcacttactagtggaagcgtgttcccgcagcagacgggccaactcgcggaactgcaacctcaggatcgggccggggcgcgtgcctcgtggatgccgatgttccagcgccggagacgccgcgacactcatttccccatttgcatcttttgttgtggatgctgtcaccggagcaaatgtggcatgtgctgcaagacc

SEQ ID NO: 13695 - DNA, 252 bp, synthetic construct
  misc_feature 1..252: note = source = /note="Description of Artificial Sequence: Synthetic coding sequence"
  source 1..252: mol_type = other DNA
atggcccttagctcgcagatctgggcggcatgcctgcttctgctgttgctcctggcctccttgacttcggggtccgtgttcccgcagcaaaccggacaactcgccgagctgcagccacaggatcgggctggagctcgcgcgtcatggatgccaatgttccagcgcagaaggaggcgcgacacccattttccgatttgcatcttctgttgtggctgctgccaccgctcaaagtgtggaatgtgctgcaaaacc

SEQ ID NO: 13696 - DNA, 252 bp, synthetic construct
  misc_feature 1..252: note = source = /note="Description of Artificial Sequence: Synthetic coding sequence"
  source 1..252: mol_type = other DNA
atggcgctgtcgtcccagatttgggcggcctgcttgttacttctcttgttattggcgagcttgacttcaggctccgttttcccccaacagacaggacagttggctgaacttcagccacaagatcgtgcaggggctagagcatcgtggatgcccatgttccagcgtcgtcgtcgtcgcgatacccattttccaatctgcatcttctgttgcggatgttgtcataggtctaagtgcgggatgtgttgtaaaact

SEQ ID NO: 13697 - DNA, 252 bp, synthetic construct
  misc_feature 1..252: note = source = /note="Description of Artificial Sequence: Synthetic coding sequence"
  source 1..252: mol_type = other DNA
atggcactttcgagccagatatgggccgcatgccttctgctgcttctcttgctggcctcgcttacctcagggtccgtctttccacaacagaccggacaacttgctgaacttcagcctcaggatagagctggtgcgcgagcgtcctggatgccgatgttccaaaggagacgacgcagggacactcattttcccatctgcatcttttgctgtggttgttgtcaccgaagcaagtgtgggatgtgctgcaaaacc

SEQ ID NO: 13698 - DNA, 252 bp, synthetic construct
  misc_feature 1..252: note = source = /note="Description of Artificial Sequence: Synthetic coding sequence"
  source 1..252: mol_type = other DNA
atggcgctgtcatcccagatttgggcagcttgcctcctcctcctgctccttctcgcctcgctgacttccggttctgtctttccacagcaaacgggtcaactggctgaacttcagccgcaggatcgggcgggagctagagcttcgtggatgccgatgtttcaaagacgcaggcgcagagacactcacttcccgatctgcatcttctgttgcggatgctgtcaccggagcaagtgcggaatgtgctgcaagacg

SEQ ID NO: 13699 - DNA, 252 bp, synthetic construct
  misc_feature 1..252: note = source = /note="Description of Artificial Sequence: Synthetic coding sequence"
  source 1..252: mol_type = other DNA
atggccctctcgagccaaatctgggctgcgtgcctgttgcttttgcttcttctggcatcactgacctccgggagtgtgtttcctcaacagacgggacaattggctgaactgcaaccccaggatcgtgccggagcacgtgcaagttggatgcctatgtttcagagacggcggagacgagacactcacttccctatctgtatattctgttgcggctgttgtcataggtccaagtgcggtatgtgttgcaaaacc

SEQ ID NO: 13700 - DNA, 252 bp, synthetic construct
  misc_feature 1..252: note = source = /note="Description of Artificial Sequence: Synthetic coding sequence"
  source 1..252: mol_type = other DNA
atggctttaagcagccagatttgggccgcctgcttgctcctgctcctcttattggcttctcttactagtggctcagtgttcccgcagcaaaccggacagctagccgaactccaaccccaggaccgcgctggagcccgagcttcttggatgcccatgttccagcgacgacggaggcgggacacgcatttcccgatctgtattttctgttgtggctgttgtcacagatctaagtgcggaatgtgctgcaagaca

SEQ ID NO: 13701 - DNA, 252 bp, synthetic construct
  misc_feature 1..252: note = source = /note="Description of Artificial Sequence: Synthetic coding sequence"
  source 1..252: mol_type = other DNA
atggccctgagcagccagatctgggcagcttgcctcctgctgctgttgctgttggcctctctgaccagcggaagtgtgtttccgcagcagaccggtcaattggctgaactccagccacaggatcgcgccggagccagagcatcgtggatgcccatgtttcagcggaggcgccgccgcgacactcacttcccaatttgcatcttctgttgcggctgttgtcatcgctcgaagtgcgggatgtgctgtaaaact

SEQ ID NO: 13702 - DNA, 252 bp, synthetic construct
  misc_feature 1..252: note = source = /note="Description of Artificial Sequence: Synthetic coding sequence"
  source 1..252: mol_type = other DNA
atggcgctgagcagccaaatttgggccgcttgtctactgctgctgttacttctagcttctttaacatccgggagcgtattcccgcagcagaccgggcagctggctgaattgcagccccaggaccgtgccggggctcgagcgagctggatgccaatgttccagaggcggaggcgtcgggatacccatttccccatttgcatcttttgctgcggatgctgccacaggtcaaaatgtgggatgtgctgcaagaca

SEQ ID NO: 13703 - DNA, 252 bp, synthetic construct
  misc_feature 1..252: note = source = /note="Description of Artificial Sequence: Synthetic coding sequence"
  source 1..252: mol_type = other DNA
atggccctgtcatcccagatctgggctgcctgccttctgcttcttctgctgctggcctcattaaccagcggatcagtctttccgcaacagaccggacagctggcagagcttcaacctcaagacagggctggagcgcgggcgagctggatgccaatgttccagagacgtaggaggagggacactcactttcccatctgtatattctgctgcgggtgctgccacagaagcaaatgcggaatgtgttgtaagaca

SEQ ID NO: 13704 - DNA, 252 bp, synthetic construct
  misc_feature 1..252: note = source = /note="Description of Artificial Sequence: Synthetic coding sequence"
  source 1..252: mol_type = other DNA
atggccctctcttctcagatttgggctgcgtgtttgttattgctcctgttgttggccagtttaaccagtgggagcgtgtttccacaacagacaggacagttggctgagttgcagccgcaggacagggcaggcgctcgtgcttcatggatgccaatgtttcagcgtcgtcgtcgacgggacacacacttcccaatctgtattttttgttgcggatgctgccaccgctcaaagtgcggaatgtgttgtaagaca

SEQ ID NO: 13705 - DNA, 252 bp, synthetic construct
  misc_feature 1..252: note = source = /note="Description of Artificial Sequence: Synthetic coding sequence"
  source 1..252: mol_type = other DNA
atggcactgtcctcccaaatatgggcagcttgcctcctcctgctgctgcttcttgcctcactgacttcgggatcagtgttcccccagcaaactggacaattggcagagcttcaaccacaggatcgcgctggtgcacgtgcgtcgtggatgcctatgtttcaacgtcgaagaaggagggacacccatttcccaatctgcattttctgctgtggctgttgccatagatccaagtgcggaatgtgttgcaagact

SEQ ID NO: 13706 - DNA, 252 bp, synthetic construct
  misc_feature 1..252: note = source = /note="Description of Artificial Sequence: Synthetic coding sequence"
  source 1..252: mol_type = other DNA
atggccctctcaagccaaatctgggctgcctgtctgttgctccttctgctcctggcctccctgacatcaggatctgtgttccctcagcagaccggccagctggccgagctccagccccaggacagggctggcgccagggctagttggatgcccatgttccagagaagaagaaggcgcgacacccatttcccaatctgtatcttctgctgcggctgttgtcacagatctaagtgcggtatgtgctgcaagaca

SEQ ID NO: 13707 - DNA, 252 bp, synthetic construct
  misc_feature 1..252: note = source = /note="Description of Artificial Sequence: Synthetic coding sequence"
  source 1..252: mol_type = other DNA
atggctctgtctagtcagatctgggctgcctgtctactgctcctcctcttgctggctagcctgaccagcgggagcgtcttcccacagcagaccggtcagcttgctgagctgcagcctcaagaccgcgcgggggcccgtgcctcttggatgccgatgttccagcggagaaggcgccgggacacacacttcccgatttgcatcttctgttgcggctgttgccatcgctccaagtgcggtatgtgctgcaagaca

SEQ ID NO: 13708 - DNA, 252 bp, synthetic construct
  misc_feature 1..252: note = source = /note="Description of Artificial Sequence: Synthetic coding sequence"
  source 1..252: mol_type = other DNA
atggctttgtcttcccagatttgggccgcttgtttgctcctcctcctgctcctggcctctcttacaagcggttccgtgtttccacagcagacaggacagctggcagagctgcaaccccaagatcgcgcaggggcacgagcatcatggatgcctatgtttcagaggaggagacgcagagacacacattttcctatctgcatcttttgctgcggatgttgccaccggtccaagtgtgggatgtgttgcaagact

SEQ ID NO: 13709 - DNA, 252 bp, synthetic construct
  misc_feature 1..252: note = source = /note="Description of Artificial Sequence: Synthetic coding sequence"
  source 1..252: mol_type = other DNA
atggctttgtcctcgcagatttgggcggcatgccttctgcttcttctgcttctcgccagcctgacctcaggatcggttttccctcagcagactgggcagctggcagaactccaaccgcaagatagagcaggtgcacgcgcatcatggatgccaatgtttcaaaggcgtagacgccgagacactcattttcctatttgtatcttttgctgtggttgctgccaccgttccaaatgtggcatgtgctgtaagacc

SEQ ID NO: 13710 - DNA, 252 bp, synthetic construct
  misc_feature 1..252: note = source = /note="Description of Artificial Sequence: Synthetic coding sequence"
  source 1..252: mol_type = other DNA
atggccctgtctagtcagatctgggctgcatgcctactgctgctgctgttgctggcatctttgacctcagggagtgtctttccccagcaaacgggccagttggccgaactgcagccccaggatcgggccggggcccgagccagctggatgcctatgtttcagagaaggaggcgtcgtgatacgcactttccaatttgcattttttgctgtggctgctgccacagatccaagtgcggaatgtgctgcaagaca

SEQ ID NO: 13711 - DNA, 252 bp, synthetic construct
  misc_feature 1..252: note = source = /note="Description of Artificial Sequence: Synthetic coding sequence"
  source 1..252: mol_type = other DNA
atggccctctcgtcgcagatttgggcagcttgcctgctgctcctacttttactggcgtccctaacatcgggctccgtttttccacagcagacaggccagctcgcagagctgcagccacaggatcgggctggggcgagagcctcctggatgcccatgttccagagaaggagacggagggacactcacttccccatatgcatcttctgctgcggatgctgtcatagaagtaagtgtgggatgtgttgcaaaact

SEQ ID NO: 13712 - DNA, 252 bp, synthetic construct
  misc_feature 1..252: note = source = /note="Description of Artificial Sequence: Synthetic coding sequence"
  source 1..252: mol_type = other DNA
atggcgctttcaagccagatctgggcagcttgcttgctgcttctgctactcctcgcatctctgacttctggatcagtgttcccccagcagaccggacagctggctgagctgcagcctcaggacagggcaggcgcaagggcgtcctggatgccaatgtttcagcggcggcgccggcgtgatactcactttccgatctgcattttttgctgtggttgctgtcaccggtcgaagtgcggcatgtgttgtaagaca

SEQ ID NO: 13713 - DNA, 252 bp, synthetic construct
  misc_feature 1..252: note = source = /note="Description of Artificial Sequence: Synthetic coding sequence"
  source 1..252: mol_type = other DNA
atggcactgagctcccaaatctgggcggcatgccttcttctgcttctgctgctcgcatcgcttacttctggctcggtgttcccacagcagaccgggcaattggccgagctccaacctcaggaccgggctggtgcgcgcgcgagctggatgccaatgtttcagcgaagaaggcgacgagatacccattttcctatctgtatcttctgttgcggttgctgtcaccggagcaagtgcggaatgtgttgtaagacc

SEQ ID NO: 13714 - DNA, 252 bp, synthetic construct
  misc_feature 1..252: note = source = /note="Description of Artificial Sequence: Synthetic coding sequence"
  source 1..252: mol_type = other DNA
atggcgttaagctcacagatctgggccgcctgtctgctgttgcttctgctattagccagcctgacatctggttctgtgttccctcagcaaacgggccagctagctgaattgcagcctcaggaccgcgccggcgccagggccagctggatgccgatgttccagcgccgccgccggagagatacacactttcctatttgcatcttttgctgtggatgctgccacagatcaaagtgtgggatgtgctgtaaaact

SEQ ID NO: 13715 - DNA, 252 bp, synthetic construct
  misc_feature 1..252: note = source = /note="Description of Artificial Sequence: Synthetic coding sequence"
  source 1..252: mol_type = other DNA
atggccttgagctcccagatctgggctgcctgcctgctcctgcttctgctcttggccagtctcacatccggtagcgtcttcccccagcaaaccggccagctggcagagctacaacctcaggaccgagccggggctcgtgcatcttggatgccaatgtttcagaggaggaggcgacgggatacacacttcccgatttgcattttttgttgcgggtgctgtcaccgatcaaaatgtgggatgtgttgcaagact

SEQ ID NO: 13716 - DNA, 252 bp, synthetic construct
  misc_feature 1..252: note = source = /note="Description of Artificial Sequence: Synthetic coding sequence"
  source 1..252: mol_type = other DNA
atggctctttcgtcacagatttgggcagcatgccttctgctgctgctgttgcttgcttcccttacttcagggtcggtgtttccccaacagactggacaacttgcagaactgcagccacaggatagagcaggagcacgagcatcatggatgcctatgtttcaacgcaggcgccgcagagacacccattttccgatttgtatattctgctgcgggtgttgccatagaagcaagtgtggaatgtgttgcaaaacc

SEQ ID NO: 13717 - DNA, 252 bp, synthetic construct
  misc_feature 1..252: note = source = /note="Description of Artificial Sequence: Synthetic coding sequence"
  source 1..252: mol_type = other DNA
atggctctttcgagccagatctgggccgcttgcctgctgctgctcttgcttcttgcttcgctgacttcaggatctgtgttcccacagcagactggacagctcgccgagctccagcctcaggatcgagccggcgcacgggcttcatggatgccgatgttccagcggcgcagacggcgggacacccactttcccatctgtatcttctgttgcggatgctgtcacagaagcaagtgcggaatgtgctgcaagacc

SEQ ID NO: 13718 - DNA, 252 bp, synthetic construct
  misc_feature 1..252: note = source = /note="Description of Artificial Sequence: Synthetic coding sequence"
  source 1..252: mol_type = other DNA
atggcactaagctcgcagatctgggcagcgtgtctcctgcttctccttttactagcttcactgacctccggtagcgtctttccgcagcagaccgggcaattggcggaactccagccccaggacagagccggcgcccgggcctcttggatgccaatgtttcagaggcgtaggcgtcgcgacacacactttcccatctgtattttctgctgcggctgttgtcataggtcaaaatgcggcatgtgctgcaagaca

SEQ ID NO: 13719 - DNA, 252 bp, synthetic construct
  misc_feature 1..252: note = source = /note="Description of Artificial Sequence: Synthetic coding sequence"
  source 1..252: mol_type = other DNA
atggcattgagcagccaaatctgggccgcttgcctgctgttgctcctcctccttgcttctcttactagcggaagcgtgtttccacaacagacagggcagctcgcggagttgcagccacaagatcgtgccggcgctcgtgcaagttggatgcctatgttccagagaaggagaaggcgggacacccacttcccgatttgtattttctgttgcggatgttgccatcgctctaaatgtggcatgtgttgtaaaact

SEQ ID NO: 13720 - DNA, 252 bp, synthetic construct
  misc_feature 1..252: note = source = /note="Description of Artificial Sequence: Synthetic coding sequence"
  source 1..252: mol_type = other DNA
atggcattgtcgtcgcaaatatgggcggcctgtctattgcttttgctgttactggctagcttgacatctggaagtgtcttcccgcagcaaacaggacagcttgccgaacttcagccacaagatcgtgccggcgcacgagcgtcgtggatgcccatgttccaaagacgcagacgtcgtgatacacattttcccatctgcattttttgttgcggctgttgtcatcgctccaaatgcgggatgtgctgtaagaca

SEQ ID NO: 13721 - DNA, 252 bp, synthetic construct
  misc_feature 1..252: note = source = /note="Description of Artificial Sequence: Synthetic coding sequence"
  source 1..252: mol_type = other DNA
atggctctgtcatcgcagatctgggctgcatgcctgcttctgctcctgcttctcgcaagcctcacttccggatccgtctttccgcagcagactggacaactggccgagctgcaaccacaggatagagcaggcgctcgcgccagctggatgcctatgtttcagagacgcaggaggcgggatacccatttccctatctgcatcttttgttgtggttgctgtcacagatcaaaatgcggcatgtgctgtaagacg

SEQ ID NO: 13722 - DNA, 252 bp, synthetic construct
  misc_feature 1..252: note = source = /note="Description of Artificial Sequence: Synthetic coding sequence"
  source 1..252: mol_type = other DNA
atggcactgagcagccagatctgggctgcttgcctgctactcctgctgctgttggcatcactgactagcggaagcgtgttccctcagcagacaggtcaactggccgagctacagccacaggaccgagccggcgctcgcgcttcttggatgccaatgttccagagacgccgaaggagagacactcattttccaatttgtatcttttgctgcgggtgctgccatcgctccaaatgtgggatgtgttgcaagacg

SEQ ID NO: 13723 - DNA, 252 bp, synthetic construct
  misc_feature 1..252: note = source = /note="Description of Artificial Sequence: Synthetic coding sequence"
  source 1..252: mol_type = other DNA
atggctctgtcttctcaaatctgggccgcctgcctcctgctgctgttgctgctggctagtctgacctcaggatcagtttttcctcagcaaacaggccagctggcggaacttcagccccaggatagagccggcgctagagcttcatggatgccgatgtttcagcggaggcgccgccgcgacacacacttcccgatttgtatattctgttgcgggtgctgtcaccgcagtaaatgtgggatgtgctgcaaaacg

SEQ ID NO: 13724 - DNA, 252 bp, synthetic construct
  misc_feature 1..252: note = source = /note="Description of Artificial Sequence: Synthetic coding sequence"
  source 1..252: mol_type = other DNA
atggctctgtcctcccaaatctgggcagcttgtctcctcttgctgctgttgctggcttcgctcacttccggatccgtgtttccgcagcaaactggacaactggcggagctgcagccacaggaccgggctggtgcccgcgcgtcttggatgccgatgtttcagcgccgcaggcggagagatacccacttcccgatctgtatcttctgctgcgggtgttgtcatcgctcaaagtgcggaatgtgctgtaagact

SEQ ID NO: 13725 - DNA, 252 bp, synthetic construct
  misc_feature 1..252: note = source = /note="Description of Artificial Sequence: Synthetic coding sequence"
  source 1..252: mol_type = other DNA
atggctctctctagccagatctgggctgcatgtcttctgcttctacttctgctcgcatcactgaccagtggcagcgtgttccctcaacaaaccggccagctggctgaactccagccacaggacagagcaggggctcgtgccagctggatgcccatgtttcagagaagacggagaagagacacacatttccctatttgcattttttgttgcggatgttgccataggagcaaatgcgggatgtgctgtaagaca

SEQ ID NO: 13726 - DNA, 252 bp, synthetic construct
  misc_feature 1..252: note = source = /note="Description of Artificial Sequence: Synthetic coding sequence"
  source 1..252: mol_type = other DNA
atggctctctcatcccagatctgggcagcttgtcttctgctcctcttgctgcttgccagtttgaccagcggatcagtgttcccccaacagacgggccagctggcagagctgcagccccaggaccgcgctggcgctcgggcttcttggatgcctatgttccagagaagacggagaagagacacccacttccccatctgcatcttctgttgtgggtgctgtcatcggagtaagtgtggcatgtgttgcaaaaca

SEQ ID NO: 13727 - DNA, 252 bp, synthetic construct
  misc_feature 1..252: note = source = /note="Description of Artificial Sequence: Synthetic coding sequence"
  source 1..252: mol_type = other DNA
atggcgctttcatcgcaaatctgggccgcttgtctccttctcctgctccttttggcatcccttacctcgggtagcgtgttcccccaacagactggtcagctcgctgaactgcagcctcaggatcgcgcaggagcaagagctagctggatgcctatgtttcaaagacgccgccgtcgggacacccatttcccgatttgcatcttttgctgtggatgctgtcaccgatcgaagtgtggcatgtgttgtaagact

SEQ ID NO: 13728 - DNA, 252 bp, synthetic construct
  misc_feature 1..252: note = source = /note="Description of Artificial Sequence: Synthetic coding sequence"
  source 1..252: mol_type = other DNA
atggccctctcgtcccagatctgggccgcttgtctccttctcctgctcttactggcgtcccttactagtggaagtgtgtttccacagcagaccggacagctcgcagagctgcaaccacaggatcgagccggagctcgagcaagctggatgcctatgtttcagaggaggaggaggagggacacacactttcctatctgtatcttttgttgcggatgctgtcatcggagtaaatgcggcatgtgttgcaaaaca

SEQ ID NO: 13729 - DNA, 252 bp, synthetic construct
  misc_feature 1..252: note = source = /note="Description of Artificial Sequence: Synthetic coding sequence"
  source 1..252: mol_type = other DNA
atggccctgtcgtcacagatttgggcagcgtgtctgcttttgctcttgctccttgcctccctgacttccggatcggtgtttccgcaacaaaccggccagcttgcagagctccaacctcaggatcgggccggtgcacgtgcaagctggatgccaatgtttcaacgaaggaggcggcgcgacactcatttccctatatgcatcttttgttgcgggtgttgccatcgatcgaagtgtggtatgtgttgcaaaacc

SEQ ID NO: 13730 - DNA, 252 bp, synthetic construct
  misc_feature 1..252: note = source = /note="Description of Artificial Sequence: Synthetic coding sequence"
  source 1..252: mol_type = other DNA
atggcattgagctcacagatatgggcagcatgcctgttgctgctgctactgctggcctctctcacaagtggtagtgtgttcccacagcagaccgggcagcttgccgagctgcagccgcaagatcgagccggcgcccgagctagctggatgcctatgttccagcgaaggagacgaagggacacccattttcccatctgcatcttctgttgcggctgctgtcataggtcgaaatgcggaatgtgttgcaagacg

SEQ ID NO: 13731 - DNA, 252 bp, synthetic construct; identical to SEQ ID NO: 13679
  misc_feature 1..252: note = source = /note="Description of Artificial Sequence: Synthetic coding sequence"
  source 1..252: mol_type = other DNA

SEQ ID NO: 13732 - DNA, 252 bp, synthetic construct
  misc_feature 1..252: note = source = /note="Description of Artificial Sequence: Synthetic coding sequence"
  source 1..252: mol_type = other DNA
atggccctttcatcccagatttgggcggcttgcctgctcctgctgttgctcttggcgtccctgacttcggggtcggtgtttccgcagcagactggtcagcttgccgagctgcagcctcaagatcgcgcaggagcgcgcgcctcctggatgcctatgttccagcgccggcggcggagggatactcacttcccgatctgcatcttctgttgcggctgctgtcaccgctcgaagtgcggaatgtgctgcaagact

SEQ ID NO: 13733 - DNA, 252 bp, synthetic construct
  misc_feature 1..252: note = source = /note="Description of Artificial Sequence: Synthetic coding sequence"
  source 1..252: mol_type = other DNA
atggcgttaagctctcagatatgggccgcctgcctgctcctgctactccttttggcaagtcttacgtcaggctccgtgtttcctcagcagacgggtcaactggccgagctgcagccacaggatagagccggtgctcgtgcttcctggatgcccatgtttcagagaaggaggaggcgggacacacactttccaatttgcatcttctgttgcggctgctgtcatcggtccaaatgtggaatgtgttgtaaaact

SEQ ID NO: 13734 - DNA, 252 bp, synthetic construct
  misc_feature 1..252: note = source = /note="Description of Artificial Sequence: Synthetic coding sequence"
  source 1..252: mol_type = other DNA
atggccttgtcatctcagatttgggcagcctgcctccttctgctgctgcttttggcttctctcacatcaggaagcgtattcccccagcagacaggacagctggcagagctacagccccaggatcgcgctggcgcacgagcctcttggatgcctatgttccagcgacgcaggcgaagagatacccatttccccatttgtattttctgctgcggctgctgccatcgatcaaagtgcgggatgtgctgcaagacc

SEQ ID NO: 13735 - DNA, 252 bp, synthetic construct
  misc_feature 1..252: note = source = /note="Description of Artificial Sequence: Synthetic coding sequence"
  source 1..252: mol_type = other DNA
atggctctgagttcgcagatttgggctgcctgcctgctcttactgttgctgctagcctccctgacaagcggttccgtattcccacagcagactgggcaattagccgagttacagccgcaggaccgcgccggggctcgcgcatcgtggatgcctatgtttcaacgccgccgacgccgagatacgcatttccctatttgtatcttctgctgtggatgttgccataggtcaaaatgtggtatgtgttgcaagacg

SEQ ID NO: 13736 - DNA, 252 bp, synthetic construct
  misc_feature 1..252: note = source = /note="Description of Artificial Sequence: Synthetic coding sequence"
  source 1..252: mol_type = other DNA
atggccttgagcagtcaaatttgggccgcctgtctgttgttacttttgcttctcgccagtctcacatcagggtctgtgtttcctcagcaaaccgggcagctggctgagcttcaaccacaggaccgcgccggggctcgcgcttcttggatgcccatgtttcagagaaggcgccgaagagatacccacttcccaatctgcatcttctgctgtggctgctgccatcggtcgaaatgcggcatgtgttgtaagaca

SEQ ID NO: 13737 - DNA, 252 bp, synthetic construct
  misc_feature 1..252: note = source = /note="Description of Artificial Sequence: Synthetic coding sequence"
  source 1..252: mol_type = other DNA
atggctctgtcatcacagatttgggcggcctgcctactcttactgcttttactagcaagcctcacgagcggcagtgtttttccacaacagacggggcagctggccgagttacagcctcaggaccgagctggggcacgtgcatcttggatgcctatgttccaacgccggagacgcagagacacccatttcccaatctgcattttctgttgtggctgttgccaccgctccaagtgcgggatgtgttgcaagacg

SEQ ID NO: 13738 - DNA, 252 bp, synthetic construct
  misc_feature 1..252: note = source = /note="Description of Artificial Sequence: Synthetic coding sequence"
  source 1..252: mol_type = other DNA
atggctctctcttctcagatatgggcggcatgcctgctactcctcctccttcttgcctccctgacatcgggatccgtgtttccacagcagacaggacagctagctgagctgcagccacaggatagagcgggagccagggcatcttggatgcctatgtttcagcgacggaggcggcgcgacacacatttccctatatgtatattctgttgtggatgttgtcaccggtctaaatgcggaatgtgctgtaaaaca

SEQ ID NO: 13739 - DNA, 252 bp, synthetic construct
  misc_feature 1..252: note = source = /note="Description of Artificial Sequence: Synthetic coding sequence"
  source 1..252: mol_type = other DNA
atggcccttagctcacagatctgggccgcctgtttgctcctcctgctcctgctggcgagcctgacgagtggttcagtgttccctcagcagactggacagctggcggagctgcagccccaggaccgagcaggcgcgcgagctagctggatgcctatgttccagaggcgcagacgtcgcgacacccattttcccatctgtatcttttgctgcggttgttgccaccgtagtaagtgcggcatgtgctgcaagacc

SEQ ID NO: 13740 - DNA, 252 bp, synthetic construct
  misc_feature 1..252: note = source = /note="Description of Artificial Sequence: Synthetic coding sequence"
  source 1..252: mol_type = other DNA
atggctttgagcagccagatttgggcagcttgcctcttgctgctgctcctcctcgcttccctgacctcaggcagcgtgtttccccagcagaccggacaactcgcagaacttcaaccacaggatagagcgggcgctcgggccagttggatgccaatgttccagcgacggcgcagacgcgacacccacttccccatatgcatattttgttgtggttgctgccaccggagtaaatgcggaatgtgttgtaagacg

SEQ ID NO: 13741 - DNA, 252 bp, synthetic construct
  misc_feature 1..252: note = source = /note="Description of Artificial Sequence: Synthetic coding sequence"
  source 1..252: mol_type = other DNA
atggctctgagctctcagatttgggccgcttgcctgctcctgctgttacttctagccagcctgacaagcggctcagtcttcccgcagcagacaggacaactagcggaactccagccccaagaccgggctggcgctagagcatcatggatgcccatgtttcaaaggagaagaaggagggacacacactttcccatatgcatcttctgttgtggctgctgtcaccgctcaaaatgcgggatgtgctgtaagacc

SEQ ID NO: 13742 - DNA, 252 bp, synthetic construct
  misc_feature 1..252: note = source = /note="Description of Artificial Sequence: Synthetic coding sequence"
  source 1..252: mol_type = other DNA
atggccctgagttcccaaatctgggctgcctgcctgctccttcttctactccttgcgagcctcacgtccggctctgtgttcccgcagcagacagggcagttggcggagctgcagccacaggatagagccggcgctcgtgcctcatggatgccgatgtttcagcggcgcagacgcagagacacgcatttccctatttgcatattctgctgtggatgctgtcacagatccaagtgtggcatgtgttgcaagact

SEQ ID NO: 13743 - DNA, 252 bp, synthetic construct
  misc_feature 1..252: note = source = /note="Description of Artificial Sequence: Synthetic coding sequence"
  source 1..252: mol_type = other DNA
atggccttgtcctcgcaaatttgggcagcatgcctgctgctgcttcttttgctggcgtcacttacttccggttcagtgttcccacaacagaccggacagctcgcagaacttcagccacaagatcgcgcaggtgcaagagcgtcgtggatgccaatgtttcaacgtcgtagacggcgcgacactcattttcctatttgcattttctgttgtgggtgttgtcaccggagcaagtgcggtatgtgctgtaagacc

SEQ ID NO: 13744 - DNA, 252 bp, synthetic construct
  misc_feature 1..252: note = source = /note="Description of Artificial Sequence: Synthetic coding sequence"
  source 1..252: mol_type = other DNA
atggctctttcctcacagatctgggcagcttgtctgcttctgctattgcttttggcaagtctgacctccggaagtgtttttccacagcagaccggccagttagcagagctgcaaccacaggatagagcaggagcacgcgcctcctggatgccgatgttccagagacgccgaaggcgcgatacgcacttccccatctgcattttctgttgcggatgttgccaccggtccaaatgtggaatgtgctgcaagacc

SEQ ID NO: 13745 - DNA, 252 bp, synthetic construct
  misc_feature 1..252: note = source = /note="Description of Artificial Sequence: Synthetic coding sequence"
  source 1..252: mol_type = other DNA
atggccttgagctcacagatttgggcagcgtgtctgctcctgctgctgcttctcgccagcctcacctccgggtccgtctttccgcaacaaaccggacaacttgcagaactgcagcctcaggaccgcgcgggcgcaagagcctcctggatgcctatgttccagcggcgccggagacgcgacacccacttccccatttgcatcttctgttgcggatgctgtcacagatcgaagtgcggcatgtgctgtaagacc

SEQ ID NO: 13746 - DNA, 252 bp, synthetic construct
  misc_feature 1..252: note = source = /note="Description of Artificial Sequence: Synthetic coding sequence"
  source 1..252: mol_type = other DNA
atggcgctgtcctcgcagatttgggcagcctgccttctccttctgttgctgttggctagcctgacttccggatcagtgttcccccaacaaaccgggcaactggcagaacttcagcctcaagacagagcaggcgcccgagcatcatggatgccaatgtttcaacgccgtagaagaagggatacccatttccccatatgcatcttctgttgcggctgctgtcacagatccaagtgtggaatgtgttgtaagact

SEQ ID NO: 13747 - DNA, 252 bp, synthetic construct
  misc_feature 1..252: note = source = /note="Description of Artificial Sequence: Synthetic coding sequence"
  source 1..252: mol_type = other DNA
atggccctgtcgagccaaatatgggccgcttgcttgctccttttgcttctcttggcctcgcttacctcaggatcggtgtttcctcagcagaccggacaactcgccgagcttcaaccgcaagatcgagcaggcgcaagagcgagctggatgcctatgttccaaaggcgacgcagacgggacacccactttccaatctgtattttctgctgtggatgttgccacaggtccaagtgtggaatgtgctgtaagact

SEQ ID NO: 13748 - DNA, 252 bp, synthetic construct
  misc_feature 1..252: note = source = /note="Description of Artificial Sequence: Synthetic coding sequence"
  source 1..252: mol_type = other DNA
atggcattgtccagccagatctgggcagcatgcctcctgctcttgttgctgttggcatctttgactagtggtagtgtatttccacagcagacaggccagctggctgagttgcagccccaagatagagccggcgcgagggcatcatggatgcctatgtttcagcgcaggagacgcagggatactcatttcccgatctgcatcttttgttgcggatgctgtcatcgctctaagtgtggaatgtgttgtaaaacc

SEQ ID NO: 13749 - DNA, 252 bp, synthetic construct
  misc_feature 1..252: note = source = /note="Description of Artificial Sequence: Synthetic coding sequence"
  source 1..252: mol_type = other DNA
atggctttatcttctcaaatatgggctgcttgtcttcttcttttgttacttttagcttctcttacatcaggatcagtttttccacaacaaacaggacaattagcagaattacaaccacaagacagagcaggagctagggcttcttggatgccaatgtttcaacgtagacgaagaagagatacacattttcctatatgcatattttgttgtggttgttgtcatagaagtaaatgtggaatgtgttgtaagaca

SEQ ID NO: 13750 - DNA, 252 bp, synthetic construct
  misc_feature 1..252: note = source = /note="Description of Artificial Sequence: Synthetic coding sequence"
  source 1..252: mol_type = other DNA
atggcgttatcgtcgcaaatatgggcggcgtgtctattattattactactactagcgtcgttaacgtcgggttcggtatttccgcaacaaacgggtcaactagcggaactacaaccgcaagatcgtgcgggtgcgcgagcgtcgtggatgccgatgtttcaacgtcgacgtcgtcgagatacgcattttccgatatgtatattttgttgtggttgttgtcatcgttcgaaatgtggtatgtgttgtaaaacg

SEQ ID NO: 13751 - DNA, 252 bp, synthetic construct
  misc_feature 1..252: note = source = /note="Description of Artificial Sequence: Synthetic coding sequence"
  source 1..252: mol_type = other DNA
atggctctcagctctcagatatgggcagcgtgtttactgttgctcttgttgctggcctcccttaccagtggttctgttttcccacagcaaactggccagctagccgagctgcagccacaggatcgcgccggtgctagggcctcttggatgccaatgttccagcgtcggcggcgcagggacacccattttccaatatgtattttttgttgcggatgctgtcaccggagcaagtgtggcatgtgctgtaagaca

SEQ ID NO: 13752 - DNA, 252 bp, synthetic construct
  misc_feature 1..252: note = source = /note="Description of Artificial Sequence: Synthetic coding sequence"
  source 1..252: mol_type = other DNA
atggcccttagctcgcagatatgggcagcatgtttgctgctgcttcttctgttggcctcgctgacttcaggtagcgtgtttccacaacagaccgggcaactcgcagaactccagccgcaggatagagcaggtgcccgggcatcgtggatgcctatgttccaacggcggaggcgaagagacactcactttcctatttgcatcttttgctgtggctgttgtcataggtccaaatgtggcatgtgctgcaagacc

SEQ ID NO: 13753 - DNA, 252 bp, synthetic construct
  misc_feature 1..252: note = source = /note="Description of Artificial Sequence: Synthetic coding sequence"
  source 1..252: mol_type = other DNA
atggcgctcagcagtcagatttgggcggcgtgcctcctgttgctcttgctcctggcctcgctgacctccggatccgtcttccctcagcaaaccggccaactggccgaactgcagccgcaggatcgggctggtgcgagagcaagctggatgcctatgttccagcggcgccggcgcagagacactcattttccaatttgtatcttctgttgcgggtgctgccaccggtcgaagtgcggcatgtgctgcaagact

SEQ ID NO: 13754 - DNA, 252 bp, synthetic construct
  misc_feature 1..252: note = source = /note="Description of Artificial Sequence: Synthetic coding sequence"
  source 1..252: mol_type = other DNA
atggcactcagttcgcagatatgggcagcctgtctacttcttcttctactgctagcctctctcacatctgggtctgttttccctcagcagacagggcagctggcggaactacagccccaggatagggccggggctcgggcctcgtggatgcccatgtttcagagaaggagacgacgcgatactcacttccctatttgcattttctgctgtggatgttgtcaccggtccaaatgtgggatgtgttgcaaaact

SEQ ID NO: 13755 - DNA, 252 bp, synthetic construct
  misc_feature 1..252: note = source = /note="Description of Artificial Sequence: Synthetic coding sequence"
  source 1..252: mol_type = other DNA
atggctctttctagccagatatgggccgcttgtttgctcctgttgctgctgctcgcgtcccttacatccggttcagtgtttcctcaacagaccggtcaacttgcggagttgcagccccaggatagagctggggcaagagcctcttggatgcctatgttccagcgtaggcgtcggcgggacactcatttcccaatctgtatcttctgttgtgggtgctgccaccgcagcaaatgtggcatgtgttgtaaaacc

SEQ ID NO: 13756 - DNA, 252 bp, synthetic construct
  misc_feature 1..252: note = source = /note="Description of Artificial Sequence: Synthetic coding sequence"
  source 1..252: mol_type = other DNA
atggcactgtcctctcagatttgggcagcgtgtctgctgcttcttttgctgttggcaagccttacctcgggttcggtgttccctcagcagaccggacaacttgccgaactgcagccgcaagatcgagccggagcgcgggcttcgtggatgcctatgtttcagaggcgtagacgaagggacacgcactttccaatttgtatcttttgttgcggatgttgccatcgctcgaaatgcgggatgtgctgcaagacg

SEQ ID NO: 13757 - DNA, 252 bp, synthetic construct
  misc_feature 1..252: note = source = /note="Description of Artificial Sequence: Synthetic coding sequence"
  source 1..252: mol_type = other DNA
atggctctctcgagccagatttgggccgcgtgtctgctcctgttgctgttgctcgcttcactgactagcggatctgtgttcccgcaacagactgggcagctggcagagcttcagccacaagatagagcgggggcacgagcgtcctggatgccgatgttccagagaaggcgccggcgcgacacccatttccctatctgtatcttctgctgcggttgctgtcacagatccaagtgtggtatgtgctgcaaaact

SEQ ID NO: 13758 - DNA, 252 bp, synthetic construct
  misc_feature 1..252: note = source = /note="Description of Artificial Sequence: Synthetic coding sequence"
  source 1..252: mol_type = other DNA
atggctttatctagccagatatgggccgcatgcctgcttctcctgctgctcctcgctagcctaactagtggttctgttttccctcagcagacaggacagctggccgagctgcagccacaggacagagccggagctagagcgtcctggatgccaatgtttcagagacgccggagaagagatacacatttcccgatttgcatcttttgctgtggatgttgtcacagaagcaagtgcggcatgtgctgtaagaca

SEQ ID NO: 13759 - DNA, 252 bp, synthetic construct
  misc_feature 1..252: note = source = /note="Description of Artificial Sequence: Synthetic coding sequence"
  source 1..252: mol_type = other DNA
atggcactgtctagtcagatttgggccgcgtgtcttctgttactcctgctcctggcctccctcacaagcggatccgtattccctcagcagaccggacaactggccgaactgcagccacaggacagagcgggcgcccgggctagctggatgcctatgtttcagcgacgtcgcagaagggacacccacttccccatctgcatcttttgttgcggttgctgtcacagatccaaatgtgggatgtgctgcaagacg

SEQ ID NO: 13760 - DNA, 252 bp, synthetic construct
  misc_feature 1..252: note = source = /note="Description of Artificial Sequence: Synthetic coding sequence"
  source 1..252: mol_type = other DNA
atggctttaagcagtcagatttgggctgcctgtttacttctccttcttctattggcaagcttgacatctggctccgtgttcccccagcagacgggacagcttgccgagctgcagccacaggaccgcgccggtgcccgagcctcttggatgcctatgttccagaggcgacgtaggagggacacccatttcccgatttgcatcttttgctgtgggtgctgccaccgatctaaatgcggtatgtgttgcaaaacg

SEQ ID NO: 13761 - DNA, 252 bp, synthetic construct
  misc_feature 1..252: note = source = /note="Description of Artificial Sequence: Synthetic coding sequence"
  source 1..252: mol_type = other DNA
atggcactgtcgtcgcagatctgggcggcatgcctccttctcctgctgctcctcgcgtccctgaccagcggttcggtgtttccacagcagaccggacagcttgccgagctgcagccacaagaccgggctggagccagagcaagctggatgcctatgtttcaacgccgacggaggcgcgatacccactttccgatttgcatcttctgctgcggctgttgtcatcgctcgaaatgcggaatgtgctgcaagact

SEQ ID NO: 13762 - DNA, 252 bp, synthetic construct
  misc_feature 1..252: note = source = /note="Description of Artificial Sequence: Synthetic coding sequence"
  source 1..252: mol_type = other DNA
atggccctgtcttctcaaatatgggcagcatgcctgctgctgttattactgcttgccagcctgacaagcggctcagtcttccctcagcagactggccagcttgccgaactacagccccaggacagggcaggcgctcgtgcctcctggatgcccatgttccagcgccgccgccgtcgggacacccacttccctatttgtatcttttgctgtggatgctgtcacaggagcaagtgcggtatgtgctgcaaaacc

SEQ ID NO: 13763 - DNA, 252 bp, synthetic construct
  misc_feature 1..252: note = source = /note="Description of Artificial Sequence: Synthetic coding sequence"
  source 1..252: mol_type = other DNA
atggcgctctcctcacagatatgggctgcttgcctgctgcttctgctcctccttgcgtcgctgacttcgggatcggtctttccacagcaaaccggacaacttgccgaactgcagccgcaagaccgcgcaggggcaagagcgtcctggatgcctatgtttcagcgtagacgccggagagatactcacttcccaatttgtattttctgttgtggatgttgtcatcgttcgaagtgtggaatgtgctgcaagacg

SEQ ID NO: 13764 - DNA, 252 bp, synthetic construct
  misc_feature 1..252: note = source = /note="Description of Artificial Sequence: Synthetic coding sequence"
  source 1..252: mol_type = other DNA
atggccctgtccagtcagatatgggcagcttgcctccttctgctgttgttgctggcgagcctgacatctggatccgtgttccctcagcagaccggccagctcgctgagctccagccccaggatcgggcaggggcccgtgcttcgtggatgccgatgttccagcgccgcaggcggcgcgacacgcacttcccaatctgcatcttttgttgcggctgctgccaccgcagcaaatgtggcatgtgttgtaaaaca

SEQ ID NO: 13765 - DNA, 654 bp, synthetic construct
  misc_feature 1..654: note = source = /note="Description of Artificial Sequence: Synthetic coding sequence"
  source 1..654: mol_type = other DNA
atggctacacggtcgccaggagtagtcatttcagacgatgaacctggatacgacttggacctcttctgtattcctaaccattatgccgaagatttggagagagtttttatcccacatggattgattatggatcgtacggagaggttagctagggacgtgatgaaagaaatgggaggacaccacatcgttgcgttgtgtgttcttaaaggtggttataaattctttgcagacctccttgactacattaaagcgctcaacagaaactcggatcgttctattccaatgaccgtggactttatacgtcttaaatcttattgcaatgatcaatctacaggggatatcaaggttataggaggagatgatctcagtacactgactggaaaaaatgttcttatagtagaagatatcattgatactggaaaaacaatgcaaaccttgttgtctctggtccgacagtacaatccaaaaatggtgaaagtggcttccttgttggtcaagcgaaccccaagatcagtgggttataaaccagattttgttggatttgagattcccgataaattcgtcgtgggatacgcattagattacaatgaatattttcgtgatttaaaccatgtttgcgttatttcggaaacgggtaaagccaaatataaagca

SEQ ID NO: 13766 - DNA, 654 bp, synthetic construct
  misc_feature 1..654: note = source = /note="Description of Artificial Sequence: Synthetic coding sequence"
  source 1..654: mol_type = other DNA
atggcaacgcggagtccgggagtggtgatttcagacgatgaaccgggatacgatctggacttattctgcatacctaatcactacgctgaagacctcgaacgcgtttttataccccatggtctgattatggaccgtactgaacgcctggcacgagatgtgatgaaggaaatgggcggccatcatatcgtggcgctctgcgtccttaaaggcggctataaattctttgccgatctactggattatatcaaggcccttaacaggaattcagataggtcaatccctatgacggtggactttatccggttaaaatcatattgtaacgaccaatcaacgggtgacatcaaagtcataggtggagacgatttgtctactctcacaggtaagaacgtgttgatcgtagaagatataattgacacagggaagacaatgcagactctgctcagcctcgtacgtcaatacaatcccaagatggtcaaggtggcatccctcttggtaaagaggacaccgcggtcagtgggttacaaacccgattttgtaggattcgagatacccgacaagttcgttgtgggatacgccctggactacaatgaatactttagagacctgaatcatgtgtgtgttataagtgaaactggcaaagccaagtacaaggcc

SEQ ID NO: 13767 - DNA, 654 bp, synthetic construct
  misc_feature 1..654: note = source = /note="Description of Artificial Sequence: Synthetic coding sequence"
  source 1..654: mol_type = other DNA
atggcaacgcgatcgccgggggtcgtcataagtgacgatgaaccggggtacgaccttgacctcttttgcatccctaaccactacgccgaggatctggaacgtgtgttcatcccacatggactgattatggatcgaaccgagagactggcaagagacgtgatgaaggagatgggaggccaccatatagtggctctctgtgtacttaaaggaggatacaagttttttgcggaccttttggattacattaaagcacttaaccgcaacagcgaccgttcaattcccatgactgtcgactttattcggcttaagtcctattgtaacgatcaatctaccggcgacataaaagtgattggaggggatgatctgtctaccttgacgggaaagaatgtgctcatcgtagaggacattattgatactggtaagaccatgcaaactttgctctcgcttgtgaggcagtacaatcctaagatggtgaaggtcgcatccttgctggttaagcgcactccacgctcagtcggctacaaacctgacttcgttggttttgaaatccccgataagtttgtggtcggctacgccctcgattacaacgaatacttccgggatctgaatcatgtgtgcgtgatttcagaaactggtaaagcaaagtacaaggcg

SEQ ID NO: 13768 - DNA, 654 bp, synthetic construct
  misc_feature 1..654: note = source = /note="Description of Artificial Sequence: Synthetic coding sequence"
  source 1..654: mol_type = other DNA
atggccaccagatcccccggcgtggtgatcagcgatgatgaacccggttacgacctggatctcttttgtattcctaaccactatgctgaggacctcgagcgggtattcatcccccacgggcttatcatggatcgaacagaacgtctggctcgcgatgtgatgaaagaaatgggcggacaccacattgtagctctctgcgtcttaaagggcggctataaattcttcgccgatttgctggactatatcaaggctttgaacaggaatagtgaccggagcatccccatgacggtggatttcatcagacttaagtcctactgtaacgatcagtcaacaggtgatatcaaagtcattggcggtgatgatctgagtaccctgactgggaaaaacgtcctcattgtggaggacattatcgatacagggaaaacaatgcagactctcttgtcacttgtgcgccagtataacccgaagatggtcaaagtggcaagcctgcttgttaagagaaccccccgctctgtcgggtataagccagactttgtcggatttgagatccctgacaagttcgttgttggatatgcgctcgattacaacgaatacttcagagacctcaatcacgtgtgtgtgatttccgaaacagggaaggctaaatataaggcc

SEQ ID NO: 13769 - DNA, 654 bp, synthetic construct
  misc_feature 1..654: note = source = /note="Description of Artificial Sequence: Synthetic coding sequence"
  source 1..654: mol_type = other DNA
atggctaccagatccccgggagtggtgatctcagacgatgagccgggatacgatctcgacctgttttgcattcccaaccactacgccgaagatctggagcgggtgtttatcccacacggtctgatcatggacaggactgagcgcctggcccgcgacgtgatgaaagaaatgggcggacatcacatcgtcgcgctgtgcgtgctgaagggaggatacaagttcttcgctgatctgctggactacatcaaggcgctcaaccgcaattccgaccggtccatcccgatgactgtggacttcattaggctgaagtcatactgcaatgaccaatcgacgggggacatcaaggtcatcggcggagacgatctgtcgaccctgacgggcaagaacgtcttgatcgtggaagatatcattgataccggaaagactatgcaaaccctgctcagtctggttcggcaatacaatccgaagatggtgaaagtggcgtctctgcttgtgaagcgcaccccacgcagcgtgggctacaagccagatttcgtgggatttgaaattcccgataagttcgtggtgggctatgcgttggattacaacgaatactttagagacttgaatcatgtctgcgtgatttcagaaactgggaaagccaaatacaaggca

SEQ ID NO: 13770 - DNA, 654 bp, synthetic construct
  misc_feature 1..654: note = source = /note="Description of Artificial Sequence: Synthetic coding sequence"
  source 1..654: mol_type = other DNA
atggcaactcgttccccaggcgtggtgatatcggatgacgagccaggatacgatcttgaccttttttgcatccctaaccattacgccgaagatctggaaagagtgtttattccgcatggattgataatggatagaaccgagagactggcccgtgatgtgatgaaagagatgggtgggcaccacatcgtggcactttgtgtccttaaaggtggctacaagttctttgctgatcttctggattacattaaagcactgaatcgtaattcggaccgatcaataccaatgaccgtcgatttcattaggctcaagagctactgcaacgatcagagcaccggagatatcaaagtgatcgggggtgatgatctgtccactctcactggaaaaaacgttcttattgtggaagatatcatcgatactggaaagactatgcaaactcttttgtcgctggtgagacagtacaatcctaaaatggtcaaggttgcatcccttcttgtgaagagaaccccgagaagtgtcgggtacaagcctgatttcgtgggattcgaaatccctgacaaatttgtggtcggctacgctctcgactataatgaatactttcgggaccttaatcacgtgtgtgtgatttccgaaaccggaaaggcaaagtacaaggca

SEQ ID NO: 13771 - DNA, 654 bp, synthetic construct
  misc_feature 1..654: note = source = /note="Description of Artificial Sequence: Synthetic coding sequence"
  source 1..654: mol_type = other DNA
atggcaactcgctccccaggtgtggtgatttccgatgacgaacccggttacgacttggacttgttttgtatccctaaccattacgccgaagatttggaacgcgtgtttattccacacgggctcattatggaccgtaccgaaagacttgcccgagatgtgatgaaggaaatgggagggcatcatattgtggctctgtgcgtgctgaaaggcggctacaagttttttgcagatctcttggattacatcaaggcccttaatcgcaactcggacagatctattccaatgaccgtggacttcattcgactgaagtcatactgcaacgatcagtccaccggtgacattaaggtgatcggtggagatgacctgtccacccttaccgggaaaaatgtacttattgtggaggacataatagatacgggtaagaccatgcagactcttttgagccttgtgcgccaatacaatcccaagatggtgaaggttgcgagccttctggtcaagcgcactcctagatcagtcggatacaagccggattttgtgggctttgagattcctgacaaattcgttgtgggctacgcactggactataacgaatacttccgggacctgaaccacgtgtgtgtgatatccgagactggtaaggcgaagtacaaagca

SEQ ID NO: 13772 - DNA, 654 bp, synthetic construct
  misc_feature 1..654: note = source = /note="Description of Artificial Sequence: Synthetic coding sequence"
  source 1..654: mol_type = other DNA
atggccacgcgatctccaggggtggtcataagcgacgatgagcctgggtacgaccttgacctgttttgtatccccaatcactatgcagaggatttggaaagggtcttcatccctcacggcttaatcatggacaggaccgaacggctggctcgagatgtgatgaaagaaatgggtggccaccacattgtggctctttgcgtgctgaaagggggatataagttctttgccgaccttctggattacattaaggctctgaaccggaattcagaccgttccattccgatgacagtggacttcattcgccttaaaagttattgtaatgaccaatctacaggcgacataaaggtgataggcggagacgacctgtcaactctgaccgggaagaacgtcctcattgtcgaggatatcatagacactgggaagacgatgcagacactactgtccctggtccgtcagtataacccaaaaatggtgaaagtggcttctctgctggtaaaaagaaccccacgatccgtggggtataagccagactttgttggcttcgaaatacctgacaaattcgtggtcggctatgccctggactataacgagtacttccgagacctcaaccacgtgtgcgtgatcagcgaaacgggaaaagccaagtataaagct

SEQ ID NO: 13773 - DNA, 654 bp, synthetic construct
  misc_feature 1..654: note = source = /note="Description of Artificial Sequence: Synthetic coding sequence"
  source 1..654: mol_type = other DNA
atggctactcgttcccctggggtagtcatctcggatgatgaacccggctacgatttagacttgttttgcatccctaaccactatgccgaagaccttgaacgcgtattcatccctcacgggcttatcatggatcggactgagaggttggcaagggacgtcatgaaggagatgggcgggcatcacattgtagcgctgtgcgttctaaagggcggatacaaattctttgcggacttgcttgactatataaaagcccttaataggaacagtgaccgaagtatccctatgactgtcgatttcattcggctgaaatcctattgcaacgatcaatccactggagacatcaaagtgattggtggagacgatctttctacattaactggtaagaatgtcttgatagttgaagacataatcgataccgggaagaccatgcagacccttctctctttggttcgacaatataaccctaagatggtaaaggtggcaagtctgctcgtgaaacgtactcccaggagtgttggttacaaacctgacttcgtgggattcgagatcccagacaagttcgtggttggctacgctctagactataacgagtacttccgcgatctaaaccatgtttgtgtaatcagtgagacagggaaggcgaagtacaaagcc

SEQ ID NO: 13774 - DNA, 654 bp, synthetic construct
  misc_feature 1..654: note = source = /note="Description of Artificial Sequence: Synthetic coding sequence"
  source 1..654: mol_type = other DNA
atggcgacgcgatcgccgggtgttgtaatatcggatgatgaaccgggttatgatctagatttattttgtataccgaatcattatgcggaagatttagaacgtgtttttataccgcatggtttaataatggatcgaacggaacgtttagcgcgtgatgttatgaaagaaatgggtggtcatcatatagtagcgttatgtgtattaaaaggtggttataaattttttgcggatttattagattatataaaagcgttaaatcgtaattcggatcgatcgataccgatgacggtagattttatacgattaaaatcgtattgtaatgatcaatcgacgggtgatataaaagtaataggtggtgatgatctatcgacgttaacgggtaaaaatgtattaatagtagaagatataatagatacgggtaaaacgatgcaaacgttattatcgttagttcgtcaatataatccgaaaatggttaaagttgcgtcgctactagttaaacgaacgccgcgttcggtaggttataaaccggattttgtaggttttgaaataccggataaatttgtagtaggttatgcgctagattataatgaatattttcgtgatttaaatcatgtttgtgttatatcggaaacgggtaaagcgaaatataaagcg

SEQ ID NO: 13775 - DNA, 654 bp, synthetic construct
  misc_feature 1..654: note = source = /note="Description of Artificial Sequence: Synthetic coding sequence"
  source 1..654: mol_type = other DNA
atggccactaggtcgccgggcgtggtgatttccgacgatgagccgggatatgacctggaccttttctgcatcccaaatcactacgctgaagatctcgaacgcgtgttcatccctcatggcctcatcatggacaggactgaacgcctggcccgggacgttatgaaagagatgggcgggcatcacatcgtggccctctgcgttcttaagggcggatacaagttcttcgccgatctgcttgactacataaaggcgctgaaccggaacagcgaccgctcgattccgatgactgtcgatttcatcagactgaaatcctactgcaacgaccaatcgaccggagatatcaaggtgatcggaggggacgatctctccacccttactggtaagaacgtgctgatcgtggaggacataatcgacacgggaaaaacgatgcaaaccctgctctccctggtgcgccagtataatccaaagatggttaaagtcgcaagcctcttggtgaagcgcactccaaggagcgtcggctacaaaccagatttcgtgggattcgagatccctgataagttcgtcgtgggctacgctctcgattacaacgaatactttagggacctgaatcacgtgtgcgttatctcagaaaccggcaaagccaagtacaaagca

SEQ ID NO: 13776 - DNA, 654 bp, synthetic construct
  misc_feature 1..654: note = source = /note="Description of Artificial Sequence: Synthetic coding sequence"
  source 1..654: mol_type = other DNA
atggctacacgttctccaggcgtggtgatatcagacgatgaacctggctacgatctggacctcttctgtattcccaatcactacgccgaggatctggagcgggtgttcattccacacggcctaatcatggatagaacagaaagactagctcgagacgtgatgaaggagatgggcggacaccacatagtggcactttgcgtgctgaaaggtggctacaagttttttgctgatctgttagactacatcaaggccctcaacaggaacagcgacaggagcatcccaatgacagtggatttcatcagactgaaatcctattgcaacgatcagtccacaggagacattaaggtcatcggaggcgatgatctgtctacactgacagggaagaatgttctgatcgtggaggatatcatcgacaccggcaaaaccatgcagactctgttaagtttggttagacagtataaccctaagatggtaaaggtggctagtctgcttgtgaagcggacacctcgctccgtgggatataaaccagactttgtcgggtttgagataccagataagttcgtggtgggatatgcattagattataatgagtactttcgcgacctaaatcatgtctgtgtgataagtgagaccggcaaagccaagtacaaagca

SEQ ID NO: 13777 - DNA, 654 bp, synthetic construct
  misc_feature 1..654: note = source = /note="Description of Artificial Sequence: Synthetic coding sequence"
  source 1..654: mol_type = other DNA
atggccactcggagccctggggtcgttatcagcgacgatgagcctggctatgatcttgatctgttctgtatacctaaccactatgccgaagatctggagcgagttttcattccccatggcctcatcatggaccggacagaaagactggcacgcgatgtgatgaaagagatggggggtcaccacattgtcgctctctgcgtccttaaaggagggtacaagttcttcgcggacctgctagactatattaaagccctaaacaggaattccgatagatccataccaatgaccgtcgactttatccgcttgaagtcatactgtaatgatcaaagtacgggcgatattaaggttatcgggggggacgatctcagcacattgactggaaaaaacgtgctgatcgtggaggatatcatcgatactggaaaaacaatgcaaacactgctctccctagtgagacagtacaatccaaagatggtcaaagtcgcgagcctgctagttaagcgcactcccagatccgtggggtacaaacctgattttgtgggcttcgaaataccagataaattcgtggtggggtacgcacttgactacaacgaatactttcgggatctcaatcacgtgtgtgtgataagtgaaaccggcaaggctaaatacaaagcc

SEQ ID NO: 13778 - DNA, 654 bp, synthetic construct
  misc_feature 1..654: note = source = /note="Description of Artificial Sequence: Synthetic coding sequence"
  source 1..654: mol_type = other DNA
atggcaactaggtcaccaggggtggtgatttccgatgacgaacccgggtacgatcttgacctgttttgtatccctaaccattacgccgaggatctggaaagagtgtttatccctcacgggctcattatggaccgcaccgaacgtctcgcaagggatgtaatgaaggaaatgggaggacatcacattgtcgctctgtgtgtccttaaggggggctataagttctttgccgatctgctcgattacataaaggcacttaatagaaacagcgatcggtcgataccgatgactgtcgacttcattcgtcttaaatcctactgcaacgaccaatccactggagatatcaaggtgattgggggagatgatctgagcacccttactggaaagaatgtgcttattgtggaagatatcatagatacgggtaagaccatgcaaaccctcctttccctggtgagacagtacaaccctaagatggtgaaggttgcctcccttctggttaagaggacccctaggtcggtgggatacaagcccgactttgtgggattcgaaatcccagataagtttgtggtgggctacgcccttgattacaacgaatactttcgggaccttaatcatgtgtgcgtgatatccgagactggtaaagccaaatacaaagcg

SEQ ID NO: 13779 - DNA, 654 bp, synthetic construct
  misc_feature 1..654: note = source = /note="Description of Artificial Sequence: Synthetic coding sequence"
  source 1..654: mol_type = other DNA
atggctacccggtccccaggagtggtgatctcggatgacgaaccaggctacgacctggacctgttctgcatccctaaccactacgctgaggacctcgaacgtgtgtttattccgcacggactgatcatggacaggaccgagcgcctcgcccgggatgtcatgaaggaaatgggaggtcaccatatcgtggcgctttgcgtgttgaagggagggtacaagttctttgccgacctgcttgactacataaaggctctcaacaggaatagcgatagaagcattccgatgactgtggacttcatccggctgaaaagctactgcaacgaccagagcactggcgacattaaagtcatcggaggagacgacctgtccaccctcactggaaaaaacgttctgatcgtcgaagatatcatcgacaccggaaagacgatgcagactctgctttccttggtgcgccagtataaccctaaaatggtgaaggtggcatcactgctcgtgaagagaactccgaggtcagtcggctacaaaccagacttcgtcggcttcgaaatccctgacaagttcgttgtgggttacgcccttgactataacgagtacttccgggaccttaaccacgtgtgcgtgatttcggaaaccggtaaggcaaagtacaaggcg

SEQ ID NO: 13780 - DNA, 654 bp, synthetic construct
  misc_feature 1..654: note = source = /note="Description of Artificial Sequence: Synthetic coding sequence"
  source 1..654: mol_type = other DNA
atggctacacggagtccaggtgtggtgatctccgatgacgagcctggctatgatcttgacctgttctgcataccaaaccactacgctgaagacctggagagggtattcatcccccatggattaataatggacagaaccgaacgactggcccgggacgtcatgaaagagatggggggccaccacattgtggcactgtgtgtgctcaagggcggctacaagttttttgccgaccttctggactatattaaggccttaaatcgaaactctgatcgctcaatacctatgactgtagacttcattcggttgaaatcctattgtaatgaccagagcacaggggacattaaagtcattggtggggacgacctgagcacactcaccggaaaaaacgtcctgatcgtggaagacatcatcgacactggcaaaacgatgcagaccttgctgagtctggtacgacaatacaatcctaagatggtcaaggtcgctagtctgctagtcaagagaaccccccgcagcgtggggtacaaacctgatttcgtcggtttcgagattccagacaaatttgtggtcggctacgctttagattacaacgaatactttagggatctcaatcatgtctgtgtgattagcgaaacgggcaaggcgaagtacaaagct

SEQ ID NO: 13781 - DNA, 654 bp, synthetic construct
  misc_feature 1..654: note = source = /note="Description of Artificial Sequence: Synthetic coding sequence"
  source 1..654: mol_type = other DNA
atggctaccaggtcaccaggcgttgtcatttctgacgacgaacccggctacgacttggatttgttctgtattcccaaccactatgccgaggacctggagagggtttttatcccccatgggctaattatggaccggaccgaacggctggcacgcgacgtgatgaaagaaatgggcggccaccatatcgtggctttgtgtgtgctgaaggggggctacaagttcttcgcagacctgctcgattacataaaagccctaaatcgcaattccgatcggtccatccccatgacagtggactttataaggcttaaaagctactgtaatgatcagagcaccggtgacatcaaggtgatcggcggagatgacctctccaccttgaccggaaagaacgtcctgatcgttgaggatataatcgatacaggaaagaccatgcagactctgttatctctcgtccggcagtacaaccctaagatggtcaaagtggcttcgttgctcgtcaaaagaacccccagaagcgtggggtataagcccgattttgtcgggtttgagatccccgataaattcgttgtcgggtacgccttagactataatgaatatttcagagacctcaaccatgtgtgcgttatctctgaaactgggaaagcgaaatataaggcc

SEQ ID NO: 13782 - DNA, 654 bp, synthetic construct
  misc_feature 1..654: note = source = /note="Description of Artificial Sequence: Synthetic coding sequence"
  source 1..654: mol_type = other DNA
atggccacacgcagcccaggggtggtgatctcggatgacgaacccggctatgacttggatcttttctgcattccaaaccactacgctgaggacctagaaagggtcttcattcctcatggactcatcatggacaggactgaacggctggctcgcgatgtgatgaaagaaatgggaggccatcacattgtggccctgtgcgtgctgaagggagggtataagtttttcgccgaccttctggattacatcaaagccctgaatagaaatagcgatagaagcatccccatgaccgttgatttcatcaggctcaagtcttactgtaacgaccagtcaacgggagatatcaaggtcatcggcggggacgatctttctactctcactgggaagaacgtcctcatagtcgaagacatcattgatactggaaaaacaatgcaaacgcttctgagcctggtcaggcaatataaccccaagatggtgaaggtggcttctctcctcgtgaagcgaacaccacgcagtgtgggttacaagccggactttgtcggctttgaaatcccagataaatttgttgttggctacgccctggactacaatgagtatttcagggacctgaaccatgtttgtgtgatttctgaaaccggcaaggctaaatacaaagcc

SEQ ID NO: 13783 - DNA, 654 bp, synthetic construct
  misc_feature 1..654: note = source = /note="Description of Artificial Sequence: Synthetic coding sequence"
  source 1..654: mol_type = other DNA
atggccacacggagcccaggtgtggtaatcagcgacgatgaacctggttatgacttggatttgttctgtatccctaaccactacgctgaagacttggagagggtgtttattccacatggcctgataatggataggactgagaggctggcccgtgacgtgatgaaagaaatggggggccaccatatagtggctctgtgcgtcctgaaaggagggtataagttttttgccgacctgctagactacatcaaagccctcaatcggaatagtgaccgctctatccctatgaccgtggactttatccgcctcaaatcttattgtaatgatcagtcaacaggggatattaaggtaattgggggggatgatctctcaactttgacaggtaagaacgtcctgattgtggaggacattatcgacactggaaagactatgcagaccttgctctcactggttaggcagtacaaccccaaaatggtgaaagttgctagcctgctggtgaagaggacaccgagaagtgtcgggtacaagcccgactttgtgggtttcgaaattcctgacaagttcgtagtgggatatgccttagattataacgaatattttagagatctgaatcatgtgtgtgtaatctccgagactgggaaagccaaatacaaggct

SEQ ID NO: 13784 - DNA, 654 bp, synthetic construct
  misc_feature 1..654: note = source = /note="Description of Artificial Sequence: Synthetic coding sequence"
  source 1..654: mol_type = other DNA
atggcaacccggagcccaggtgtggtgatttccgacgatgagccggggtatgacctggatttgttctgcatccctaatcattacgcggaagatctcgagcgcgtctttataccgcatggtctgattatggacagaactgagagacttgcccgggacgtgatgaaagaaatgggaggccatcatatagtggcactttgtgtgttgaagggaggttacaagtttttcgctgatctgctggactacattaaggcgcttaaccgcaactccgatagatcaatacccatgactgtcgactttattcgtctgaagtcctactgcaacgatcaaagcaccggagacattaaagtcatcggcggagatgacctgtcaacgctgacggggaaaaatgtgcttatagtcgaggacataatagacaccggaaagaccatgcaaacgctcctgtcgctcgtgcggcagtacaaccctaaaatggtgaaggtcgcctcgctgctcgtgaagagaacccctagatcagttgggtataagccggatttcgtgggattcgaaattccagacaaatttgtggtgggttacgcactggattacaacgaatactttcgtgatcttaatcacgtctgcgttatctccgaaaccggtaaggcaaagtacaaggca

SEQ ID NO: 13785 - DNA, 654 bp, synthetic construct
  misc_feature 1..654: note = source = /note="Description of Artificial Sequence: Synthetic coding sequence"
  source 1..654: mol_type = other DNA
atggcaaccagaagcccgggcgtggtgatctcggacgacgaaccaggttacgacctcgacctgttctgcatcccaaatcattacgctgaagatctggagcgcgtgttcatcccccacggactcattatggatcgcactgagcgcctggcccgggacgtgatgaaggagatgggagggcaccacattgtggcactctgtgtgctgaaagggggctacaagttctttgcggatcttctggattacatcaaggctttgaaccggaactcagatcgcagcatcccgatgactgtggacttcatccgccttaagagctactgcaacgaccagtcgacgggcgacattaaggtgatcggtggagacgacctgtcgacgctgaccggcaaaaatgtcctgatcgtcgaggacattatcgacaccggcaagaccatgcaaacgctgctgagcctggtgcggcaatacaacccgaagatggttaaggtggcctcccttctggtcaagagaacccctaggtcagtgggatacaagccggattttgtgggcttcgaaatcccggataagttcgttgtgggatacgccctggactacaatgagtacttccgggatctgaatcatgtgtgcgtcatctccgagactggaaaggctaaatacaaagcg

SEQ ID NO: 13786 - DNA, 654 bp, synthetic construct
  misc_feature 1..654: note = source = /note="Description of Artificial Sequence: Synthetic coding sequence"
  source 1..654: mol_type = other DNA
atggccactcgttcgcctggcgtcgtgatcagcgatgacgaaccaggatacgatctggatttgttctgtattcctaaccactacgctgaggatctcgaacgagtatttatcccacacggtctgattatggacaggaccgagcgactggctagagatgtcatgaaggagatggggggccatcacatcgtcgccctttgcgtcctgaaaggaggctacaaattcttcgcagacctgttggattatattaaggctcttaaccggaattctgatcgttctatacccatgacagtcgacttcatcagactgaagagttactgtaatgaccagagcacaggggacattaaagtgataggaggggatgatctgtcaaccctcaccggaaagaacgtgctgatcgtggaggatatcatcgataccggcaaaaccatgcagaccctgctctccttagtgcgtcagtataacccgaaaatggtcaaggtggcttcactgcttgtcaaaaggacaccacgctccgtggggtacaagcctgactttgtaggctttgaaataccggataaattcgtcgtcggttatgctctagactacaacgagtactttcgtgatttgaaccatgtgtgcgtgatctcggagaccgggaaagcaaagtataaagcc

SEQ ID NO: 13787 - DNA, 654 bp, synthetic construct
  misc_feature 1..654: note = source = /note="Description of Artificial Sequence: Synthetic coding sequence"
  source 1..654: mol_type = other DNA
atggctacaaggtcccctggcgtggttattagcgacgatgaaccaggatacgatcttgacttgttttgcatccccaatcattatgccgaggacctggagcgtgtattcattccacacggactgataatggacagaaccgagcggctggcacgcgacgtcatgaaagagatgggcggtcatcacattgtcgccctatgcgtgctcaaaggcgggtacaagttctttgcagacctactggactacatcaaagctttgaaccgtaactcagaccggtccatcccgatgaccgtcgacttcatccggctcaaatcttactgcaatgaccagtcaactggggacattaaagttatcgggggtgatgacctttccacactgacaggaaagaacgtattaattgtggaggacataatcgacacaggcaagaccatgcagactcttctctctctcgttcggcagtataatcccaagatggtcaaggtggcatctttgctggtcaagagaacaccccgatctgtcgggtacaagccagatttcgtgggttttgagatccccgataagtttgtggtgggatatgccctcgactacaacgaatacttcagggatctaaaccatgtctgtgtgatttccgagaccggaaaggctaaatataaagcc

SEQ ID NO: 13788 - DNA, 654 bp, synthetic construct
  misc_feature 1..654: note = source = /note="Description of Artificial Sequence: Synthetic coding sequence"
  source 1..654: mol_type = other DNA
atggcaaccagatcgccgggagttgtgattagcgatgacgaaccgggttatgatttggatctgttctgcataccgaatcactacgccgaggatctcgaaagggtattcatcccacacggccttatcatggaccggactgaacggttggcgcgggacgtcatgaaggaaatgggaggacatcacatcgttgcactctgcgttttgaagggtggctacaagtttttcgctgatctgctggattacatcaaagcactgaaccggaactcagatcgctccatcccgatgaccgtggacttcatccgactcaaaagttactgcaatgatcagtcgaccggggacatcaaagtgattggcggagacgacctttcaaccctgaccggcaagaacgtcttgatcgtggaggacattatcgacactggtaagaccatgcagactctgctgagcctggtgcgtcaatacaacccaaaaatggtaaaggtggcctccctgctcgtgaagaggactccaaggtcagtcgggtacaaacccgacttcgtcggatttgagatacctgacaagtttgtggtgggctatgcgctcgattacaatgagtacttccgcgacctgaaccatgtgtgtgtgatctccgaaacgggcaaggcgaagtacaaggcc

SEQ ID NO: 13789 - DNA, 654 bp, synthetic construct
  misc_feature 1..654: note = source = /note="Description of Artificial Sequence: Synthetic coding sequence"
  source 1..654: mol_type = other DNA
atggctactagaagcccaggagtggtgatctcggatgacgaaccgggatacgaccttgacctcttttgcattcctaaccattacgcggaggacctggagcgagttttcatcccgcatgggctcatcatggaccgtaccgaacggctggcacgggatgtgatgaaggagatgggaggtcatcacatcgttgcgctttgcgtgttgaagggcggctacaagtttttcgcggacctgctggattacattaaggcactgaaccgcaactcagatagatccatcccaatgaccgtggatttcatcagactgaagagctactgtaatgaccaaagcaccggagatatcaaggttatcggcggggacgacttgtcgaccctcaccggtaagaacgtgctgatcgtggaggatatcatagatactggtaagacgatgcagactctgctctcactcgtccgccagtataatcccaaaatggtcaaagtcgcctccctgctggtgaagagaaccccgcggagcgtgggttacaaacccgacttcgtcggattcgagatcccggacaagtttgtggtgggatatgcgctcgattacaacgaatacttccgggacctgaaccacgtgtgcgttatttcagaaactggaaaagccaagtacaaagcc

SEQ ID NO: 13790 - DNA, 654 bp, synthetic construct
  misc_feature 1..654: note = source = /note="Description of Artificial Sequence: Synthetic coding sequence"
  source 1..654: mol_type = other DNA
atggcaacaagaagtccaggagttgtcatttccgatgatgaaccagggtatgatctggacttattttgtatcccaaatcattacgcggaggacctcgagcgggtgttcatccctcacgggctcattatggatagaaccgagcggcttgccagagatgtcatgaaagagatggggggccatcacatagtcgccttatgcgtgctcaaaggcggttacaaattcttcgcggacctcctggattatatcaaggctttgaatcgtaattcagatcgatctatccccatgacggtcgatttcatacgtttgaagtcatattgcaatgaccaatcgacgggcgacattaaagtcatcggcggtgatgacctttctacactgaccggcaaaaatgtgcttatagtggaagacatcatcgatacaggaaaaaccatgcagacccttctcagcttggtgagacagtacaaccctaagatggtgaaggttgcctccctcctggtaaaacgcaccccgcgcagtgtgggatacaagcccgactttgtgggcttcgagatcccggataagttcgttgttggctatgcgctagattacaacgagtattttagagaccttaaccatgtatgcgttataagtgaaaccggcaaagccaagtataaagca

SEQ ID NO: 13791 - DNA, 654 bp, synthetic construct
  misc_feature 1..654: note = source = /note="Description of Artificial Sequence: Synthetic coding sequence"
  source 1..654: mol_type = other DNA
atggctacaagatctccaggcgttgtcatcagtgacgatgaaccgggatacgatttggatctcttctgcatccctaaccactacgctgaggacttggaaagagtttttattccccatggcctgattatggatagaacagagcgcctggctagagatgtcatgaaggaaatgggcggccaccatatagtagctctttgcgttctgaagggaggttacaagttcttcgctgaccttcttgactatattaaagctttgaacagaaactcagataggagtatccccatgactgtggatttcatcagattgaaatcatattgtaatgaccagtcaaccggcgatataaaagtgattggtggtgacgacctctcaacgctgacaggtaagaatgtcctgattgttgaggacatcattgacactggtaagactatgcaaactctgctttctctggttagacaatacaaccccaaaatggtcaaggtcgcttccttgctggtgaagaggacacccaggagtgtgggttacaagcccgacttcgtcggtttcgaaatccctgataagttcgtggtcggatacgcgctggactacaatgagtactttagggacctcaatcacgtctgtgttatatccgaaactggaaaagccaaatacaaggct

SEQ ID NO: 13792 - DNA, 654 bp, synthetic construct
  misc_feature 1..654: note = source = /note="Description of Artificial Sequence: Synthetic coding sequence"
  source 1..654: mol_type = other DNA
atggctactcggtcgccaggggtggtaatttctgatgacgagcccggctacgacctagatctgttctgcatccccaaccactatgcggaagatctggagagagtattcatcccccatggactgatcatggataggaccgagcgattggcccgtgatgtaatgaaggaaatgggaggccatcatatagttgccctttgcgtgctgaaaggagggtacaaattcttcgcggacctgctggattatattaaagccctaaaccggaactctgatagatcaatcccaatgaccgtagatttcatccgtttgaagtcctattgcaatgaccagtcaacgggggacattaaggttatcggaggggatgacctaagcactctcacaggcaagaacgttttaattgtggaggacataattgacaccggaaaaactatgcagacacttttgtccctcgtgcggcagtacaaccctaagatggtaaaggtggcctccctacttgtaaagcggactccaagaagcgtggggtacaagccggactttgtgggtttcgaaattccggataagttcgttgtcggttatgccctggactacaacgagtatttccgggacctgaatcacgtgtgcgttataagcgaaacaggaaaggcgaaatataaggct

SEQ ID NO: 13793 - DNA, 654 bp, synthetic construct
  misc_feature 1..654: note = source = /note="Description of Artificial Sequence: Synthetic coding sequence"
  source 1..654: mol_type = other DNA
atggcaactcgctccccgggtgtggtcatatcggatgacgagcctgggtacgatcttgacctgttctgcattcctaaccactacgcggaagatctggagagagtgtttattccacatggattgattatggatcgtactgagcgcctggcgcgtgatgtgatgaaagaaatgggcgggcaccacattgtcgcactttgcgtgctcaagggaggttacaagtttttcgcagacctgctcgattacatcaaagcgctgaaccggaattccgataggtccatccccatgaccgtcgactttatccgcctcaaatcgtattgcaatgaccagagcactggtgacattaaggtcatagggggcgatgatctttccacccttaccggcaagaacgtgctgattgtcgaggacattatcgacacggggaaaacgatgcaaactctgcttagcctcgtgaggcagtacaaccctaagatggtgaaggtggcatcgctcctggtgaagcggaccccccgatccgtgggatacaagcccgattttgtcggatttgaaattccggacaagtttgtcgtcggatacgccctggactacaacgagtactttagagatctgaatcacgtgtgcgtgattagcgaaactggtaaagcaaaatacaaggca

SEQ ID NO: 13794 - DNA, 654 bp, synthetic construct
  misc_feature 1..654: note = source = /note="Description of Artificial Sequence: Synthetic coding sequence"
  source 1..654: mol_type = other DNA
atggccactcgttcaccgggggtggttatctcggacgacgaacccggatacgatttggacctcttctgcataccaaatcactacgctgaggaccttgaaagagtgttcatccctcatggactgattatggaccgtaccgagagactggcacgagatgtcatgaaggagatgggaggtcaccatatcgtggcactctgtgtgctgaaagggggttacaagttttttgcggaccttttggattacattaaggcacttaatcgcaactcggatagatccatcccaatgacggttgatttcattcggctgaagagctactgtaacgaccagtcaaccggagatatcaaagtgattggaggagatgatctgtccacgctgaccggaaagaatgtcctgatagtcgaggacattattgacacgggcaaaactatgcaaacccttctctccttggttcgacaatacaaccctaagatggtgaaggttgcatcactgctggttaagaggaccccccgatccgtcggctataagccagattttgtgggattcgaaattcctgataagttcgtcgtgggatacgccttggattacaatgagtactttagagatcttaaccatgtgtgtgtgatttcagaaaccggcaaggcgaaatacaaagcc

SEQ ID NO: 13795 - DNA, 654 bp, synthetic construct
  misc_feature 1..654: note = source = /note="Description of Artificial Sequence: Synthetic coding sequence"
  source 1..654: mol_type = other DNA
atggctaccagatcgcccggagtggtgatttccgacgatgagccaggatacgatctcgatcttttttgtatccctaaccattacgccgaagatcttgaaagagtctttataccccacggcctgattatggatagaactgagcgtctcgctcgcgacgtgatgaaggaaatgggaggacaccatattgtcgcgctgtgtgtgcttaagggtggttacaaattcttcgcagatctgcttgactacatcaaagcactgaataggaactccgatcggtcgattcccatgactgtcgatttcattcgtcttaaaagctactgcaacgatcagtcaacgggggacattaaggtgattggtggagatgacctcagcaccctcaccgggaaaaatgtgttgattgtggaagatatcattgatactggaaagactatgcaaacccttctttccttggtccggcagtacaaccctaagatggtgaaagtggcatcactcctcgtgaagagaactccccgttcggtggggtacaaacccgattttgtgggcttcgagattccagacaagttcgttgttggctatgcacttgattacaatgagtactttcgcgacttgaaccacgtctgcgtaatatcggagactggaaaggcaaagtacaaggcc

SEQ ID NO: 13796 - DNA, 654 bp, synthetic construct
  misc_feature 1..654: note = source = /note="Description of Artificial Sequence: Synthetic coding sequence"
  source 1..654: mol_type = other DNA
atggcgacccgtagccctggggtggtgatctccgatgatgagcctgggtacgaccttgatctgttttgcattccaaatcactacgcagaggacctggaacgcgtgttcattcctcatggactgattatggacagaaccgagcggcttgcgagagacgttatgaaagaaatgggaggacaccacattgtggccctgtgcgtgctgaaagggggatacaagtttttcgcggatctgcttgattacataaaagcacttaatcgcaactcggatagatcgattccgatgaccgtcgacttcattagattgaagtcgtactgtaatgatcaatcgaccggcgacattaaggtcattgggggagatgacctttcaactctgaccggtaagaacgtgctcattgtggaagatatcattgatactggtaagactatgcagaccctgttgtcgctggtgagacagtacaacccaaagatggtgaaggtggcgtcacttctggtcaaacgcactccgcggtccgttggatacaagccagattttgtgggatttgagattccagacaagtttgtggtcggctatgcactggattacaacgaatactttcgggaccttaatcatgtctgtgtaatcagcgaaactgggaaggcaaagtacaaggcc

SEQ ID NO: 13797 - DNA, 654 bp, synthetic construct
  misc_feature 1..654: note = source = /note="Description of Artificial Sequence: Synthetic coding sequence"
  source 1..654: mol_type = other DNA
atggctaccagatccccaggagtggtgatcagcgacgacgaaccaggatacgacctggaccttttctgtatcccgaaccactacgccgaggacttggagcgggtgttcatcccgcacggactcatcatggatcggaccgagcggctggctagggacgtcatgaaagagatgggtgggcatcacatcgtggcactctgcgtgctcaaggggggctacaagttctttgccgacctcctggactacatcaaggccctgaaccgcaactcggatcgctccattccaatgaccgtggactttattcgcctcaagagctactgtaacgaccagtccaccggagatatcaaggtgatcggaggcgacgatctctcaaccctgaccggaaaaaacgtgctcattgtggaggacatcattgatactggaaagactatgcaaactctgctttcgttggtgcgccagtacaacccgaagatggtgaaagtggcctcactgctggtgaaacgcactccgcgcagcgtcggttacaaaccagatttcgtgggcttcgagatcccggacaaattcgtcgtcggatatgctctcgactacaatgagtacttcagggatctgaaccacgtgtgcgtcatctcggaaacgggcaaggcaaagtacaaggcc

SEQ ID NO: 13798 - DNA, 654 bp, synthetic construct
  misc_feature 1..654: note = source = /note="Description of Artificial Sequence: Synthetic coding sequence"
  source 1..654: mol_type = other DNA
atggccaccaggagccccggggtggtaatatccgatgatgaacctggatatgatcttgatctgttctgcatcccaaatcactacgcggaggacctggagcgcgtgttcatcccccatggacttatcatggatcgaacggaaagactggcacgcgatgtgatgaaagagatgggaggtcaccatatagtcgcactgtgtgtgttgaaaggaggttacaagttctttgcggatctcttggactacattaaagcgttgaataggaactcggaccggtcaatcccgatgaccgttgacttcatccgcctcaaatcttactgcaacgaccagagtaccggcgacatcaaggtcatcggcggcgatgatctttcgactctgactggaaaaaacgtcttgattgttgaggacatcatcgacaccggcaagaccatgcaaaccctcctgtccctggtgcggcagtacaacccgaagatggtgaaggtggcctccctgctcgtgaagcggactccgagatccgtggggtacaagccagactttgtgggattcgaaatccctgacaagttcgtcgtcggatacgctctggactataacgaatactttcgggacctgaatcacgtatgcgtcatttcggaaacgggaaaggcaaagtacaaagcc

SEQ ID NO: 13799 - DNA, 654 bp, synthetic construct
  misc_feature 1..654: note = source = /note="Description of Artificial Sequence: Synthetic coding sequence"
  source 1..654: mol_type = other DNA
atggctaccaggtcccctggagttgtgatttctgatgatgagccgggctacgatctggatctcttctgtatcccaaaccactatgccgaagatcttgaacgagtcttcataccacacggcctgatcatggatagaacagaacggctggccagggatgttatgaaagagatgggcggacaccacatcgtggcactgtgcgtcctcaagggaggatacaaattcttcgcagaccttctcgactacattaaggccctgaaccgcaacagcgaccgatcaattccaatgacagtggatttcatacgcttgaaatcatactgcaacgaccaaagcaccggagatatcaaggttattggaggagacgatctgtctaccctgacgggcaagaatgttctgatagttgaagacattatcgatacaggcaaaactatgcagacactactgtcccttgtcaggcaatacaaccccaagatggtcaaggtcgcctcactgctggtgaagcggacacctaggtctgtgggttataagcctgacttcgtgggattcgagatccctgataaattcgttgtgggatatgccctggattacaacgaatacttccgggacctcaaccacgtgtgtgtgattagcgagacaggtaaggccaagtataaggca

SEQ ID NO: 13800 - DNA, 654 bp, synthetic construct
  misc_feature 1..654: note = source = /note="Description of Artificial Sequence: Synthetic coding sequence"
  source 1..654: mol_type = other DNA
atggcgactaggtcgccaggtgtggtgatttccgacgatgaaccgggctacgatctggacctgttctgtatcccaaaccactatgccgaggatctggaacgggtctttataccacacgggctgattatggatcgaactgagcgcctcgccagagacgtgatgaaggagatgggcggacatcacatcgtggctttgtgcgtgcttaaagggggctataagttcttcgcagacctgctggactacatcaaggcgctgaatcggaacagcgaccgctccattcctatgaccgtagactttattcgcctgaagtcctactgcaacgaccaatcaactggcgacattaaggtgattggaggagatgatctctcaaccctgactggtaaaaacgtcctgatcgtcgaggacatcatcgacaccggcaagaccatgcagaccctgctttcactcgtgaggcaatacaatccgaagatggtgaaggtcgcaagcctgctggtgaaacggaccccgagatccgtgggatacaagccggacttcgtcggttttgaaatcccagacaagttcgtggtcggttacgcccttgactacaatgaatactttcgcgatttgaaccatgtgtgcgttatctctgagactgggaaagccaagtataaggct

SEQ ID NO: 13801 - DNA, 654 bp, synthetic construct
  misc_feature 1..654: note = source = /note="Description of Artificial Sequence: Synthetic coding sequence"
  source 1..654: mol_type = other DNA
atggccacccgcagccccggcgtcgtgatttcggacgatgaacccggctacgacctggatctcttctgtattcctaaccattatgctgaggatctcgaacgggtgttcataccacacgggctgattatggatcgcactgaaagactggcgagagacgtgatgaaggagatgggtggtcatcacatcgtggcactgtgtgtgctgaaaggaggttataagtttttcgcagatcttcttgactacattaaggcacttaaccgaaactcggacagatcaatcccaatgaccgttgatttcatccggctgaagtcctactgtaatgatcagtccaccggagacattaaggtcattggaggggacgacttgtcaactctgacgggcaagaacgtgcttattgtggaggatatcatagacactgggaaaactatgcagaccttgctcagcctcgtccgccaatacaatcctaaaatggtcaaggtggcgagcctcctggtgaagcgaacgccgcggtcagtcggctacaagccagacttcgtgggttttgaaattcccgataagtttgttgtgggttacgcccttgattacaatgagtacttcagagatcttaaccacgtctgtgtcatttccgagacgggaaaagcaaagtacaaggca

SEQ ID NO: 13802 - DNA, 654 bp, synthetic construct
  misc_feature 1..654: note = source = /note="Description of Artificial Sequence: Synthetic coding sequence"
  source 1..654: mol_type = other DNA
atggccacaagaagtcctggagttgtcatcagcgatgacgaaccaggttatgacctagatcttttttgcatacccaatcactacgcagaggaccttgagcgcgtattcataccacacggattaattatggatagaaccgagagactggctagggacgttatgaaggagatgggtgggcatcacattgtcgccctgtgcgtgctgaagggtggctataaattttttgccgatctcctcgattacattaaggcgcttaacagaaactcggatagatctatacctatgactgtggactttatccgccttaagagctactgtaacgatcagtctacaggtgatattaaggtcatcggcggcgacgatctgtcaaccctcacaggaaagaatgtgctgatcgtggaggacattatagacaccggcaagactatgcagaccctccttagcctcgttcggcagtacaaccccaaaatggtgaaggtggcttctctccttgttaaaaggacccccagatccgtgggctataaacctgacttcgtgggctttgaaatacctgacaagtttgttgtggggtacgcattagattataacgaatacttccgcgaccttaaccacgtctgcgtcatttcggaaacaggaaaggccaagtataaagcg

SEQ ID NO: 13803 - DNA, 654 bp, synthetic construct
  misc_feature 1..654: note = source = /note="Description of Artificial Sequence: Synthetic coding sequence"
  source 1..654: mol_type = other DNA
atggccactaggtctccgggggttgtgatctctgatgacgaacccgggtacgatctcgatttgttttgcattcctaatcattatgcggaagacctggaacgagtcttcatcccacacggactgattatggacaggacagaaaggttggctagagacgtcatgaaggaaatgggagggcatcatatcgtggcactttgcgtcctgaagggcgggtataagttttttgctgacctgctcgactacatcaaggccctgaatcgcaatagcgaccggtcaatacctatgaccgtggactttatcagactgaagtcttattgcaatgaccagagcaccggcgatatcaaagtgatcggtggcgatgatctgtccactctgactgggaagaacgtgctcatcgttgaagacatcattgatactgggaaaaccatgcagacgctgctgtctctggtgcgacaatataatccaaagatggttaaggtggcttctctgctggtgaagcgaactccaagaagcgtgggttacaagccggattttgtcgggttcgaaatacctgacaaattcgttgtaggctacgccctggattataatgagtacttccgagaccttaaccacgtctgcgttatttcagaaacaggcaaagcgaaatacaaggct

SEQ ID NO: 13804 - DNA, 654 bp, synthetic construct
  misc_feature 1..654: note = source = /note="Description of Artificial Sequence: Synthetic coding sequence"
  source 1..654: mol_type = other DNA
atggctacgcggagcccgggcgtggtgatctcggacgatgaacctggctacgacctggatctgttctgtatcccaaaccattacgcggaagatcttgagcgtgtctttatcccgcacggccttatcatggacagaacggagcgactggccagagatgtgatgaaggaaatggggggccaccacattgtggccctgtgcgttctcaagggtggatacaaattcttcgccgatctgctcgactatatcaaagcattgaacaggaactcggacaggtccatccctatgactgtggacttcattcggctgaagtcgtactgcaatgaccagtcgaccggggacatcaaggtcattggtggagatgatctctcaactttgactgggaagaatgtgctgatagtagaggatatcatcgacaccggcaagactatgcagaccctcctgagccttgtccggcaatacaacccgaaaatggttaaggtggcttcattgctggtcaagagaactccgcggtccgttggatacaaaccagactttgtcgggttcgagatacccgataagttcgtggtgggttacgccctcgactataacgagtacttccgcgatcttaatcatgtgtgcgtgatctctgaaaccggaaaggcgaaatacaaggcc

SEQ ID NO: 13805 - DNA, 654 bp, synthetic construct; identical to SEQ ID NO: 13799
  misc_feature 1..654: note = source = /note="Description of Artificial Sequence: Synthetic coding sequence"
  source 1..654: mol_type = other DNA

SEQ ID NO: 13806 - DNA, 654 bp, synthetic construct
  misc_feature 1..654: note = source = /note="Description of Artificial Sequence: Synthetic coding sequence"
  source 1..654: mol_type = other DNA
atggccacccgatcgcccggagtggttatttcggacgatgaaccaggttacgatctcgaccttttttgcattccgaatcattacgcagaagatcttgaaagagtgttcattccacatgggttgataatggatagaactgaacgccttgcaagagatgtcatgaaggagatggggggccatcatattgtggcactgtgtgtcctcaagggtggatacaagttctttgcagatcttctggattacataaaggcgctgaaccgaaattctgaccggagcatccctatgaccgtcgatttcataagactcaagtcgtactgtaacgatcaatcgactggagatatcaaggtaattggcggcgatgatctttcgactctcactggtaagaacgtgctgattgtggaggacattatcgatactggaaagactatgcagactcttctttcgcttgtgaggcagtacaaccctaaaatggtgaaggttgcatcactgttggtgaagagaactcctcggtccgtcggatacaaacccgactttgtgggatttgaaatccctgataagttcgtcgtgggctatgcgctggattacaatgaatactttcgcgaccttaatcatgtctgcgtgatctccgagactggcaaggccaagtacaaggcc

SEQ ID NO: 13807 - DNA, 654 bp, synthetic construct
  misc_feature 1..654: note = source = /note="Description of Artificial Sequence: Synthetic coding sequence"
  source 1..654: mol_type = other DNA
atggccactcgcagccctggagtcgttatcagcgacgatgaaccgggatacgatctcgatctgttttgcattccgaatcattacgcggaggacctggagcgcgtctttatcccgcacggactcatcatggatcgcaccgaacgcctggcaagggatgtgatgaaggaaatgggtggacatcacattgtggctctgtgcgtcctcaagggcgggtacaaattcttcgccgacctcctggactacatcaaagccctgaaccgcaactcggaccggtcgataccgatgacggtggacttcatcagactgaagtcatactgcaacgaccaatcgactggcgacattaaggtgatcggaggcgacgacctgtcaacccttactggaaagaatgtcctgattgtcgaggacatcatcgataccgggaaaaccatgcagaccctgctgtcacttgtgaggcaatacaacccgaagatggtgaaggtcgcttcactgcttgtcaaacggacgccgcgctccgttggatacaagccagatttcgtgggtttcgaaatcccggacaaattcgtggtggggtacgcactggattacaacgagtacttccgcgacctgaatcatgtgtgtgtgatctcggagactggcaaagccaagtacaaggct

SEQ ID NO: 13808 - DNA, 654 bp, synthetic construct
  misc_feature 1..654: note = source = /note="Description of Artificial Sequence: Synthetic coding sequence"
  source 1..654: mol_type = other DNA
atggctacaaggtcccctggagtggtgatatccgatgatgaacccggatacgacttagatctcttctgcatcccaaaccattacgcagaggatctagaacgggttttcattccacacgggcttataatggacaggacagaaaggcttgcacgggacgtaatgaaagaaatgggagggcatcacatcgtggccctgtgcgttctcaaaggagggtacaaattctttgctgacctcttagattatatcaaggctctgaataggaactctgataggagtatccccatgacagttgattttatcaggctcaaaagttattgcaatgaccagagtactggggatatcaaggtgatagggggagatgatttgtctactctgacaggaaagaacgtgctgatcgtggaagatatcattgatactgggaaaactatgcagacactactgtcgctcgtgcggcaatataacccaaagatggtgaaagtggcaagtctgctggtcaaacggacgccccggtctgtggggtacaaacctgattttgttggattcgagattccagataaattcgtggtggggtacgccttagactataatgaatatttccgagatctaaatcatgtttgcgtgattagtgaaacaggaaaagctaaatataaagct

SEQ ID NO: 13809 - DNA, 654 bp, synthetic construct
  misc_feature 1..654: note = source = /note="Description of Artificial Sequence: Synthetic coding sequence"
  source 1..654: mol_type = other DNA
atggcaaccaggagtccaggagttgttattagcgacgatgagcctggctacgatcttgatctgttttgcatcccaaaccactatgccgaggatttggagagagtgttcatccctcatggtctgatcatggaccgcaccgaaaggctcgccagagatgtcatgaaagaaatgggaggccaccacattgtagctctttgcgtcctcaagggtggatacaaattttttgccgacctgctggactatatcaaagcactcaataggaattccgatcgctctattccaatgaccgttgacttcattagactgaagtcttactgcaacgaccagtctactggcgacattaaagttattggcggcgatgatctgtctactctgactggcaaaaacgttctcatcgtcgaagatattattgataccggtaaaactatgcaaacattgctgtcccttgtgcgtcaatacaaccccaagatggttaaggtagcctctttgcttgtgaagaggacacctcgtagtgtcggctacaagcccgacttcgtcggatttgagattccagataagttcgtagtcggatacgccctggattacaacgagtactttagagacttgaaccacgtatgcgtcattagcgagaccggaaaagccaaatataaggcc

SEQ ID NO: 13810 - DNA, 654 bp, synthetic construct
  misc_feature 1..654: note = source = /note="Description of Artificial Sequence: Synthetic coding sequence"
  source 1..654: mol_type = other DNA
atggccacccggagtcccggagtggtcatctccgatgatgaaccgggatacgatctggacctcttttgcatacctaaccattacgccgaggacttggaaagagttttcatcccgcacggacttatcatggatagaaccgagaggcttgctcgggatgtgatgaaggaaatgggaggccaccatattgttgcactgtgtgtgttgaaagggggatacaaattttttgccgacttgctcgattacataaaggccctgaataggaattctgaccggtccattcctatgactgtggacttcattagactgaagagctactgcaacgaccagagcacaggggatatcaaggtcatcggcggggatgatctgtctactcttaccggcaagaacgtgctgatcgtcgaggatatcatcgataccggaaaaaccatgcagaccctgttgagtctcgtcagacaatacaatcctaagatggttaaagtggcgagtttgttggtgaagcgcaccccaaggagcgtgggttataaaccagatttcgttggctttgagattcctgacaaattcgtagtcggctacgccctcgactacaacgaatattttcgcgacctgaaccacgtctgtgtcatctctgagaccgggaaggccaagtacaaggcc

SEQ ID NO: 13811 - DNA, 654 bp, synthetic construct
  misc_feature 1..654: note = source = /note="Description of Artificial Sequence: Synthetic coding sequence"
  source 1..654: mol_type = other DNA
atggccacccgttcccctggagtggttatatctgacgacgagcctgggtacgatttggacctcttttgcatccctaatcattatgctgaggatcttgaaagggttttcattcctcatggcttgattatggacagaacggagaggctagcgcgagatgttatgaaggagatgggagggcatcatattgtagccttgtgtgttctcaagggtgggtataagtttttcgctgatcttttagactatataaaagctttaaacaggaacagcgatcggtctattccaatgacggttgattttatccggttaaagtcctattgtaatgatcagtcaaccggggatattaaagtcatcggtggtgacgatcttagtaccttgaccggcaagaatgttcttatcgtggaggatattattgatacaggtaagacaatgcagacacttctgtctctcgtaagacaatataatccaaagatggttaaggtagccagtttattggttaaaaggactcctcgttctgttggatataaacccgactttgttgggtttgagattccagataagttcgtcgtgggatatgcccttgactacaacgaatatttcagggatctgaatcacgtttgtgtgattagtgaaactggtaaggcaaaatataaagca

SEQ ID NO: 13812 - DNA, 654 bp, synthetic construct
  misc_feature 1..654: note = source = /note="Description of Artificial Sequence: Synthetic coding sequence"
  source 1..654: mol_type = other DNA
atggcgaccagatcgcctggtgtcgttatctcggacgatgagcctggatacgatctcgatcttttctgcatcccaaaccactatgccgaggacctcgagagggttttcattccgcatgggctgatcatggaccgcacggaacggctggctagggatgtaatgaaagagatgggcggacaccacatcgtggccctctgcgtcctcaaaggcgggtataagttctttgctgaccttcttgactacatcaaagcacttaacagaaacagcgaccggtccattccgatgactgtggatttcatacgactgaagagctactgtaacgaccagtcaaccggcgacatcaaggtcatcggcggcgatgacctgtccaccctcaccgggaagaatgtacttatcgtggaagatatcatcgatactggtaaaacgatgcagaccttgctgtccctggttcggcaatacaatccaaagatggtgaaagtggcctcacttctggtgaaaagaactccacgctcggtcggatacaagccggacttcgtcggatttgaaatccccgacaagtttgtggtgggatacgcattggactacaatgaatacttccgagatctgaaccacgtgtgcgtgatcagcgaaactggaaaggcgaagtacaaagcc

SEQ ID NO: 13813 - DNA, 654 bp, synthetic construct
  misc_feature 1..654: note = source = /note="Description of Artificial Sequence: Synthetic coding sequence"
  source 1..654: mol_type = other DNA
atggccacccgctctcccggggtggtcattagcgacgacgagccagggtatgatctggatctcttctgcatcccgaaccattacgcggaggatctggaacgcgtttttatcccacacggcttgataatggatagaacagaacgcttggccagggacgtgatgaaggagatgggcggccatcatatcgtcgcgctgtgcgtcctcaagggagggtacaagttctttgcggaccttctggactatatcaaggcacttaaccgcaacagcgaccggagcattcctatgaccgttgactttatccgactgaagtcttactgtaatgaccagagcacgggggacattaaggtgatcgggggagacgatctttccactttgactggcaaaaatgtgctgatcgtggaagatatcattgacaccgggaagactatgcagaccctcctcagcctggtccgccagtataacccaaagatggttaaagtggcctcccttttggtgaagaggaccccccggagtgttggctacaaaccagactttgtagggttcgagattcctgataaattcgtcgtcggctatgctctggactacaacgagtattttagggatttgaatcatgtctgtgtaatctccgaaactggcaaagcgaagtataaggcc

SEQ ID NO: 13814 - DNA, 654 bp, synthetic construct
  misc_feature 1..654: note = source = /note="Description of Artificial Sequence: Synthetic coding sequence"
  source 1..654: mol_type = other DNA
atggctactaggtcacctggagtggtgatcagcgacgatgagccgggatatgacctggatctgttttgcatcccaaatcattacgctgaggacttggaacgtgtctttatcccgcatggtctgatcatggaccggaccgagcggctcgcacgagacgtgatgaaggagatgggcggccaccacatcgtggcgctgtgcgtgctcaagggtggctacaagttcttcgctgatctgctggattacattaaagccctgaatagaaactcggaccgctcaataccgatgaccgtggacttcatccgcctgaagtcgtactgtaacgatcagtcgactggggacataaaagtcatcggaggcgatgatctcagcaccctcacgggaaagaacgtgcttattgtggaggacatcatcgacactggaaaaactatgcaaaccctgttgtcactggtgaggcagtacaatccgaagatggtcaaggtggcctccctgctcgtcaaaagaactccgcgcagcgtgggatacaaaccagatttcgtcggctttgaaatcccggacaaatttgtggtgggatacgcgctggactacaacgagtacttcagagacttgaaccacgtgtgtgtgatctccgagactggcaaggcaaagtataaagct

SEQ ID NO: 13815 - DNA, 654 bp, synthetic construct
  misc_feature 1..654: note = source = /note="Description of Artificial Sequence: Synthetic coding sequence"
  source 1..654: mol_type = other DNA
atggcaacccgctcaccaggagtcgtgatttctgacgatgaacccgggtacgacttggaccttttttgtattcccaaccattacgccgaggacctggagcgggttttcatcccccacggtcttatcatggatagaacagaaaggctggccagggacgtgatgaaggaaatgggaggacaccacattgtggcgctctgtgtactcaagggcggctataaattcttcgccgatctgttagattatatcaaggccctgaaccggaactccgaccgatccattcctatgactgtcgattttatcagattaaaatcttactgcaatgaccagagtactggcgacataaaggtgattggaggagatgacctgtccactttaaccggcaaaaacgttctgattgttgaggacatcatcgataccgggaagactatgcagaccttgctgagccttgtcagacagtataatcccaagatggtaaaggtcgcttcccttctggtgaaacgcacgcccaggtctgtgggatacaagcctgatttcgtggggtttgagataccggacaaatttgtggtcggatatgcgctcgattacaacgagtattttagggacctgaaccatgtctgtgttatttccgagaccggcaaagcgaagtataaagcc

SEQ ID NO: 13816 - DNA, 654 bp, synthetic construct
  misc_feature 1..654: note = source = /note="Description of Artificial Sequence: Synthetic coding sequence"
  source 1..654: mol_type = other DNA
atggcgaccaggagtccgggggtggtgatttccgatgatgagcctgggtacgaccttgacttgttctgtattccaaatcattatgcagaggacctcgagcgggtgtttatcccgcatggtctgataatggaccgcaccgagaggcttgctcgcgatgtcatgaaagaaatgggaggacaccacattgtggccctgtgtgttttaaaaggggggtataagttctttgcagacctattagattacataaaggccctcaacagaaatagcgacagaagcatccccatgactgttgactttatcaggttaaagagctattgtaatgatcaatctaccggcgacattaaagtcatcggcggggatgatctgagtacccttaccggtaaaaatgtgctcatcgtggaagatattattgacacgggaaaaacaatgcagaccttgctctccttagtccgtcagtacaatcccaagatggtaaaagtggcgtcgttgctcgtgaagaggaccccacggtccgtgggttacaaaccagactttgtgggttttgaaataccagacaaatttgtcgttggctacgctctggattacaatgaatattttagagacctgaaccacgtgtgcgtgatttcagaaacagggaaagccaaatacaaggcc

SEQ ID NO: 13817 - DNA, 654 bp, synthetic construct
  misc_feature 1..654: note = source = /note="Description of Artificial Sequence: Synthetic coding sequence"
  source 1..654: mol_type = other DNA
atggctacgcgctctccgggggtggtcatcagcgacgacgaaccaggttacgatctggaccttttttgtatccctaaccattacgccgaggacctggagcgagtttttattcctcacggtctgattatggataggacagaaaggttggcacgtgatgttatgaaagaaatgggcggtcaccatattgtcgctctttgtgttcttaagggcggttataaattcttcgccgacttactggattatattaaagcgctgaataggaacagcgatcgctccattccaatgacagtggacttcatcaggcttaaatcctactgtaatgaccagtccaccggcgatatcaaggtgattggaggcgatgatctcagcaccttgactggcaaaaatgtgctgattgtcgaggatatcatcgataccggcaagacaatgcagacgttactctccttggtgcgccaatacaacccgaagatggtcaaggtggcatccctcttggtgaagcgcactccccgcagcgtcggctacaagccagatttcgtgggctttgaaattccggataaattcgtagtgggttacgcactggattataacgaatacttccgggacctgaaccacgtgtgcgtcatcagcgagaccggcaaggcgaagtataaggcg

SEQ ID NO: 13818 - DNA, 654 bp, synthetic construct
  misc_feature 1..654: note = source = /note="Description of Artificial Sequence: Synthetic coding sequence"
  source 1..654: mol_type = other DNA
atggctacaaggtctcctggggtcgtgatctcagatgacgaacctggttacgacctggacctgttctgtataccgaatcattacgcagaagacctggagagggtgttcattcctcatggattaataatggatcgaacggagagactagcccgagatgtcatgaaggaaatggggggacatcacattgtggccctgtgtgttttgaagggcggttataagttcttcgccgacctcctcgattatatcaaagctcttaacaggaactccgaccggagcattcccatgactgtcgattttatccgtttaaagagctattgcaacgaccagagcaccggtgatatcaaggtgatcgggggtgatgacctgtctaccctgactggcaagaatgtgcttatcgtggaggatataattgacacagggaagactatgcagaccttactcagcctggttcgccagtacaatcccaaaatggtgaaggttgccagtctgctcgtgaaaagaacacctagatctgtcgggtataagccggacttcgtgggatttgagatcccggacaagttcgttgtcggttatgctctcgactataacgagtattttcgtgatctaaatcatgtttgtgttatctccgaaacaggaaaagcgaaatacaaagcc

SEQ ID NO: 13819 - DNA, 654 bp, synthetic construct
  misc_feature 1..654: note = source = /note="Description of Artificial Sequence: Synthetic coding sequence"
  source 1..654: mol_type = other DNA
atggctacaaggtctccaggagtagtaattagtgatgatgaaccaggatatgatttagatttattctgtataccaaatcattatgctgaagatcttgaacgtgtatttattccacatggtttaattatggatagaacggagagacttgcaagagatgttatgaaagaaatgggtggacatcatattgttgctctttgtgtattaaaaggtggatacaaattctttgctgatttgcttgactatattaaagcattaaaccgtaattcagatagatctattccaatgactgttgatttcattagattaaaatcatactgtaatgatcaaagtacaggagatattaaagtaatcggaggagatgatttatctacattaactggaaagaatgttcttattgttgaagatattattgatactggaaaaacaatgcaaacattattgtctcttgtccgacaatataatccaaaaatggttaaagttgcttctttattagtaaaacgtacaccaagatcagttggatataagccagattttgttggatttgaaattccagataaatttgttgttggatatgcattagattataatgaatattttagagacttgaaccatgtttgtgttatttctgaaactggtaaggctaaatataaggca

SEQ ID NO: 13820 - DNA, 654 bp, synthetic construct
  misc_feature 1..654: note = source = /note="Description of Artificial Sequence: Synthetic coding sequence"
  source 1..654: mol_type = other DNA
atggctactaggtcccccggagtcgtgatctccgatgatgaacccggatacgatctcgacctattctgcatccccaatcattatgccgaagacctcgagagagtgttcatccctcatggattaatcatggatcggacagaacggcttgcccgcgacgttatgaaggaaatgggagggcatcatatcgtggctctctgcgttctaaaaggggggtataaattttttgcagatctcctggattacatcaaggcacttaacagaaatagtgaccgaagtatccctatgacagtagatttcattcggttgaaatcttactgcaatgatcagtccactggagatatcaaagtgattgggggggatgatctgagtacactgactgggaaaaatgttctcatagtggaagacattatagatacaggaaaaacaatgcagactctcctatctctggtgcggcagtataatccaaaaatggtcaaagtcgcctcactgctggtcaaaaggactccccgctctgtcggatataaacccgatttcgttggattcgaaatacccgataaatttgtcgtgggatatgccctggattacaacgaatattttcgggatctcaaccacgtctgtgttatctctgagacaggaaaagccaaatataaagca

SEQ ID NO: 13821 - DNA, 654 bp, synthetic construct
  misc_feature 1..654: note = source = /note="Description of Artificial Sequence: Synthetic coding sequence"
  source 1..654: mol_type = other DNA
atggccacgagatcaccgggagtggttatttcggatgacgagccagggtatgaccttgacttattttgcatcccgaatcactacgcggaagatttggaacgggttttcattccccatggtcttatcatggatagaaccgaacgtctggcgagggatgtgatgaaggaaatgggcggacaccatattgtagcactatgcgtactcaaaggtggttataaattcttcgctgatctcttagattatattaaagccttaaatcgtaactcggatagatctattccgatgacagtagattttattcgtctaaaatcctattgcaatgatcagtcaacaggagatatcaaagtaataggtggagacgaccttagtacactgacgggaaagaatgttcttatcgtagaggatatcattgatacaggcaagacaatgcaaacattattgtccttggttcgtcagtacaaccctaagatggtaaaagtcgcttctctgctggtcaaacgcacaccgcggtcggtaggttataaaccagactttgtcggatttgaaattcccgataaatttgtggttggctatgctttagattataatgaatattttcgagatttgaatcatgtctgtgttatttcagaaacagggaaagcaaaatataaagct

SEQ ID NO: 13822 - DNA, 654 bp, synthetic construct
  misc_feature 1..654: note = source = /note="Description of Artificial Sequence: Synthetic coding sequence"
  source 1..654: mol_type = other DNA
atggccacgcgatcccctggagtggtgatctccgatgatgaaccaggttatgatcttgatctgttttgcatcccgaaccactatgcggaagatcttgaaagggtgttcatcccgcacggactgattatggacagaaccgaaagactggcgagagacgtcatgaaggagatgggaggacaccatatagtggcactgtgcgtgctgaaaggaggatacaagttcttcgcagatctgctggattacatcaaggcgctcaacaggaactcggaccggtccattcccatgactgtcgactttattcgcctgaagagttactgtaacgaccaatcaactggcgacattaaggtaatcggcggcgacgacctgtcaactttgaccggaaagaatgtgctgatcgtcgaggacattatcgacaccggcaagactatgcagaccctgctgagcctggtgcgccagtacaatccgaagatggtgaaggtcgcatccttgctggttaagagaaccccccgctcagtggggtacaaacctgacttcgtcggattcgagatcccagacaaattcgtcgtcggttacgccctcgactataacgagtattttcgcgatctcaaccacgtgtgcgtgatctcggagacgggaaaagcaaaatacaaggct

SEQ ID NO: 13823 - DNA, 654 bp, synthetic construct
  misc_feature 1..654: note = source = /note="Description of Artificial Sequence: Synthetic coding sequence"
  source 1..654: mol_type = other DNA
atggccacgcgctcccccggtgtggtgatcagcgacgatgagcccggctatgatctggatctgttctgcattcccaaccactacgcggaggatttggagcgcgtgtttataccccatggtttaattatggaccggacggagcgtctggcccgagatgtaatgaaggagatgggaggccaccatatcgtggctttgtgtgttctaaagggaggctataagtttttcgccgatctcctcgattatatcaaagccctgaatcgcaacagtgatcgctcaattcccatgactgtggatttcattcgtctgaagtcatactgcaacgaccagagcacgggagacatcaaagttatcggaggcgatgatctatcgaccctgactggaaagaatgtcctaatagtggaagacattattgataccggcaagactatgcagacattgttgagtctggtccgccaatataaccccaagatggttaaggttgcctcgctgttggtgaagaggacgccgagaagcgttggatacaagccagacttcgtcggttttgagatacctgacaagtttgtcgtcggatacgcattggactataatgagtacttccgcgatctgaaccacgtatgcgttatttcagaaactggcaaggcaaagtacaaggcg

SEQ ID NO: 13824 - DNA, 654 bp, synthetic construct
  misc_feature 1..654: note = source = /note="Description of Artificial Sequence: Synthetic coding sequence"
  source 1..654: mol_type = other DNA
atggctacgcgatctccgggtgtcgtcatttcggacgacgagccaggctacgacctagacttattctgcattccgaaccactatgctgaggatctggagcgcgttttcatcccgcacggactcattatggaccgtacagagcgcttagctagagacgtaatgaaggagatgggggggcatcacatcgtcgcactctgtgtgctgaagggaggctataaattcttcgccgacttgctcgattacattaaggcgctgaacaggaacagcgatcgctccatcccaatgactgtggatttcatccgccttaagtcctactgcaatgatcaatccacgggagacattaaagtcatcggaggcgacgacctctccaccctcacgggaaagaacgtgctaatcgtcgaggacataattgacaccggtaagacgatgcaaacgctgctaagccttgttcgtcagtataaccccaagatggtcaaggtggcgagtcttcttgtgaagcgtactccccgcagcgtgggatataagcccgatttcgttggtttcgagattcctgataagttcgtggtcggatacgcactcgattataacgaatatttccgtgatctgaatcacgtgtgcgtcatctctgagaccggcaaggccaagtacaaggcg

SEQ ID NO: 13825 - DNA, 654 bp, synthetic construct
  misc_feature 1..654: note = source = /note="Description of Artificial Sequence: Synthetic coding sequence"
  source 1..654: mol_type = other DNA
atggccacgcgttcccccggagtcgttattagcgacgatgaacctggatacgatctcgatctgttttgtatacctaaccattacgcagaggacctcgaacgagtctttattccacacggtcttatcatggacagaactgaaagacttgcacgcgatgtcatgaaggagatgggtggacatcacatagtggcactgtgtgtgcttaagggtggttacaagttttttgcagatttgctggattacatcaaggcactgaatagaaattccgacagatccatcccgatgaccgtcgatttcatccgactgaaatcgtactgtaacgatcagtcgaccggggatatcaaagtgatcggaggggacgatctctcgacccttactggaaagaatgtcctgatagtggaggacataatcgataccggcaaaactatgcaaacgcttttgtcactggtgagacaatacaatcctaagatggtgaaagtggccagccttctggtcaaacgcacgccccgtagcgtcggatacaagcccgatttcgtcggtttcgagatccctgacaaatttgtggtgggatacgcactcgattacaacgagtacttccgtgatctcaaccatgtgtgtgtgatcagcgaaactggtaaggcaaagtacaaggcg

SEQ ID NO: 13826 - DNA, 654 bp, synthetic construct
  misc_feature 1..654: note = source = /note="Description of Artificial Sequence: Synthetic coding sequence"
  source 1..654: mol_type = other DNA
atggcaactagatcgcctggagtcgtcatctcggatgatgaacccggatacgaccttgatcttttttgcattcctaatcattacgcagaagatcttgaacgtgtctttattccccacggcctcattatggaccgcaccgagcgactcgcacgggacgttatgaaggagatggggggccatcacatcgtggccctgtgtgtcctgaagggtggttacaagtttttcgcagatctgctggattacattaaagcactcaatcgaaacagcgataggtcgatcccaatgactgtggactttatacgtcttaagtcgtactgtaacgaccaatcaacgggagatatcaaagtaattggtggagacgacctctccactctcaccggtaagaacgtgctcatcgtggaggacatcatagatacgggtaagactatgcaaacgcttctctcgttggtgagacaatacaatcccaagatggtgaaggtggcgtccctgcttgtcaagaggaccccgcgtagcgtgggatacaaaccagattttgtgggattcgagatccctgataagtttgtggtgggttacgctcttgactacaatgaatacttccgcgatctgaatcatgtgtgcgtcattagcgagactgggaaggcaaagtacaaagcg

SEQ ID NO: 13827 - DNA, 654 bp, synthetic construct
  misc_feature 1..654: note = source = /note="Description of Artificial Sequence: Synthetic coding sequence"
  source 1..654: mol_type = other DNA
atggcgacaaggagtccaggcgttgtaatctctgatgacgagccaggctacgacctggaccttttctgtatcccaaatcattatgccgaggatttggaacgcgtctttattccccacgggctgataatggataggactgagcgactggcgcgagacgttatgaaggagatgggcggccatcacatcgttgcactgtgcgttcttaaaggaggctacaaattttttgccgacctgctggactatattaaggcactgaacaggaattcagacagatctattccgatgaccgtcgacttcatccggctgaagagttattgcaacgatcagtcaaccggtgacattaaagttattggtggagacgacctgtccacgttgaccggaaaaaacgtcctgatcgtggaagatattattgatacaggcaaaacaatgcaaacccttctgtcactcgtgcggcagtataatccaaagatggtgaaagtggcctccctgctggtgaaaagaactccccgcagtgtcgggtacaaacccgattttgttggcttcgagatcccggacaaattcgttgttggctatgccctcgactacaacgagtatttcagggacctcaaccatgtgtgcgttattagtgagacgggcaaagccaaatataaggca

SEQ ID NO: 13828 - DNA, 654 bp, synthetic construct
  misc_feature 1..654: note = source = /note="Description of Artificial Sequence: Synthetic coding sequence"
  source 1..654: mol_type = other DNA
atggccactagatcgccaggcgtggtgatctcggatgatgaaccagggtacgacctggatcttttttgtatcccaaatcattatgcagaagatctcgaaagagtgtttattcctcatggcctgattatggatagaactgagagactggctcgggatgtgatgaaagagatggggggacatcatattgtggcgctgtgcgtgctgaaggggggctacaaattctttgcagatcttcttgactacataaaggcacttaaccgcaactcagatagatcgattcctatgaccgtggatttcatacgattgaagtcgtactgtaacgaccagtccaccggagacattaaggtcataggaggcgatgatctttccactcttactggaaagaatgtgctcatagtggaggacattattgataccggtaagactatgcaaacccttctctcactggtgcggcagtacaaccccaaaatggtgaaggtcgcatccctcctggtcaagaggactcctcgctccgtgggctacaaaccagactttgtggggtttgagattccggacaagtttgtggtgggatacgccctggactacaatgaatacttcagagacttgaaccacgtgtgcgtgatctcagaaaccggtaaagcaaagtataaggca

SEQ ID NO: 13829 - DNA, 654 bp, synthetic construct
  misc_feature 1..654: note = source = /note="Description of Artificial Sequence: Synthetic coding sequence"
  source 1..654: mol_type = other DNA
atggccactcgctctccaggtgttgtgatcagcgatgatgaacctggttatgacctggatctgttttgtattcccaaccactacgcagaagacctggagagagtcttcatcccccatgggctcattatggatcgcaccgagagacttgctcgggacgtgatgaaggaaatggggggccaccacattgtcgctctctgcgttctaaaagggggctacaaattctttgcagatctgctcgattatattaaggctttgaatcgcaactcagatcgtagcatcccaatgactgtagacttcatccgcctaaagtcatattgcaatgaccaatcgaccggtgacataaaagtaatcggaggggacgacctcagcactctgacaggaaagaatgtgttgatcgtggaggacatcatcgacacagggaaaacaatgcagaccctcctgagcttggtacgccagtataacccaaaaatggtgaaggtagcctctcttctggtcaaacgcacacctcggagtgtgggctataaacccgattttgtgggattcgagatccccgacaaattcgtagtcggatacgccctcgactataacgaatattttcgggacttgaaccatgtgtgcgtcatttccgaaaccggaaaagccaagtacaaggct

SEQ ID NO: 13830 - DNA, 654 bp, synthetic construct
  misc_feature 1..654: note = source = /note="Description of Artificial Sequence: Synthetic coding sequence"
  source 1..654: mol_type = other DNA
atggccaccaggagtccgggcgtggtaattagcgacgatgagcctggttatgacttagacctcttttgcatccccaatcactatgccgaggaccttgagcgggtgttcatcccccacggcctgattatggatagaaccgagagattagcgagggatgtgatgaaggagatgggaggccaccacattgttgcgctgtgtgtgctgaaaggtgggtacaagtttttcgcagacctgctggactacatcaaagcactcaatcgaaactcagatcgctctattccaatgacagtggatttcatccgcctgaagagttattgtaacgaccaaagtacaggggacatcaaagtcatcggcggagacgatctatcgactctgaccgggaaaaacgtgctgatcgttgaggacattattgacactggcaagactatgcagactctgctgtcgttagtccggcagtacaatccaaagatggtcaaggttgccagcctgctcgtgaaaagaactccccggagcgttgggtataaacctgattttgtgggcttcgaaattccggacaagtttgtcgttggttacgctcttgattacaatgagtactttcgggacctaaatcacgtgtgtgtgatcagtgaaaccggaaaggccaagtacaaagca

SEQ ID NO: 13831 - DNA, 654 bp, synthetic construct
  misc_feature 1..654: note = source = /note="Description of Artificial Sequence: Synthetic coding sequence"
  source 1..654: mol_type = other DNA
atggccactcgttcacccggggtagtgatctctgatgacgagcctgggtacgatctagatctattttgcattccaaaccactacgcggaagacctcgaacgagttttcattccacacggactgatcatggaccggaccgagaggttggccagagatgtcatgaaggagatgggtggccaccacattgttgccttgtgcgttctaaagggaggatataaattcttcgctgacttgcttgattacatcaaggctctcaaccggaactcagaccgatctatccccatgaccgtcgattttattagacttaagtcttactgtaatgaccagtccaccggggatatcaaggtaattggcggtgatgatttgagcaccctgacagggaaaaacgtcttgatcgtggaggacattatcgatacaggtaaaacaatgcagacactgctttctctcgttcgacaatataacccaaaaatggtgaaggtggcctccctactggtaaaaaggacaccgagatccgtcgggtacaagccagactttgtaggctttgagatcccagataaattcgtggtgggctacgcgttggactacaacgaatactttagggatctgaaccatgtctgcgtgattagcgaaacagggaaagcaaaatacaaggct

SEQ ID NO: 13832 - DNA, 654 bp, synthetic construct
  misc_feature 1..654: note = source = /note="Description of Artificial Sequence: Synthetic coding sequence"
  source 1..654: mol_type = other DNA
atggccacccgatcccctggggtggttattagtgacgacgagcctggttacgatttggacctgttctgcatcccaaaccactatgcagaagatctcgagagggttttcataccgcacggcctcattatggacagaacagaacgattagcccgggacgtcatgaaggagatgggaggccatcatatcgtggctctgtgcgtgctgaaagggggttacaagttttttgcagacctgcttgactatatcaaggcactcaaccgcaatagcgacaggagtatcccaatgaccgtggatttcatacgcctcaaaagctactgtaatgaccagagcaccggcgacatcaaagtgatcggcggagacgatctgagcacgctaaccggaaagaacgtcctgatcgtagaggacataattgacacagggaagacgatgcagacccttctgagccttgtacgacagtataatccaaaaatggtcaaggtggctagcctattagtgaagcgcaccccgcgttcggtcgggtacaagcccgattttgtaggattcgaaatacctgataaatttgtggtaggttatgccttggactacaacgagtactttcgggatttgaaccatgtttgcgtaattagtgagaccggtaaagcaaaatataaggcc

SEQ ID NO: 13833 - DNA, 654 bp, synthetic construct
  misc_feature 1..654: note = source = /note="Description of Artificial Sequence: Synthetic coding sequence"
  source 1..654: mol_type = other DNA
atggccactcggtctcctggggtggtgatctcagacgacgagccaggatacgacctagacctgttttgtatacctaatcattacgccgaggacttggaacgagtgtttattccgcacggtcttattatggataggacggaacgactggcgcgcgatgttatgaaagagatgggagggcatcacatcgttgcgttgtgtgtgctcaagggcggatacaagtttttcgctgaccttctggattatatcaaggcgctgaataggaactccgacaggtctatccctatgactgttgattttatcagacttaagagctactgcaatgaccagagcacgggggatattaaagttatcgggggagatgacctgtctacactaactggcaagaatgttctaatcgtagaagacataattgacacagggaagacaatgcagacactgctcagtttggtgcgacagtacaatcctaagatggtgaaggttgcatctctcctagtgaagcgcacccctcgttccgtgggttacaaacccgacttcgttggatttgaaatacccgataagtttgtggttggttacgccctggattacaacgaatattttagggatctgaaccacgtctgtgtcatctccgaaactggaaaggccaaatataaagct

SEQ ID NO: 13834 - DNA, 654 bp, synthetic construct
  misc_feature 1..654: note = source = /note="Description of Artificial Sequence: Synthetic coding sequence"
  source 1..654: mol_type = other DNA
atggccactaggagccctggggttgtcatttcggatgatgaacccggatacgaccttgacctgttttgcatcccgaaccattacgccgaggatctggaaagagtattcataccacatggattgatcatggatcggaccgagcggttggcacgggatgtaatgaaggagatggggggacatcacatcgtggctctctgcgtgctaaaaggcggctacaaattctttgcagacttactggactacataaaggctctgaacagaaacagtgatagatctatacccatgacggtggacttcatcagactcaagagttactgcaatgatcagagcacaggcgatattaaagtcattggcggtgacgatttatcaaccctcaccggcaagaatgtacttatagttgaagacatcatagacacgggcaagactatgcagaccctgctgtctctcgtgaggcagtataaccctaaaatggtcaaagtggcctcccttctcgttaagcgaacccctagatctgtcggttataagccagacttcgttggattcgaaattccagacaagttcgtagtcggctatgcactggactacaacgagtattttagggacctgaaccatgtatgcgtgatttccgaaactggaaaagcgaagtataaggct

SEQ ID NO: 13835 - DNA, 654 bp, synthetic construct
  misc_feature 1..654: note = source = /note="Description of Artificial Sequence: Synthetic coding sequence"
  source 1..654: mol_type = other DNA
atggccaccaggagccctggtgtggtcatttccgatgatgaacccggctatgacttggacctgttctgcatccctaaccattatgccgaggacctggagcgtgtgttcattccccacggcctgataatggacagaaccgagaggctggcacgcgacgtgatgaaggaaatgggcggacaccacatagtggccttgtgcgtgctgaagggcggctataaattttttgcagacctgctggattacatcaaggcactgaacaggaactctgatagatccattcctatgaccgttgactttattcgactcaagtcctattgcaatgaccaaagcactggcgatatcaaggtgatagggggagatgatctttctactcttactggcaaaaacgtgctaatcgtggaagacataattgacactggcaagactatgcagaccctgctgagcctcgtgcgacaatataatcccaagatggtaaaagtagccagcctgcttgtcaagagaactcctcgatctgttggctacaagcccgatttcgtagggttcgaaattccagacaagttcgtggtgggttatgctctcgattacaatgaatatttcagggaccttaaccatgtatgcgtgataagcgagaccggaaaggcgaagtataaggct

SEQ ID NO: 13836 - DNA, 654 bp, synthetic construct
  misc_feature 1..654: note = source = /note="Description of Artificial Sequence: Synthetic coding sequence"
  source 1..654: mol_type = other DNA
atggcaaccagatcgccgggagtagtgatcagcgacgacgaaccgggatatgaccttgacctgttctgcatcccaaatcattacgcagaggacctggaaagggtgttcatccctcacgggctcatcatggaccgcactgagcggttggcacgggacgtgatgaaagagatgggaggccaccacatcgtggccctctgcgtgctcaaagggggctacaagttcttcgccgacctgcttgactacattaaggcgctgaatcggaactccgaccgctcgatccctatgaccgtcgactttattcgcctcaagagttactgcaacgatcagtccacgggcgacatcaaggtgatcggaggtgatgatctgagcactctcacggggaagaatgtgctgattgtagaagatatcatcgacactggaaagactatgcaaacccttctctcgcttgtccgacagtacaacccaaagatggtgaaggtggcctcgctcttggtcaaacggaccccaagatcagtgggatacaagccggactttgtcggatttgaaatcccggacaagttcgtggtgggctatgctttggattacaacgagtacttccgcgatctgaaccatgtgtgtgtcatttctgaaactggaaaggccaagtacaaagcg

SEQ ID NO: 13837 - DNA, 654 bp, synthetic construct
  misc_feature 1..654: note = source = /note="Description of Artificial Sequence: Synthetic coding sequence"
  source 1..654: mol_type = other DNA
atggctaccagatcaccgggagtcgtgattagcgatgacgagcctggttacgatctcgacctgttttgcatcccgaaccactacgctgaggatctcgaacgggtgttcatcccccacgggttgatcatggatcgcaccgaacggcttgctagagacgtcatgaaggagatgggcggccatcatatcgtggccctctgcgtcctcaagggaggatacaagtttttcgcagacctcctggactatatcaaagccctgaaccgaaactccgaccgcagcatcccgatgaccgtcgatttcatccgcctcaagtcctactgcaacgatcaatcgactggtgacatcaaggtgattggaggcgatgatctctcgaccctgaccggaaaaaacgtgctgattgtggaagatatcatcgatactggaaagaccatgcagactctgctgagcctggtacggcagtacaacccaaagatggtgaaggtcgcgtcattgctggtcaaaagaacgcctagatcggtgggatacaagccggacttcgttggatttgagatcccggacaagttcgtggtgggatacgcgctggactataatgagtatttccgagacttgaaccacgtgtgtgtgatctccgagactggtaaggctaagtacaaggcc

SEQ ID NO: 13838 - DNA, 654 bp, synthetic construct
  misc_feature 1..654: note = source = /note="Description of Artificial Sequence: Synthetic coding sequence"
  source 1..654: mol_type = other DNA
atggcaacgcggagccccggtgtggtcatttctgacgacgagccaggttacgatctggaccttttctgcatccccaatcactacgctgaagatttagaaagggtgtttatcccgcacggtctgatcatggaccgtacggagcgcctcgcgcgagacgtgatgaaggaaatgggggggcaccatatcgttgccctctgcgttctgaagggaggatataagttttttgctgacctgcttgactacatcaaagcgcttaatcgaaactcggaccgctccattccaatgacagtggacttcataagacttaaatcgtactgtaatgaccaatccacaggagatattaaggttattggaggagacgatctgtcaacactaacagggaagaacgtcctgatagtggaggatataatagataccggcaagacgatgcagactcttctctccctcgtgcgacagtacaaccccaagatggtcaaggtggctagcctgctcgtgaagcggactcctcggtcagtcggttacaagccagatttcgtcggttttgagataccggataagttcgtggtgggatacgctctagattacaacgagtactttcgggacctaaaccatgtgtgtgtgatctccgagactgggaaggccaagtataaggca

SEQ ID NO: 13839 - DNA, 654 bp, synthetic construct
  misc_feature 1..654: note = source = /note="Description of Artificial Sequence: Synthetic coding sequence"
  source 1..654: mol_type = other DNA
atggccaccagatcccctggcgtggtaatttccgacgatgaacctggatatgatctcgatctcttttgtataccaaaccattacgcagaagatctcgagagagtgttcattccccacggcctgattatggaccgaaccgagagactcgcccgtgatgtaatgaaggaaatgggtggacatcatatcgtggcgctttgcgtactgaaaggagggtacaaattctttgcagacctgctggattacatcaaagcattgaaccgcaactcagaccggtcgattcctatgactgtggactttatcaggcttaaatcgtactgtaatgatcagagcaccggtgacataaaggtcataggtggagatgatctctcgactctgaccgggaagaatgtgcttattgtcgaggacatcatcgacactggaaagacgatgcaaactcttctctctcttgttcgccaatacaacccaaaaatggtgaaggttgcatcgcttcttgtgaagagaaccccacggagcgtcggatacaagcctgatttcgttggctttgaaattcccgataagtttgtggtgggttacgcattggactataatgaatactttagggatctgaaccacgtgtgcgtcataagtgaaactggcaaggccaagtacaaggcg

SEQ ID NO: 13840 - DNA, 654 bp, synthetic construct
  misc_feature 1..654: note = source = /note="Description of Artificial Sequence: Synthetic coding sequence"
  source 1..654: mol_type = other DNA
atggcaactcgctctcctggagtggtgatctcggacgatgaacccggctacgatctcgatttgttctgcatcccaaaccattacgcagaagatctggagcgggtgtttatcccacacggactgatcatggatcgcactgaacgcctcgcccgcgacgtcatgaaggagatgggaggccatcacattgtggctctctgtgtcctcaagggaggctacaaattctttgcggatctgctggactacattaaagctctgaatagaaattccgaccgatccattccgatgaccgtggacttcatcagactcaagagctactgcaacgaccagtcaaccggtgatatcaaggtgatcgggggtgacgacctgtccactttgaccgggaagaacgtcttgatcgtggaggacatcatagatacgggcaagactatgcaaaccctgctgtcgcttgtcaggcagtacaatcctaagatggtgaaagtcgcctcactgctggtgaaaaggaccccgcggtcggtaggatacaaaccggacttcgtgggatttgagatcccggacaagttcgtcgttgggtacgcccttgactataacgaatacttccgggacctcaaccacgtgtgcgtgatcagcgaaactggaaaggcgaagtacaaggcc

SEQ ID NO: 13841 - DNA, 654 bp, synthetic construct
  misc_feature 1..654: note = source = /note="Description of Artificial Sequence: Synthetic coding sequence"
  source 1..654: mol_type = other DNA
atggccactaggtcacccggggttgtgatcagcgacgatgaaccggggtatgatcttgacttgttctgtatccctaatcactacgctgaggatctcgagcgcgtgttcattccgcacggccttatcatggatagaacggaaagactcgcccgggatgtcatgaaggagatgggcgggcaccatatcgtggccctgtgcgtccttaagggcggatacaagttctttgctgacttgttggactacatcaaggccctgaatcgcaactccgacagatcgattccaatgactgttgacttcatacgcctgaaaagctactgcaatgaccagtccaccggcgacatcaaagtgatcggaggggacgacctgtcgacgctgaccggaaaaaacgtactgatcgtcgaggacatcattgataccggcaagaccatgcaaaccctcctgtccttggtgcgtcagtacaaccctaagatggtcaaggtcgcgagcctcctcgtgaagcggactccgcgctcagttggatataagccagattttgtcggcttcgaaatcccggataagtttgtggtgggatacgcgctggattacaacgaatacttccgggacctcaaccatgtgtgcgttatatcggaaactggaaaggcaaaatacaaagca

SEQ ID NO: 13842 - DNA, 654 bp, synthetic construct
  misc_feature 1..654: note = source = /note="Description of Artificial Sequence: Synthetic coding sequence"
  source 1..654: mol_type = other DNA
atggccacccggagtcccggggtcgtgattagtgatgatgagccaggatatgacctcgatctcttttgtattccgaatcattatgctgaggatttggagagagtgttcatccctcatggacttattatggacagaacagagagattggccagggacgtaatgaaggagatgggcggtcaccacatcgtggctctgtgtgtgctgaaaggcggatacaagttctttgccgatctgttagactatatcaaggcacttaaccggaactccgaccggtccatccctatgaccgtggatttcatcaggcttaagtcttactgcaacgatcagagcacgggggacattaaggtcatcggaggggatgacttatcaaccctgacagggaaaaatgtcctgatcgttgaggatattatagacactggcaagactatgcaaaccctgctgtccctggtgcgccaatacaatccgaagatggtgaaggttgcctctctgctggtgaagcgtacaccaaggtccgtgggttacaagcccgatttcgttgggttcgagatacctgacaaattcgtggttggctacgctctggactacaatgagtatttccgagatttgaatcatgtatgtgtgatatctgagacaggcaaggccaaatataaggca

SEQ ID NO: 13843 - DNA, 654 bp, synthetic construct
  misc_feature 1..654: note = source = /note="Description of Artificial Sequence: Synthetic coding sequence"
  source 1..654: mol_type = other DNA
atggccactcggtcacctggagtcgtgatttcagacgatgagccaggatacgacctggacctgttctgcatacccaatcactacgcagaggacctggaacgcgtctttatcccgcatggacttatcatggacagaactgagcgtctggctcgtgatgtcatgaaggaaatgggtggtcatcacattgtggcactgtgtgtgttgaaaggggggtacaagtttttcgccgatttgctcgattacataaaggcacttaatagaaatagcgatcgctccatccctatgactgtcgacttcatcagactgaagtcctattgtaacgatcagtcgactggcgacatcaaggtcattggaggagatgacttgtccacgctgaccgggaagaacgtgcttatagtggaggacattattgataccggaaagactatgcaaacgctgctgtcccttgtgcggcaatacaaccccaagatggtgaaggtggcatcgctcctcgtcaaacgaactccgcgcagcgtgggctataaaccagattttgttggatttgaaatacccgacaaattcgtcgtcggctacgcactcgactataacgaatacttccgagatcttaaccacgtgtgcgtgatttcggaaaccggaaaggcaaagtacaaagcg

SEQ ID NO: 13844 - DNA, 654 bp, synthetic construct
  misc_feature 1..654: note = source = /note="Description of Artificial Sequence: Synthetic coding sequence"
  source 1..654: mol_type = other DNA
atggctacacgcagcccaggggtggtgatctcagatgatgagccggggtacgacctggacttattttgcattccaaaccactacgccgaggacctagaaagagtcttcataccacatggcctgattatggaccggacggaaaggctggctagggacgtcatgaaagaaatgggagggcaccatatcgtcgctttgtgcgtgctgaaagggggatataagtttttcgccgacctgcttgattatatcaaagctttaaacagaaattccgatagatctattcctatgaccgtggatttcatccgcctgaaaagttattgcaacgatcaatccaccggagacataaaggtcatcgggggggacgacctctcaacattgacaggaaagaacgtcctgatcgttgaagatatcatagacacgggaaagaccatgcagactctactctcacttgtaagacagtataatccaaagatggtaaaggttgcaagtcttttggtgaaaagaacccccaggtcagttggctacaaacctgactttgtaggctttgagatccctgataaattcgtggtcggatacgctctcgactacaacgagtacttcagggatctcaatcacgtgtgcgtgattagtgaaacggggaaagctaaatacaaggca

SEQ ID NO: 13845 - DNA, 654 bp, synthetic construct
  misc_feature 1..654: note = source = /note="Description of Artificial Sequence: Synthetic coding sequence"
  source 1..654: mol_type = other DNA
atggctactaggtccccaggtgtcgtaataagtgacgacgaacctgggtatgatctggatctgttctgcattcctaaccattacgctgaggacctcgagagggtctttatcccgcatggcctgattatggacagaactgagcgtctggcccgcgatgtgatgaaagaaatggggggccatcatattgtggccctctgtgtcctaaaaggcggctataagtttttcgccgaccttttagattatatcaaggccctcaaccggaactctgacaggtccatccctatgaccgtggactttatcaggctgaaaagttattgtaatgatcagagtactggcgacatcaaagtgataggaggcgatgatctgtcgacactcaccggcaagaacgtgctgatcgtcgaagacatcatcgatacagggaagactatgcagaccctcctttccctggttcgccagtacaaccccaagatggtcaaggtcgcctcactgctcgtaaaacgcacacccaggtcagtgggctacaagcctgacttcgtgggattcgaaatccctgacaagtttgtggtcgggtatgccctcgactacaatgaatatttccgagaccttaaccacgtgtgtgttatttcagaaactgggaaagccaagtataaggca

SEQ ID NO: 13846 - DNA, 654 bp, synthetic construct
  misc_feature 1..654: note = source = /note="Description of Artificial Sequence: Synthetic coding sequence"
  source 1..654: mol_type = other DNA
atggctactcgctcccctggagttgttatcagcgacgatgagcccggatacgacctggacctgttttgtataccgaatcactatgccgaggatttggaacgggttttcatacctcacgggctgatcatggatagaaccgaaagactggcaagagatgtaatgaaggaaatggggggacaccacattgtggcactgtgcgtactgaagggtgggtacaagttcttcgccgatttgctggattacattaaagcgctcaaccgcaacagcgataggagcataccaatgacagtcgatttcattaggcttaagagttattgtaatgaccagtccaccggggacatcaaagtcattggaggagatgatctctctacactgacagggaaaaacgtgctgatcgtcgaggacataatcgataccggtaagacaatgcaaacattgctctctctggttagacagtacaatcctaaaatggtaaaagtggcttcactccttgtgaagcggactccccgctctgtcggctataagcctgatttcgttggcttcgaaatcccagataaatttgtagtggggtacgccctcgactataacgaatatttccgtgatttgaatcacgtttgtgtcatttccgaaaccggaaaggctaagtataaggcc

SEQ ID NO: 13847 - DNA, 654 bp, synthetic construct
  misc_feature 1..654: note = source = /note="Description of Artificial Sequence: Synthetic coding sequence"
  source 1..654: mol_type = other DNA
atggccacccgcagccccggggtggtgattagcgacgacgagccaggatacgacctggacctgttctgtatccccaatcactacgctgaagatctcgagcgggtgttcataccacatggcctcatcatggaccggactgaaagattggcgcgcgatgtgatgaaggagatgggcggccatcacattgtcgccctctgtgtccttaaagggggttacaagttctttgctgatctccttgactatattaaagcgctgaataggaatagcgacaggtcgatcccaatgaccgtggactttatccgtctcaaatcctattgcaacgaccagagcaccggagacatcaaggtaataggaggcgacgacctgtctacgcttactggaaagaatgtcctgattgtcgaagatatcattgacaccggaaaaaccatgcagactttactctcactcgtccggcaatacaaccccaagatggtcaaggtcgcatctctgctcgtgaagagaacaccacgttcggtgggttacaagcccgacttcgtgggctttgaaattccggacaaatttgttgtggggtacgccctggattataatgaatatttcagggatctgaatcatgtctgtgtcatttccgagaccggcaaagcgaagtataaagcc

SEQ ID NO: 13848 - DNA, 654 bp, synthetic construct
  misc_feature 1..654: note = source = /note="Description of Artificial Sequence: Synthetic coding sequence"
  source 1..654: mol_type = other DNA
atggcgacaagatctcccggggtggtgatttccgatgatgagcccggctatgaccttgatctcttttgcattcctaatcactatgcagaggacctggagcgagtctttattcctcacggcctgatcatggaccgaacagagagattggccagagatgtaatgaaagaaatgggaggccaccacatcgtggccttatgtgttcttaagggcggctacaaatttttcgctgaccttcttgactacatcaaggctcttaacagaaactccgacagaagcatccctatgactgttgatttcattcgactgaagtcgtactgcaacgaccagagtacaggtgacattaaggtgattggtggtgacgacctgtccaccctgacagggaaaaacgtgctgattgttgaagacattatcgacacggggaaaactatgcagaccctgctgtcactcgtgcgccagtataatccgaaaatggtgaaggtcgcaagcctgcttgttaagagaacgccgcgaagtgtgggctacaagccagatttcgtgggtttcgaaattccggacaaatttgtggttggctacgccttggactacaatgagtatttcagggacctgaatcacgtgtgtgtaattagcgagacggggaaggcgaaatacaaagca

SEQ ID NO: 13849 - DNA, 654 bp, synthetic construct
  misc_feature 1..654: note = source = /note="Description of Artificial Sequence: Synthetic coding sequence"
  source 1..654: mol_type = other DNA
atggcgactcgctcccctggcgtggtcatctcggacgatgagccgggatacgacctggacctgttttgcatcccgaatcattacgcagaggatctcgaaagggtgttcatcccgcacggcctcattatggatcgcaccgaaagactggcccgggacgtgatgaaagaaatgggcggccatcacatcgtggcactgtgcgtgctgaagggaggatacaagttcttcgctgacctcctcgattacatcaaggcactgaacagaaactcggacagatcgatcccgatgaccgttgacttcatccggctgaagtcctattgcaacgatcagtcgactggagatatcaaggtgattggcggcgacgatctgtccactcttactggcaagaacgtgttgatcgtcgaggatatcatcgacactggcaaaaccatgcagactttgctctcgctggtccgccagtacaatcctaagatggtgaaagtcgcctctctgctggtgaaaagaacccctcggtcagtgggctacaaaccggattttgtgggattcgaaattcccgacaaatttgtggtcggatacgcccttgactataatgaatactttcgcgacctgaaccatgtgtgcgtgattagcgaaaccggaaaagctaagtacaaggca

SEQ ID NO: 13850 - DNA, 654 bp, synthetic construct
  misc_feature 1..654: note = source = /note="Description of Artificial Sequence: Synthetic coding sequence"
  source 1..654: mol_type = other DNA
atggcgacgcgtagtccaggcgttgtaatatccgacgacgaacctggatacgatctcgatttattttgcatcccaaatcattacgctgaggatctggaaagagtattcattcctcacggacttatcatggaccgcactgagagactggcccgagacgttatgaaggaaatgggcggccaccacatcgtggcactgtgtgttctcaaggggggctataaatttttcgcagacctacttgattatattaaagcactgaatagaaactccgacaggagcatccccatgacagtggatttcattcgactgaaatcatattgtaacgaccagtccactggagacatcaaggttattggcggcgatgatctgtcaactctgaccggaaaaaacgtgttgattgtggaggacatcattgacaccggcaagaccatgcaaaccctactgtccctggtacgccaatacaaccccaaaatggtcaaagtcgcgtccctgctggtgaaacgcacaccacggagcgtcggatacaagcctgatttcgttggatttgaaatccctgacaagttcgtcgtgggctatgctctggattacaacgaatatttcagagacctgaaccatgtgtgcgtcataagcgagaccggcaaagccaagtacaaagcc

SEQ ID NO: 13851 - DNA, 654 bp, synthetic construct
  misc_feature 1..654: note = source = /note="Description of Artificial Sequence: Synthetic coding sequence"
  source 1..654: mol_type = other DNA
atggcaactcggagtcctggcgtggtcatatcggacgacgagcccggatacgatcttgaccttttttgtattccgaatcattacgcagaggatctggaaagagtattcattcctcacgggctcataatggataggaccgaacgtctggccagagatgtgatgaaagagatgggcggacatcatattgtggccctttgtgtgctgaagggtggttataagttctttgcagatctcctggattacattaaagccctgaacagaaacagcgatcgatcaattcctatgaccgtcgacttcatcaggctgaagtcctattgcaatgatcaatccacgggcgatatcaaggtgatcggtggagatgacttgtcaaccctgaccggaaagaatgtgctcattgtggaggacattattgacactggtaagactatgcagacccttctctcgcttgtgcggcaatacaacccaaagatggtaaaagtcgcgtcgttgctcgtgaagcggacgcctcgcagcgttggctacaagccggattttgtcggattcgaaatcccagacaagtttgtcgtcggatacgcactggattacaacgaatactttcgagatttgaaccacgtgtgcgtgatttccgaaactggcaaggccaagtacaaagca

SEQ ID NO: 13852 - DNA, 1959 bp, synthetic construct
  misc_feature 1..1959: note = source = /note="Description of Artificial Sequence: Synthetic coding sequence"
  source 1..1959: mol_type = other DNA
atgaggcccctgcgaccccgcgctgcattgctggccctgctagcctccttgctggccgcgccaccggtcgccccggcggaggcgccccacctggtccatgttgatgctgctcgcgccctttggccactaagacggttctggcggagcacaggcttctgtcctcctctgcctcactcccaggccgatcaatacgtcctgtcatgggatcagcagcttaacttggcctacgtcggcgcggtccctcatcggggtataaaacaggttagaacacattggctgttagagttggtcacaacacgtggttcaactgggcggggtttatcgtataatttcacccacctcgacggctacctcgacctcctgcgggaaaaccaactgttgccgggctttgaactcatggggtccgcaagcggccacttcaccgattttgaagataaacagcaggtgttcgagtggaaagatctcgttagttcccttgcgaggcggtatattgggagatatggactcgcccacgtaagtaaatggaactttgaaacctggaatgaaccggatcatcacgacttcgataatgtttccatgaccatgcagggatttttgaactactacgacgcgtgctcggaaggtttgcgtgccgctagcccggctctgcggttaggcgggcctggcgacagcttccatacccctcctcggagtccactttcttggggacttttgaggcattgccatgacggcacaaacttttttaccggagaggccggcgtacgcttggactatatttctttacacaggaaaggcgcgcggtcatcaataagcatattagaacaggagaaagtggtggcacaacagatccgccagctcttcccgaaattcgcggacacgcccatttataatgacgaggccgacccactcgtgggttggtcacttccgcagccctggagagccgatgtcacgtatgcggcaatggtcgtaaaggtgattgcgcagcaccagaatcttctcttagccaatacaacaagcgcctttccatatgccttactgagcaatgataatgccttcctaagctaccaccctcacccgttcgcccaacgcactttgacggcccggttccaggtgaacaatacccggccgcctcacgtgcaacttctccggaagccagtattgacagcaatgggcctgctggccctgcttgatgaggaacagctgtgggccgaggtaagccaggccgggaccgttctggatagcaaccacaccgtgggtgtgctagcatcagcgcatcggccccaaggccctgccgacgcctggagagccgccgttcttatctacgcatcagatgatacccgagcacaccccaacagatctgtggcagttacccttagactccggggcgtaccgcccggaccaggcctagtatatgtgaccaggtacttggataatgggctgtgttcccccgacggcgaatggcggcgcctaggacgcccggttttccccaccgcggagcagttccgcagaatgcgagctgctgaagacccggtggccgctgcaccaaggcccctcccagcaggaggcaggctcacactccggcctgcgctaagactccccagcctgttgttggtgcatgtgtgcgcaaggcccgagaagcctcccggccaagtgacgcgcctgagggccctacctctcacacagggccagctggtgctcgtgtggagcgacgagcatgtaggaagcaagtgtctgtggacctacgagatccagttctcacaggatgggaaggcgtatactcctgtgtcgagaaagcccagcacctttaacctgtttgtcttctcacccgataccggggccgttagcgggtcctaccgagtccgagcccttgactattgggctaggccagggcctttctcggatccggtgccatacctggaggtccctgtcccaaggggcccaccaagccctggtaatccc

SEQ ID NO: 13853 - DNA, 1959 bp, synthetic construct
  misc_feature 1..1959: note = source = /note="Description of Artificial Sequence: Synthetic coding sequence"
  source 1..1959: mol_type = other DNA
atgcggcctctccggccccgggccgccctccttgcactccttgcatctctactagcagctccacctgtggcccctgccgaagctccccatctggttcatgtggatgcagcaagagcactctggcccctacggcgcttctggcggtcaactgggttctgtcctccccttcctcactcacaggccgaccagtatgttttgtcatgggatcagcagcttaacctggcctatgtgggagctgttccccacagggggatcaaacaggtaaggactcactggctgctcgaactggtcactacacgggggtctacagggcgcggactgtcttataacttcacacatctcgacgggtatttagacctgctgagagaaaatcagctcctccccgggtttgaactcatgggatccgcttcaggacattttactgactttgaagataaacagcaggtcttcgaatggaaagatctcgtgagttctctcgcccggcggtatattggaaggtatgggttagcccatgtgtcaaaatggaacttcgagacttggaacgagcctgatcatcacgatttcgacaatgtctccatgactatgcaagggttcctgaattattatgatgcttgttctgaaggattaagagccgccagtcccgcccttcgtctcggagggcctggggactcattccacacacccccgcgctctccactatcctggggactgctacggcattgtcacgatgggactaacttcttcacaggagaggcaggagtgcggttggactatatatccctgcatcggaaaggagcccgttcatcaatttctatcctggaacaggaaaaagtcgtggcacagcagatcagacagcttttccccaaatttgctgatactccaatctataatgatgaggcagacccactcgtaggatggtctctccctcaaccctggcgggccgatgtgacgtatgccgctatggtggtgaaagtaatcgctcagcatcagaatcttctgctcgctaatactactagtgccttcccatatgctcttctttctaacgataacgccttcctgtcttatcatcctcatcctttcgcacagaggacactgacagcccggttccaggtcaacaatacaaggccacctcatgttcaattactgcggaaacccgtgctgacagccatgggactcctagccctattagatgaagagcagttatgggccgaagtgtctcaggccgggactgttcttgactctaaccacactgtaggggtgctggcatcagctcataggccacagggaccagctgatgcctggcgagctgccgtcctgatctatgccagtgatgatacaagagcacaccctaatcgatcagtagcagtgacacttaggctgcgcggggtccctcctgggcctgggctcgtctatgtgacacgatacttagataatggactctgctcccccgacggggaatggcgaagattaggacggcccgtctttccaactgctgaacagtttaggaggatgcgggccgccgaagatcccgtcgctgctgcccccaggcccttgcccgccggagggcggctcactctccggcccgccctcagactcccttctctgctcttagtgcatgtatgtgcccgacccgaaaaacccccaggacaggttacgaggctgagggctctgccactcacacaggggcagctcgtgctggtctggtccgatgaacatgttgggtccaaatgcctctggacatatgaaatacaattttctcaggatgggaaagcttacacacccgtctcaagaaaaccctcaactttcaatcttttcgtattcagtccagatacaggagctgtatccggatcatatcgggtgagggctctcgactattgggccaggcccgggcccttctccgatcccgtaccctatttagaagttccagtgccaagagggccccccagtcctgggaatcca

SEQ ID NO: 13854 - DNA, 1959 bp, synthetic construct
  misc_feature 1..1959: note = source = /note="Description of Artificial Sequence: Synthetic coding sequence"
  source 1..1959: mol_type = other DNA
atgcgcccattgcgcccccgggccgctctcctcgccctcttggcctcactcctcgccgctccacccgtggctccagccgaggccccccacctggttcatgtcgacgccgcccgtgctctgtggcccctgaggcggttttggcgttctaccgggttttgtcctcccttacctcactctcaggctgatcagtacgtactgtcatgggatcagcaactgaacctggcttacgtgggtgcagtgcctcacaggggcatcaagcaagtgcgaacccattggttgttagagcttgtcacaacaagaggaagtaccgggcggggtctgagttacaacttcacccacctcgatggatacctggacttgcttagggagaaccagctgctgcccggatttgagctcatggggagcgcctcagggcatttcacggatttcgaagacaagcagcaggtatttgagtggaaggacctggtttccagtctcgccagaaggtatatcggccgctatggcctcgcccacgtgagtaagtggaattttgagacatggaatgagcccgaccaccatgattttgacaatgttagtatgaccatgcagggatttctcaattactacgatgcctgttccgaaggcctgcgtgctgcaagcccggcactgcggctgggtggacccggggactcttttcacacccccccacgatctcccctatcttggggacttcttcgacactgccatgacggcactaacttcttcaccggcgaggctggcgttcgtctggattacatttcactccacagaaaaggagccagaagcagcatcagcatccttgagcaggagaaggttgtcgctcagcagatcagacagctgttccccaaatttgcagatactccaatatataatgacgaggctgacccacttgtggggtggagcctcccacagccttggcgggccgacgttacctacgcagccatggttgttaaggtgatagcacagcatcaaaatctgctgctcgctaacacaacctctgccttcccttatgcactgctgtcaaatgataacgccttcttgagctaccatccacaccccttcgcgcaacgcacccttaccgccagattccaagtgaacaatacaaggccccctcacgtacagctcctgaggaagcctgtgctcacagccatggggttactagcactgcttgatgaggaacagctctgggcggaggtctcccaagccgggacggttctggactccaaccacaccgtcggggtgttagcctccgcccatcgtccacaaggacccgctgacgcatggcgcgcggccgtcttaatctatgcgagcgatgacacccgtgcacatccaaatagatctgtcgcagtcaccctgcggttacgcggtgtgccaccaggcccaggactggtttatgtcacccgctacctggataatggcctctgttctcccgacggcgaatggcgacgcctcggcagacctgtctttcctaccgcggagcagttcagacggatgcgggcagccgaggacccagtcgccgcagctcccagaccgctgcccgcgggtggacgactgacgttgcgaccggctctgcgactgccctcgctgctgctggtgcatgtatgcgcaaggcctgagaagccccccggccaggttacaagactgcgggcgctgccgctcacccaaggccagcttgtgctggtatggtctgatgagcacgtgggctctaaatgtctctggacttatgagatccagttcagccaggatgggaaagcctatacacccgtgtcccggaagccttcaaccttcaacctgttcgtattttctccagacaccggcgccgtgtcaggcagctacagggtgcgcgccttggactattgggccaggccgggtccctttagtgatccagtgccgtatctggaagtgcctgtacccagaggacccccaagccctgggaaccca

SEQ ID NO: 13855 - DNA, 1959 bp, synthetic construct
  misc_feature 1..1959: note = source = /note="Description of Artificial Sequence: Synthetic coding sequence"
  source 1..1959: mol_type = other DNA
atgaggcctctgcggcctcgcgccgccctcctcgcactgctggcctcactcttagctgccccaccagtcgcccccgccgaagcaccccacttagtgcatgtcgacgccgcccgggctctgtggcccctcagaagattctggcgcagcaccggcttttgtcctcccctgcctcactcgcaagcagatcagtacgtgctgtcctgggatcaacagctgaacctggcctacgtaggagcagtgccgcaccggggcatcaaacaggtccgcacccactggctgctggaactggtaaccacgcgaggatccacgggtaggggactttcctacaattttacacacctggatgggtacttggatcttttgcgagaaaaccaactgctaccagggttcgaactgatggggagcgccagcggccattttaccgactttgaagataagcagcaagttttcgagtggaaggacctagtttcttccttggcacgaaggtatatcgggagatatggactggcccatgttagcaagtggaatttcgaaacctggaacgaacctgatcaccacgacttcgacaatgtgtctatgactatgcaagggttcctcaactattacgacgcgtgttccgagggtctaagggctgcctccccagctttgaggctgggaggccctggcgatagtttccatactccccctaggtccccgctttcctggggactgttgcgtcattgtcacgacggaacaaatttctttactggggaggcaggagtgagactggattatatttccttgcatagaaagggtgcaagatcctccatatccatcttggagcaggaaaaagtcgtagcccagcagattcggcagctattcccgaaatttgctgacacacctatatacaatgatgaagcagatcctttggtcggatggtctctgccccaaccttggagagccgatgtgacttatgctgcaatggtcgtgaaggtcatagcccagcaccaaaatcttcttctagctaataccacttccgcttttccatacgcgctcctctctaatgataatgcgttcttgagctaccaccctcatccctttgcacagcggacacttaccgcaaggtttcaggtgaataatactcgacctccacacgtgcaactcttgagaaagccagtgttgaccgccatgggcctgctggctctgctcgatgaagaacagctgtgggcggaggtcagccaggcagggactgtcctagactctaatcacactgtgggcgttctggctagcgctcaccggccccagggacccgctgacgcctggcgcgcggctgttttaatatacgcaagcgacgacaccagggctcatcccaatcgctctgtggcagtgaccctccgcctcaggggcgttccgcccggcccagggttggtgtatgtgacccgctacttggataacggcctgtgtagccccgacggagagtggcgacggctgggacgtcccgtgttccctactgccgagcagttccggcgcatgcgggcggccgaagaccccgtcgccgccgcaccacggccactgcctgctgggggccggcttactttgcgcccggccctcagattaccgagtctactcctggtgcatgtctgcgcacggcctgaaaaacccccgggtcaggtgactaggttgcgcgcccttccgctcacccagggccagctcgtcctggtgtggagtgacgagcatgttggctccaaatgcctctggacttacgagatccagttctcccaagatggaaaggcctacacccctgtctcaagaaagccttcgacattcaatttgtttgttttcagcccagacaccggtgccgtcagcgggtcatatcgggtgcgtgcgctcgattattgggccaggccaggtccatttagcgatccagttccgtatcttgaggtcccggtgccccgagggccaccttctcccggtaaccca

SEQ ID NO: 13856 - DNA, 1959 bp, synthetic construct
  misc_feature 1..1959: note = source = /note="Description of Artificial Sequence: Synthetic coding sequence"
  source 1..1959: mol_type = other DNA
atgcggcccctaaggccacgtgcagccctgttagctctgctcgcaagccttctggctgccccacctgtagcaccagccgaggccccccatctggtgcatgtggatgctgcccgagcactctggcctctgcgtcgattttggcgttctactgggttctgccctccgttgcctcacagtcaggcagaccagtatgtgctgtcgtgggaccaacagctgaacctggcttatgtgggtgccgtcccccatagaggcattaaacaggtgcgcactcactggctgcttgagctcgttactacccggggctcgaccggacgtggcctgagctacaacttcacccaccttgacggttacctcgacttgctgagagagaatcagctgctgccaggctttgagttaatgggcagtgcctctggccattttacagacttcgaggataagcagcaggtcttcgagtggaaggatctcgtctccagtttggctcggagatatatcggacggtatgggttggcccacgtctctaagtggaacttcgaaacttggaacgagccagatcaccacgacttcgacaacgtttcaatgaccatgcaggggttcttaaactattatgatgcttgctcagaaggcttgcgtgccgccagcccggcccttcgcctggggggaccaggagattcattccatacaccgccaagatcacccctctcttggggcttactgaggcactgccacgacggaactaattttttcaccggggaagcgggggttaggctggactacatctccctgcatcgcaaaggagctcgaagcagcatttccatcctcgagcaggagaaagttgttgcacagcagatacgccagttatttcctaagttcgccgatacccccatttataacgatgaggccgaccctcttgtaggctggtcattacctcagccttggcgggccgacgttacttacgccgccatggtggttaaagtgatagcccagcaccagaacctgctcttggcgaacactacttcagcattcccctatgcactcctatccaacgacaacgcttttttgagctaccatccccacccgtttgcacaacgcacactcactgctagatttcaagttaacaacactcgcccaccccatgtccagctgctgcgaaagcctgtactgaccgccatggggctgttggcactcctggacgaggaacaactgtgggctgaagtttcgcaggctgggacggtgttggattctaatcacacagttggtgtgctcgcttctgcgcataggccacaggggcccgccgatgcctggagagccgccgtcctgatctacgccagcgacgacacacgggcccaccccaaccggtccgttgccgtcaccctcagactgagaggcgtcccccctgggccgggactcgtgtatgtgactaggtacctcgataatggtctgtgctcaccggatggagaatggcgacgactggggaggccagtgttcccgacagcagagcagttcagaaggatgcgtgccgcggaagatcctgtagctgcggcccccagacccctgcccgcagggggccggttgaccttgcggcccgcactgcggttgcctagcctgcttctggtccacgtctgcgcaagaccagaaaagccgcctgggcaggttactcggctccgggccctacctctcacgcaggggcagctagtattggtgtggagcgacgagcacgtgggcagtaagtgcctatggacttacgaaatccagttttcccaggacggaaaagcatacactccagtgtcccgcaagccgtctaccttcaacctgtttgtcttctctcccgacacgggggctgtgtccggatcctacagggtgcgagccctggattactgggcaaggcccggtccattctcggatcctgtgccctatctggaagtccctgtgccgcgcggacctcctagcccagggaatcca

SEQ ID NO: 13857 - DNA, 1959 bp, synthetic construct
  misc_feature 1..1959: note = source = /note="Description of Artificial Sequence: Synthetic coding sequence"
  source 1..1959: mol_type = other DNA
atgcgaccgctccgccctagggcagccctgctggcgctgctcgccagcctgctcgccgctcccccagtggctccggccgaggctccgcacctcgttcacgtggacgccgcgcgggcgctgtggcctctgcgcagattctggagatcgaccggattctgtccaccactgccacattcccaggccgatcagtatgtgctcagctgggaccagcaactgaatctggcctacgtgggggccgtgccacacaggggaattaagcaggtgcggacgcactggctgcttgaacttgtcactacccgggggtcgactggaaggggactctcctacaatttcacccacctcgacggttacctggatctgctgagggaaaaccagctgctgccgggctttgaattgatgggttcggcctcgggccacttcacggatttcgaggataagcaacaagtgttcgaatggaaggacttggtgtcctccctggcaaggcgctacatcggacgttacggtctggctcatgtctccaagtggaattttgagacgtggaatgagccggaccaccatgatttcgataacgtgtcaatgactatgcagggattcctgaactactatgacgcgtgttctgaaggcctgagagcggcttccccggccctcagattgggtggcccgggagattcattccatactccaccccggtcgccgctgtcctgggggctgctccggcattgtcacgatggaaccaatttcttcactggagaggcaggagtgaggctggactatatctcactgcaccgcaagggagcgcggtcatccatctcaatcctggaacaagagaaagtcgttgctcaacaaatccggcaactcttcccgaagttcgccgacaccccgatttacaacgacgaggccgatcctctggtgggttggtcactgccgcagccgtggcgggccgacgtgacttacgcggcgatggtcgtcaaggtcatcgcccaacaccaaaacctcttgctggcaaataccacttccgccttcccgtacgctctcctctcgaacgataacgctttcttgagctaccacccccacccgtttgctcaacggacgctgactgcccggttccaagtcaataacactcggccaccgcatgtccaactcctgcgcaaaccggtcttgactgccatggggctgctcgctctcctggacgaagaacagctctgggcggaagtgtcgcaggcaggaaccgtgctggactcgaaccacactgtgggagtgcttgcctcggctcaccgaccgcagggaccggccgacgcctggcgggcggctgtgctgatttacgcgtccgatgacactcgagctcacccgaaccggtctgtcgccgtcactctgcggctcagaggtgtcccacccgggccgggccttgtgtacgtgacgagatacctcgataacggactgtgctcgccagacggagagtggcgccggcttggacgcccggtgttcccgactgccgaacagttcagacggatgcgcgccgcagaagatcctgtggctgcagccccaagaccactccctgccggaggaagattgactctgcggcctgcactccgcctcccaagcctcctgcttgtccacgtttgcgcacgtccggaaaagccgccggggcaggttacccgccttcgggcgctgccgctgacccagggccagctcgttctggtgtggtccgacgaacacgtgggatccaagtgcctctggacgtacgagatccagttctcgcaagacggtaaagcctacactccggtgtcgagaaaaccatccacttttaaccttttcgtgttttcccccgatactggagccgtgagcggatcctaccgcgtgcgggcccttgactactgggccaggcccggcccattctcggaccctgtcccgtacctggaggtgccggtgccccggggacccccctcgccgggaaacccg

SEQ ID NO: 13858 - DNA, 1959 bp, synthetic construct
  misc_feature 1..1959: note = source = /note="Description of Artificial Sequence: Synthetic coding sequence"
  source 1..1959: mol_type = other DNA
atgaggccgcttaggcccagggctgccctgcttgccctgctggcctcactcctggctgctcctcctgtggcacctgcagaggctccccacctggtgcatgtggatgctgccagagcactttggccactacggcgattttggagaagtaccggattctgcccccccctgccccatagccaggccgaccagtacgtcctaagctgggaccaacagttgaacctggcctatgtcggggctgtcccacacaggggcatcaaacaagttcgcacccactggctgctggaactggtcacgacacgaggaagcaccggacgcggactttcctacaacttcacgcatctcgacgggtatcttgaccttctgcgcgagaatcagctcctgcccggcttcgagctgatggggagtgcctccgggcattttaccgactttgaagataagcaacaagtttttgagtggaaggacttggtgtcttccctggcgagacggtacattggacggtatgggctagctcatgtgtccaaatggaacttcgagacctggaatgagcctgaccaccacgacttcgacaacgtgtccatgactatgcagggcttcttgaattactacgacgcctgtagtgagggacttagggccgcaagccctgcactccggctcggagggccgggcgactctttccacacccccccaagatctcccctgtcttggggtctactgaggcactgccacgacggcactaacttttttactggagaggctggagtgcgactagactatatctcacttcaccgtaagggcgctaggtcttctatctcaatcttggaacaggaaaaagtggtcgctcagcagattcggcagctgtttcctaaattcgccgacacccccatttacaatgatgaagctgatccactagtaggctggtctctcccccagccatggcgtgcggatgtcacctacgccgctatggtcgtgaaggttattgcccagcaccagaacctgctccttgcaaacactaccagtgcgtttccctatgccctgctgtcaaacgacaacgccttcctgagctatcatccccatccttttgcgcaaagaactttgactgctcggtttcaggttaataacacacgacctccgcatgttcagctgttgcggaagcctgtcctgacagcaatggggctgctagccttgctggacgaggaacagctttgggcagaggtgagccaggcaggaaccgtgctggacagtaaccatactgtaggggtgctggcaagcgcgcaccgtccacagggcccagctgacgcttggcgggctgcagtactaatctacgccagtgatgacacacgggcacatccaaatcggagcgtagccgtgacattaaggctgcggggggtgccacccggccccgggctcgtctatgtgactcggtatcttgacaacggcttgtgttcccccgacggggagtggcggagactcggccgaccagtgttcccaaccgccgagcagtttagaaggatgcgggcagctgaggacccagttgccgctgcacctagaccactcccagctggcggcagacttacgttgcggcctgctctcagactgccttctctattgctggtccacgtctgtgctcgacccgagaagccccccggccaagtgacccgcctccgggctttgcctttgactcaaggccagctcgtcttggtgtggagcgatgaacacgtgggttctaagtgtctttggacttacgaaatacagttttcccaggatggcaaggcctacacccccgttagtagaaaaccctccactttcaatctctttgtttttagccctgacacaggggccgttagcgggtcctatcgggtgcgcgcactcgattattgggcgaggcccgggcctttttcagatcccgtgccctatctcgaggtgccggtgcctcgcggaccaccaagtccaggcaaccct

SEQ ID NO: 13859 - DNA, 1959 bp, synthetic construct
  misc_feature 1..1959: note = source = /note="Description of Artificial Sequence: Synthetic coding sequence"
  source 1..1959: mol_type = other DNA
atgaggccgcttagaccgagagcagcactgctcgcactgcttgcatcactgcttgccgcacctccagtagcgcccgcagaggcccctcatctcgtacacgtggatgccgcacgcgccctgtggcccctgcggagattctggcgatcgaccggcttttgtcctcctcttccccattcgcaggcggaccaatacgtgctttcctgggatcaacagctcaacctggcttacgtgggagctgtgccccaccggggaatcaagcaagtgagaacgcattggcttcttgaattggtcactacccggggttcaaccggtagagggttgagctataacttcactcatcttgatggctacctggacctgcttagagaaaaccaactgctgcccgggtttgaacttatgggtagcgcatccggacattttaccgattttgaggacaagcaacaggtgttcgagtggaaagatctcgtgtctagcctggcaagaagatacattggtcgctacggtctggcccatgtgtccaagtggaactttgaaacctggaacgaacctgatcaccacgatttcgacaacgtcagcatgaccatgcaaggattcttgaactactacgatgcatgttccgaaggtctgagagccgcatccccagcccttagacttggaggcccaggtgattcctttcataccccacctcgaagcccgctttcctggggtttgttgagacactgccatgatggtaccaacttctttaccggagaggctggggtgcggcttgattacatctccctgcatagaaagggagctagatcctccatttcaattcttgaacaagaaaaggtggtcgcccaacaaattagacagctgtttccaaagtttgcggataccccaatttacaatgatgaggccgaccctctggtgggttggtcgctgccccagccctggcgggccgacgtgacctacgcagcaatggtcgtcaaggtcatcgcgcaacatcaaaatctgcttcttgcaaacactacttccgcattcccttacgcactgctctcaaatgacaatgcatttctttcgtatcatcctcatccatttgcccagcgcactctgaccgcgcggtttcaagtgaacaatacccgtcccccacatgtgcagctgctgcgtaagcctgtgcttaccgcgatgggacttctcgcacttctcgacgaagaacagctgtgggcggaagtctcgcaagcaggaaccgtcctcgattcgaaccataccgtgggcgtcctggccagcgcacaccgccctcaaggtcctgcggatgcctggagggcggcagtgctcatttacgcatcagacgatactcgggcacaccctaataggtccgtggccgtgactcttcggctgcgaggcgtccccccgggaccggggctggtgtacgtgacgcgttacctcgataacggactttgcagcccggacggtgaatggagacgattgggtagacccgtgtttccgactgctgagcagtttagaagaatgcgggcggcagaagatcctgtggcagcagcccctaggccgctgcctgcagggggcagacttacgctcagaccagcgcttagactgccatcgcttcttcttgtgcatgtctgtgcaaggcccgaaaagcccccgggccaagtgaccaggcttagggcacttcccctgacccaaggccaactggtgctcgtctggtcagacgaacacgttggatccaagtgtctgtggacttatgagattcagttttcacaggatgggaaagcatacacgcccgtgtcgaggaagcccagcactttcaacctttttgtgttctctccagacaccggcgcagtctcaggttcgtaccgggtgcgcgcacttgactattgggcgcgccccggaccgttttccgatcccgtgccatacctggaggtcccagtgcctcgcggcccaccgtctcctggtaatcct

SEQ ID NO: 13860 - DNA, 1959 bp, synthetic construct
  misc_feature 1..1959: note = source = /note="Description of Artificial Sequence: Synthetic coding sequence"
  source 1..1959: mol_type = other DNA
atgcggcctcttcgaccccgcgcagctcttctggctcttctggcgtctttgctagcagcccctcctgttgctccagctgaagccccccacctggttcacgtggacgctgcaagggcgctgtggcccctccgacggttctggcggagtaccggtttctgccccccactaccgcactcacaggctgaccagtacgttctttcctgggatcagcagttgaacctagcatatgtgggcgccgtgccacaccggggcatcaaacaggtgaggacacattggctgctcgagctggttaccacccgaggttccaccggaaggggcctctcctataatttcacacatctggacgggtacctcgacctcctacgagaaaaccagctcctacccggatttgagctcatgggaagcgcaagtggccatttcactgacttcgaggacaagcagcaggtgttcgaatggaaagaccttgtctcaagtctggcacggcgatacatcgggcgatatggcctcgctcatgttagcaaatggaacttcgaaacctggaacgagcctgaccaccacgatttcgataatgtcagcatgactatgcaggggttccttaattactatgacgcttgctccgaggggctgcgggcagcatctcctgccctgaggcttggcggtccaggagattcattccatacgccccctcgctctcccctgtcatggggtctgctgaggcactgtcacgacggaacaaatttcttcaccggcgaagctggcgtgcggttagattacatttccctccatcgcaaaggcgctcgcagcagtatctcaatacttgaacaggagaaagtagtcgctcagcagatcagacagctctttcctaagtttgctgacacacctatctataatgacgaagccgacccactggtgggatggtccctgccacaaccgtggagagcagatgtcacatatgccgctatggtggtcaaggttatcgcccagcatcagaacctgctcctagcaaacacaacctcagcctttccgtacgcactgctgtcaaatgataacgcatttctttcataccaccctcaccccttcgcacagaggaccctaaccgcccgatttcaggtgaacaatacaaggcctccacacgtgcaactgctgcgtaaacctgtactcactgcaatgggactgctggctctattggatgaggaacagctctgggctgaagtttcccaagccggaaccgtgctcgactccaatcatactgtaggcgtgttagcatcagcgcacagaccccagggaccagccgacgcctggagagctgcagttctcatttacgcatcagatgacaccagagcccaccctaataggtctgtggcagtaaccctaaggctacgcggagtgccaccgggccctggattggtgtacgtgactagatacctggataacggcctgtgcagccccgatggggagtggcggcgcttaggacggcctgtgtttccgaccgcagagcaattccggaggatgagagcagctgaggaccctgtcgcagccgcaccgcggcccttgccagccggcggaaggcttacgctgagacccgccttgcgtctcccttcgctgctgctggtgcacgtgtgcgccaggcccgagaagccgccgggacaggtcacacgtcttcgggctcttccgttgacgcagggacagttagtgttggtgtggagtgatgaacacgttgggtctaagtgtttgtggacttatgagatacagttcagtcaggacggaaaggcctatacccctgtttcaaggaagccgtcgacatttaacctgtttgtgttttctcccgatacgggtgctgtgtctggttcttaccgggtccgagctctggattattgggcgaggcccggtccgttcagcgaccccgttccttacctcgaggtccctgtcccgcgcggccctccgtcgccaggcaatcct

SEQ ID NO: 13861 - DNA, 1959 bp, synthetic construct
  misc_feature 1..1959: note = source = /note="Description of Artificial Sequence: Synthetic coding sequence"
  source 1..1959: mol_type = other DNA
atgcgccctctgcggcctagggcggcgcttctggcactgctggcatcactcctggcggcgcccccggtggctccggccgaagccccacatctcgtgcacgttgacgctgcccgggccctctggccgctccgcaggttctggagatctaccggcttctgcccgcccctgcctcattcccaagcggaccagtacgtgctgagctgggatcaacaattgaacctggcctacgtgggagcggtgccccatcggggcatcaagcaggtccggactcactggttgctggagctggtcactacccggggttcaacgggacgcggactgtcctacaactttacccacctcgatggctacctggatctgctgcgagaaaaccagttgctgccggggtttgaactgatgggatccgcttcgggacacttcaccgatttcgaggacaaacaacaagtattcgagtggaaggatctggtatcctccctcgcacgccgctacatcgggcggtatggacttgcgcacgtgtcaaagtggaatttcgagacttggaatgaaccagaccatcacgacttcgacaacgtgagcatgaccatgcaggggtttctgaactactacgatgcttgctcggaaggattgcgcgctgcctcgccggccctgagacttggtggacccggcgactccttccatactcccccgcgatcgccactgtcgtggggattgctgcgccactgtcatgacggcactaactttttcaccggggaagccggggtgcggctcgattacatctcactgcaccggaagggcgcgaggtctagcatctccatcctggagcaagaaaaggtggtggctcaacaaatccggcagcttttcccgaagtttgccgataccccgatctacaacgatgaggcggaccccctggtggggtggtcgttgccacagccttggcgcgccgacgtgacctacgccgcgatggtcgtcaaggtgatcgcccaacatcagaacctgctcctggcgaacaccacgtctgccttcccctacgccctgctgtcaaacgacaacgccttcttgtcataccatccacatccattcgcacaacgcaccctgactgcccggttccaagtgaataacacgcggccgcctcacgtgcagctcctgaggaaaccagtcttgaccgctatgggacttcttgcactcctggatgaagagcagctgtgggccgaggtgtcccaggccggaactgttctcgactcgaatcacactgtgggagtcctcgcatcagcccaccggccgcaggggcctgccgacgcgtggcgcgcggcggtgttgatctatgcttcagatgacacccgggcgcacccaaacaggtccgtggccgtcaccctgcgcctgagaggtgtgccgccaggcccaggtttggtgtacgtgacgagatacctggacaacggattgtgcagcccagacggcgagtggcgccgcttgggaaggccagtgttccctactgcggaacagtttcgccgaatgcgcgcggctgaagatcctgttgccgcggctccgcgcccgctcccggccggaggaaggctgactctgaggcctgcgcttcgactgccgtcgctgctgctcgtccatgtgtgcgcacgtccggaaaaaccgccgggccaagtgactagactgagagccctccccctcacgcaggggcaactggtgctcgtgtggtcggacgagcatgtgggatcaaaatgtctgtggacttacgagatccagttttcccaggatggtaaagcctacacccctgtcagcagaaagccctcgacctttaacttgttcgtgttcagccctgacacgggagccgtgtcgggatcataccgcgtgagggccttggattactgggctcggccgggacctttctccgacccggtgccgtacctcgaggtgcctgtgccgaggggccctccgtcgcccgggaatcca

SEQ ID NO: 13862 - DNA, 1959 bp, synthetic construct
  misc_feature 1..1959: note = source = /note="Description of Artificial Sequence: Synthetic coding sequence"
  source 1..1959: mol_type = other DNA
atgcggcctctccggcctagggcggccttgttggctctcctcgcttcgctgctggccgctccgcctgtcgccccggccgaagcaccgcatctcgtccatgtggacgccgctagggccttgtggccactgcggaggttttggcggtctactgggttttgtcctcctctgccccactcccaagccgatcagtacgtcctgtcgtgggatcagcaactgaacttggcgtatgtgggcgcggtgccacatagaggcatcaagcaggtgaggacccactggctgcttgagttggtgactacgagaggctccaccggaagagggctctcgtacaacttcacccatctcgatggatacttggatctcctccgggagaatcagcttctgccaggtttcgagctgatgggctccgcctcgggacactttactgatttcgaggacaagcagcaagttttcgaatggaaggatctggtatcatcactggcacgccggtacatcggtcgctacgggttggctcatgtttcaaagtggaattttgaaacctggaacgagccggaccatcacgatttcgacaatgtgtcgatgacgatgcaaggcttcctgaattactacgacgcatgcagcgaaggtctgcgggcggcctcgccagccttgcgccttggagggcctggagactcgttccacaccccacccagatcgccgctttcatggggattgctgcgccattgccacgacgggaccaactttttcactggcgaagctggggtcagacttgactacatttccctgcacagaaagggagcccgctcctcgatctccatcctggaacaagaaaaggtggtcgcccaacagattcgccagctcttccctaagttcgcagataccccaatctacaatgatgaagcggaccctctggtggggtggtcactcccacaaccgtggcgcgccgacgtgacctacgcagcgatggtggtgaaggtgatagcacaacaccagaatctgttgttggcgaacactacttctgcgtttccttacgccctcctttccaatgacaacgcgttcctgagctaccacccgcacccattcgcccaaaggacgctcacggcgcggtttcaggtgaacaacacgcgccctccacacgtgcagctcctgaggaaaccggtgctcaccgcaatgggattgctggcgctgctggatgaggagcagctgtgggccgaagtttcacaggcgggtaccgttctggactcgaaccatactgtgggagtgttggcctccgctcaccggccgcaaggccccgccgatgcatggcgcgcagctgtgctcatctatgcctcggacgatacccgcgcacacccgaatcggagcgttgcggtgaccctcaggctccggggagtccccccgggacccggcctggtatacgtcactcggtacctggacaacggactctgcagcccggacggcgagtggcggcggctgggacgcccagtgttccccactgctgaacagttcaggcggatgcgcgctgctgaggacccggtcgcggccgcacccaggccactgccggccgggggccgcctcactctcaggccggcactgcggctgcccagtttgctcttggtccatgtatgtgcacggcctgaaaagccacccggacaggtgacgagactgagagctctccctctgactcagggacagctggtgctggtgtggtcggacgaacatgtgggatcgaagtgcctgtggacctacgagatccaattctcgcaggacgggaaagcctacacccccgtctcgcggaagccatcaactttcaacctgttcgtctttagcccggacaccggagccgtgtccggttcctatagagtgagagcgctggattactgggcgcgcccgggaccgttctccgaccctgtgccataccttgaagtccccgtgcctcgcgggccaccgagcccggggaacccg

SEQ ID NO: 13863 - DNA, 1959 bp, synthetic construct
  misc_feature 1..1959: note = source = /note="Description of Artificial Sequence: Synthetic coding sequence"
  source 1..1959: mol_type = other DNA
atgaggccccttcggcctagagccgccctgctcgccctgctggcctccctcctggccgcgccaccagtcgcccctgcagaggcgccgcatctggtccatgtcgatgcggccagagcactgtggccgttgcgccgcttctggaggtcaactggattctgcccgcccctgccacacagccaggccgaccagtacgtgcttagctgggaccagcagttgaacctggcgtacgtgggggcggtgccgcacagagggatcaagcaagtgcgcacccactggttgcttgaactggtgactacccggggatccaccggaaggggactgtcctataacttcacgcacctggacggttacctggatctgctgagagagaatcagctgctgccggggtttgaactgatgggatcagcatcgggacattttacggatttcgaagataaacaacaagtattcgagtggaaggacctggtgagctccctggcccgtcggtacatcggccgatacggcctcgcgcacgtgtccaaatggaacttcgaaacctggaatgaacctgaccatcacgacttcgacaacgtcagcatgaccatgcagggcttcttgaattactacgatgcctgctcggagggtctgcgcgcggcatcgccggcattgcggctcggcggccctggagactcgttccatactccgccacggagcccacttagctggggactcctgagacactgccacgacggcaccaacttcttcactggagaagcgggcgtcagactggactatatctcactgcaccgcaagggcgctcggtcatccatctccattctggaacaagagaaagtcgtggcgcagcaaatcagacagttgtttcctaagttcgcggacacccccatctataacgacgaggctgatccgctggtcggctggtcgctgccgcagccgtggcgggctgacgtcacgtacgcggccatggtcgtgaaggtgatcgcgcagcaccagaatcttctgctggcgaacaccacgtcggctttcccttacgccctcctgtccaacgacaacgcattcctgtcgtaccatcctcaccctttcgcccagcgcaccttgactgctcggttccaagttaacaacacccgcccgccgcatgttcagttgctccgcaagcctgtgctcaccgccatggggcttctggctctccttgatgaagagcagctgtgggctgaggtgtcccaggccggaaccgtgctcgacagtaatcatactgtcggggtgctcgcgagcgctcatcgtccccaaggacccgccgacgcgtggcgggccgcagtgctgatctacgcgtcggatgacacccgcgctcacccgaaccggtccgtggcagttaccctgcgcctccgcggtgtgcccccgggaccaggactggtgtacgtcactaggtacctggacaacggactttgctcaccggacggcgagtggcggcgccttggtcgcccggtgttccccaccgcagaacagttccgcagaatgcgggcagcagaagatccggtcgcagccgctccgcgaccgctgccggctggaggaaggctgactctgcgcccggcactccgcttgccttccctgctgctcgtgcatgtgtgcgcgcggccggagaaacccccgggacaagtgaccagactgagagcactgccgcttacccaaggacagctcgtgttggtgtggtccgatgaacatgtgggaagcaagtgtttgtggacctacgaaatccagttttcacaagacgggaaggcatacaccccagtcagcagaaagccttcgacttttaacctgttcgtgttctcgcctgataccggcgctgtgtcaggatcctacagagtgcgggctctggattactgggccaggccgggcccattctcggatccggtgccatacctcgaagtgcccgtcccgcggggaccgccgtcaccgggtaatccg

SEQ ID NO: 13864 - DNA, 1959 bp, synthetic construct
  misc_feature 1..1959: note = source = /note="Description of Artificial Sequence: Synthetic coding sequence"
  source 1..1959: mol_type = other DNA
atgcgcccactgagacccagggctgcattgctggctctgctggccagcctcctggctgcaccacccgtggctcccgctgaggcaccacacttagttcacgtggatgcagccagggctctgtggccactgcgcaggttttggagatctacaggcttctgccctcctctgcctcattcccaggccgaccagtacgtcttatcttgggaccagcagctgaacctcgcttacgtgggcgctgtccctcaccgcgggatcaaacaagtgaggactcactggcttctggaacttgtgactacaagagggtccaccggacgtggtcttagctacaatttcactcatctcgacggatacctggacctactgcgagagaatcagctgctgccaggctttgaactgatgggcagcgctagcgggcacttcacagactttgaggacaaacagcaggtcttcgagtggaaagacctagtcagttccctggccagacgctacatcggccgctatggcttagcccatgtgagcaagtggaacttcgaaacttggaatgagcctgaccaccatgacttcgacaatgtgtcaatgacaatgcaaggattcctgaactattacgacgcctgcagcgaaggactgagagcagccagcccagcacttaggttaggggggcccggggattccttccatactccccctcgctcacctctcagctgggggctgctcaggcattgtcatgatggcaccaacttctttactggcgaggccggcgtgagactggactacatttctctgcataggaaaggggctcgcagcagcatctccattctcgagcaagaaaaggtggtggctcagcagatccgacagttatttccaaagttcgccgacacccctatctataatgatgaggcagatccattagtgggttggagcttgcctcagccctggcgagccgacgtgacctatgccgccatggtggttaaggttatcgcccagcaccagaatctactactagctaatactacctcagcttttccctacgctctgctctcaaacgacaacgcctttctaagttaccacccacacccttttgctcagagaacattgaccgcccgcttccaggtgaacaacactcgccctcctcacgtgcagttactacgcaagcctgtcctcaccgctatgggtctactggctctgctcgacgaggagcaactgtgggcagaagtgagccaggctggcacagtgctagacagcaaccacactgttggtgtgctcgctagcgcccatagaccacaggggcctgccgatgcctggagagctgccgtcctgatttatgcaagcgatgatacccgtgctcatcccaataggagtgtggccgtgaccctgcgactccgcggcgtgcctcctgggcccggactggtgtacgtgaccagatatctggataatggcctatgctctccagatggggagtggcgaagactgggcagaccagtgtttccaaccgccgaacagttccggcggatgcgcgcagccgaagacccagttgccgctgcccctagaccactgccagctggcggcagactaaccctgaggcctgctttaagactgccatccctgctcttagttcacgtgtgtgctcggcccgagaagcctccagggcaggttacccggctgagggcactacctctcacccaaggccagctcgttttagtatggagtgatgagcacgtgggttccaagtgcctatggacatatgaaattcagttctcccaagacgggaaggcctataccccggttagccgtaagccaagcactttcaacctgtttgtgttttctcctgatactggcgccgtatccggctcttacagagttcgggccctggactactgggcccgaccaggccccttcagcgaccctgtgccctatctggaggttccagtgcccaggggccctccttcccctggcaatcca

SEQ ID NO: 13865 - DNA, 1959 bp, synthetic construct
  misc_feature 1..1959: note = source = /note="Description of Artificial Sequence: Synthetic coding sequence"
  source 1..1959: mol_type = other DNA
atgagaccgctgcgcccacgagctgccctcctggctcttttggccagtctgctggcagcaccccctgtggcccccgccgaggccccccacttggtacacgttgacgcagcccgagcgctctggccacttagaaggttttggcgtagtaccggcttctgtcctcctctgccccatagccaggccgatcagtacgtactgagctgggaccagcagttgaatctggcctatgtgggcgctgttcctcacagggggatcaaacaggtgaggacccattggcttcttgaacttgtgacaactcgaggctctaccggaaggggcctgtcctacaatttcacacatctcgacggctatctggatctcctacgagaaaaccaactcttgcctgggttcgagctgatgggttcagccagcggacactttactgactttgaggacaagcagcaagtgttcgaatggaaagatctagtgtccagccttgcgcggcgttacattgggagatacggcttggcacacgtgtctaagtggaattttgaaacgtggaatgagcctgaccaccacgacttcgataatgtgtctatgaccatgcaagggttccttaactattatgacgcctgttccgagggcctcagggctgccagcccagcactgaggctaggcggaccaggggactctttccatacccctccaagatctccactgtcctgggggcttctgcggcactgtcacgacggaacaaacttctttactggtgaagccggagtgcgactcgattacattagcctacacaggaagggcgcccgaagctccatcagtatcctagagcaggagaaggtcgtcgcacaacagataaggcagctcttccccaaattcgccgacaccccaatatataatgacgaagcggatcctctggtgggatggtcccttcctcaaccctggagggcagatgtaacttatgccgccatggtggtcaaggtgatcgcccaacaccagaatctgcttctggcaaacaccactagtgcctttccatatgctttgctttcaaacgataatgcattcctgtcgtatcatccccaccctttcgcacagcgtacactgactgccagattccaggtgaacaatacccgacctccacacgtgcagctgctcagaaaaccagtcttgactgccatgggccttttagccctgttggacgaggagcagctctgggcagaggtctctcaggctggaaccgtactcgactctaaccacactgtgggagtacttgcgtccgctcacagaccccagggccctgcggacgcatggcgggctgcagtgctaatatacgccagtgacgatacaagagcacatccgaaccggtcagttgcggtgaccttgcggttgagaggcgtacccccaggaccgggattggtttacgtcacccggtacctggataatgggttgtgttcacctgatggggaatggcggcgcctggggcgtcccgtgttcccgactgctgagcagtttcggcgcatgagggccgctgaggacccagtggctgccgcaccccgtccgcttcccgcggggggaaggctgaccctcaggcctgcccttaggcttccctcactcttactcgtgcacgtgtgtgcgcgccctgagaagcctcctggccaagtgacacgtctgcgagcattgcccctcactcaagggcagttggttctcgtctggtcagatgaacatgtgggttcgaaatgtctgtggacctatgaaatacagttctctcaggacggcaaggcatacactcctgtcagtcggaagccctccactttcaatctcttcgtattctcccccgatacgggagcagtgagcggctcatacagggtgcgtgcactggattactgggcccgtccggggccattttctgatcctgtcccatacttggaagtgccggttccccggggccccccttctccagggaacccc

SEQ ID NO: 13866 - DNA, 1959 bp, synthetic construct
  misc_feature 1..1959: note = source = /note="Description of Artificial Sequence: Synthetic coding sequence"
  source 1..1959: mol_type = other DNA
atgagacctctgcgtcctagggccgctcttctggcactactggcctcactgctggccgctccgccagtcgcgccagctgaggccccgcatctcgtgcacgtggacgccgccagagcactgtggccacttaggcgattttggcggtccaccggattctgccctccactcccccactctcaggctgatcaatacgtactgtcgtgggaccagcagttaaatctcgcatatgtcggagctgtgcctcatagggggattaagcaggtgcgaacccattggctgctcgaactggtcactacccgtggctccactgggagaggtctgagctacaatttcactcacttggatgggtatctggaccttttacgagagaaccaactgctgcctggatttgagcttatgggctcagcctcaggccatttcacggactttgaggacaaacagcaggtgtttgagtggaaagatctggtgtctagcctggctcgacgatacatagggcgatacggcctggcccacgtcagcaagtggaactttgagacatggaatgagccagatcaccatgattttgataatgttagcatgactatgcaaggattcctgaactattacgacgcctgctcagaggggctgcgggccgccagccctgctctgagactgggagggccaggtgattccttccacaccccaccacgttctcctctctcttggggcctgctgagacattgccacgacggcacaaatttctttactggcgaggctggggtgagacttgactacatttcccttcataggaagggcgcccgaagtagcatcagcatccttgagcaagaaaaggttgtggcacagcaaattcgacagctattcccgaaatttgccgatacacctatatataatgatgaggcagatccactggttggatggtctctacctcagccatggagggctgacgtgacatatgcggccatggtggtgaaggtgatcgcacagcatcaaaaccttttgttggctaatacgacgtctgccttcccatacgcactgcttagtaacgacaatgccttcctatcgtatcacccccacccattcgcccagaggactctaaccgcacgatttcaggttaacaatacgcgcccgccccatgtgcaactgctccgaaagcctgttttgacagccatgggattactggcgctgctagatgaagaacagctgtgggcggaggtgtcacaggctggaaccgtgctggactccaatcataccgtgggtgtattggcctcagcacataggccacaaggccccgcagacgcatggagagctgccgtgctgatttatgcatcagatgatacccgagcacaccctaacagatccgtggctgttacgctgcgccttagaggagtgccccccggcccaggactagtctatgtaactagatatctagacaatgggttgtgtagtcccgacggcgagtggagacgtctgggacgtcctgtgttccctacagcagagcagttcaggagaatgcgtgcggctgaagatcccgtggcggccgctcctagacccctgccagcaggcggccgactgactctgcgaccagccttgaggttgccgtctctccttctggtacacgtgtgcgctaggccagagaagccccctggacaggttactagattgagggccctgcctctgacacagggccagctggtgctggtgtggtcggacgagcacgttggctcaaagtgcctgtggacctatgaaatccagttctcacaggacggcaaagcctacactcccgtgtcaagaaagccatccacatttaatttattcgttttttcacccgacactggggccgtctccggatcctacagagtgcgagctctcgactactgggcacgacctggtcctttctcagatccagtaccctacctggaggtccctgtacctcgtgggccaccctcccccgggaatccc

SEQ ID NO: 13867 - DNA, 1959 bp, synthetic construct
  misc_feature 1..1959: note = source = /note="Description of Artificial Sequence: Synthetic coding sequence"
  source 1..1959: mol_type = other DNA
atgcgacctttgcgccctcgggcagccctccttgctctgctcgcgtcgctgctggcggccccaccagtcgcgccggccgaggcaccacacctggtgcatgtggacgccgcccgggccctgtggccactccgcagattttggagaagcactggattctgcccacctctcccgcactcccaggccgaccagtacgtgttgtcctgggaccaacagctgaatctcgcctacgtgggtgcagtcccccaccgcggtatcaagcaggtgcggacccattggttgctcgagctcgtgaccaccaggggcagcactggccgcggactgtcctacaatttcactcacctcgatggttacctggacctccttcgcgaaaatcaactgctgccgggcttcgagctgatgggatctgcatcaggacacttcactgatttcgaggataagcaacaagttttcgaatggaaggacctcgtctcgtccctcgcaagaagatacatcggccggtacggactggcgcacgtctccaagtggaacttcgaaacctggaacgaaccggatcaccatgatttcgataacgtttcaatgactatgcaaggatttctgaactattacgatgcctgtagcgagggcttgagagccgcatcccccgcgctgaggcttggaggaccaggagactcgttccatacccctcctcgctcgccactctcgtggggactgctgcggcactgtcatgacggcaccaatttctttacgggggaagccggtgtgaggctcgactacatcagcctgcaccggaagggggcgcgttcctccatcagcattctcgaacaagaaaaagtggtggcccagcaaattcgccagctgttcccgaagttcgcggacacccctatctataatgacgaggccgatccgttggtcggatggtcgctcccgcagccgtggcgcgctgacgtcacttacgccgcgatggtggttaaggtgatcgctcagcaccagaacttgctgttggctaataccacctccgccttcccatacgcgctcctgtcaaacgataacgcattcctgtcctaccacccgcacccattcgcgcagagaaccctcaccgcgagattccaggtcaacaacacccggcccccgcatgtacagctgctgcgcaagcctgtgctgactgctatgggtcttttggccctgctggacgaagaacagctgtgggccgaggtgagccaggcaggaacggtgctggactcaaaccacactgtgggagtcctcgcttcagcgcatcggccgcaaggaccggccgacgcctggcgggcagccgtgctgatctacgcttcagacgatactagagcgcatcccaaccggtcggtcgccgtgactctgcggctcaggggcgtgcccccgggaccggggctggtctacgtgacccgctacctggacaacggtctttgctcgcccgacggggagtggcgaaggttgggacgccctgtctttccaactgcagaacaattccgccgtatgcgcgctgctgaagatccggtcgcagccgcgccgcggccactgcctgctggagggcgcctgactctgaggccggcgctgcgcctgccttcactgcttctcgtgcatgtgtgcgctcggccggaaaaaccgccaggccaggtgacccggcttcgcgccctgccactgacccagggccagctggtgctggtgtggagcgatgagcacgtggggagcaaatgcctttggacgtacgaaatccaattttcgcaggacggaaaggcatacacgcccgtgagccgcaaaccatccacttttaacctcttcgtgttctctcctgacaccggagcagtgagtggatcatacagggtcagagccctcgactactgggccagacctggaccgttttcggatccggtgccgtatctcgaggtgcccgtcccgcggggcccgccgtcgccgggcaatcca

SEQ ID NO: 13868 - DNA, 1959 bp, synthetic construct
  misc_feature 1..1959: note = source = /note="Description of Artificial Sequence: Synthetic coding sequence"
  source 1..1959: mol_type = other DNA
atgcggcccctgagaccccgagccgcactgttagccctgttagctagccttttagcagctcccccagtcgctcctgctgaggctccacatctggtgcatgtggatgctgcacgggcactgtggcctttgcggaggttctggcgtagtaccggcttttgcccccccctgccccactcacaagcagatcaatacgtgcttagttgggaccagcagctgaacttagcatacgtcggggctgtgccacaccggggaataaagcaggtcaggacccattggcttctggagttggtgaccacacgcgggagcacaggacgtggcctctcttacaattttacacatttagatggctacttagacctgttgagagaaaaccaattgcttcccgggttcgagctgatgggctccgcaagcggacacttcacagattttgaggataaacagcaagtgttcgagtggaaagacctggtctcatctttggctcggcgatacatcggtagatatggccttgcacacgtcagcaaatggaacttcgagacctggaacgagcccgatcatcacgacttcgataacgtcagcatgacaatgcagggttttctgaattactacgacgcttgttctgaaggtcttagagctgcttctcctgcattgcggcttggcggcccgggggacagcttccacacaccaccaaggagcccacttagctggggtctgttgagacactgccatgatgggacgaactttttcactggcgaggccggcgtcagactggattacatctcactgcacagaaagggcgcacgctcatccatttcgattctggaacaggaaaaagtggtggcccagcaaattaggcagcttttccccaaattcgctgacacaccaatatataacgacgaggctgacccactggtgggatggagcctgccacaaccctggagggcagatgtgacgtacgctgctatggtcgtaaaagtcatcgcacagcatcagaatttgctccttgctaacactacatccgcctttccttacgcactcctgagcaacgataacgcattcctctcttaccaccctcacccttttgctcagagaacactgactgcgcgctttcaggtgaacaatacaagacctccacacgtccaacttttgaggaagccagtgctgactgccatgggactgcttgctttgttagacgaagagcagttgtgggctgaggtctcacaggctggtaccgttctcgacagcaaccacactgtgggcgtgctggcatccgctcatcgccctcaggggccagcggacgcctggcgcgctgcagtgctcatttatgccagcgacgatacaagggcgcaccccaaccggagcgtggctgtgacccttagactgaggggcgtacctcctggccccgggctcgtttacgtcacccgatatcttgacaatggcttgtgcagtcctgatggcgagtggagacgactggggagacctgtgtttcctacagcagaacaatttaggaggatgcgtgccgccgaggacccggtggcggcggcgccccgccctctgcctgccggaggccgcctcacactcagaccagcgctgcggctgccgtcgttgttgctggtgcatgtctgcgctcgccccgagaaaccaccaggacaggtcactcgacttcgcgctctccctctgactcaaggacaactggtgctggtctggtcagacgagcatgttggatcaaagtgtctttggacctacgagatccaatttagccaggatggcaaagcatacacacccgtatcaagaaagccctctacattcaacctgtttgtattttcacctgatactggagccgttagtggatcctaccgcgtaagggcattggactattgggctagacccggacctttttcagaccccgtcccgtacctcgaggtgcctgttcctcgtggtcctccaagccccggcaaccca

SEQ ID NO: 13869 - DNA, 1959 bp, synthetic construct
  misc_feature 1..1959: note = source = /note="Description of Artificial Sequence: Synthetic coding sequence"
  source 1..1959: mol_type = other DNA
atgcgtcccctccggccgagagcggccctgctggcccttctcgcgtcgctcctggccgctccaccggtcgcgccggccgaggcgcctcatctggtccacgtcgacgccgcgcgcgcactgtggccgctgcggcgcttttggcggtcaactggtttttgcccgccgctgccgcactcccaggccgaccagtacgtgctttcctgggaccagcagttgaatttggcttacgtgggagctgtgccgcataggggaatcaagcaggtccggacccactggctgcttgagctggtcactaccagaggctcaaccgggcgcggcctctcgtacaacttcacgcacctcgatggatacctcgacctcctgagggaaaaccagttgctgccaggattcgaactgatgggatcagcgtccggacacttcactgatttcgaggacaagcaacaagtgtttgagtggaaggacctcgtctcaagcctggctcgccggtacatcggccgctacggactggctcatgtgagcaaatggaatttcgaaacctggaatgaacccgaccatcatgacttcgacaacgtgtcgatgactatgcagggcttcctgaattactacgacgcttgctcagaaggattgcgtgcagcctctccggctctgcgcctgggtggaccgggagattcgttccacacccctccccgctcccctctgtcttggggactgctgcgccattgccatgatggaaccaatttcttcaccggcgaggcaggagtgcgcctggattacatctccctccacagaaaaggagcacggtcctccatctcgatcttggagcaggaaaaggtcgtggcacagcagatcaggcaactgttccctaagttcgcggatacccctatatacaacgacgaggccgaccccctcgtggggtggagcctgccgcagccgtggcgggctgacgtgacctacgccgcaatggttgtcaaagtgattgcgcagcaccagaacctgctcctcgcgaacaccacgtccgcattcccatacgctcttctctcgaatgacaacgcgttcctgtcctatcatccccacccgttcgctcaacgcactctgactgcccggtttcaggtcaacaacactcgaccgccccacgttcagctgctccgcaagcctgtgctgaccgctatgggactcctcgcactgttggatgaagaacaactgtgggccgaggtgagccaagcgggcaccgtgctcgactcgaatcacaccgtgggagtgctggcctcggcccatagaccacagggcccggccgatgcttggcgcgccgcggtgctcatatacgcctctgatgatactagggctcaccctaacagatccgtggccgtcactctgcgcctgcggggagtcccgccagggcccgggcttgtctacgtaacccgctatctcgacaacggcctgtgtagcccggacggggagtggcgccggctcggacggccggtctttcctactgccgaacagttccgtaggatgagggcagcagaagatccagtggccgcagcgccgcgcccattgcctgcgggaggccggctcactcttcggcctgccctgcgtctgccatccctgttgctggttcacgtctgtgcccgacctgaaaagccacctggtcaagtgaccagactcagggccctgccactcactcaaggtcaacttgtacttgtgtggtcggatgagcacgtgggatcaaagtgcttgtggacttacgaaatccaattctctcaagacggtaaagcctatacgccggtgtcccgcaagccatccaccttcaacctcttcgtgttttcacccgacacgggggccgtgtcaggaagctacagagtgagggcgttggattactgggcaagaccaggtccattttcagacccagtgccgtacctggaagtgccggtcccgcgggggcctccgtctccaggtaacccg

SEQ ID NO: 13870 - DNA, 1959 bp, synthetic construct
  misc_feature 1..1959: note = source = /note="Description of Artificial Sequence: Synthetic coding sequence"
  source 1..1959: mol_type = other DNA
atgcggccgctccgtcctcgggctgctctgctggcacttcttgcctcattgcttgccgcaccgccggtggcgccagctgaggcaccacatttggtgcacgtggatgcagcacgagccctgtggccactccggcggttttggcgctcgaccggattctgtcctccacttccccattcgcaagccgaccaatacgtcttgtcctgggatcagcagctgaacctggcctacgtgggagccgtgccacacaggggcatcaagcaagtgcgcactcattggcttcttgagctggtgactactcgggggtccacgggacgcgggctgtcctacaactttacccacctggacgggtatctggatctgctgagagaaaatcaactgctgcctggatttgagctgatgggatcagctagcggacacttcactgactttgaagataaacagcaagttttcgaatggaaggatctcgtctcctcactcgcccggcgttacattggaagatacgggcttgcacatgtgtccaaatggaattttgaaacttggaacgaaccggaccatcacgactttgataatgtgagcatgaccatgcagggcttcctgaattactatgatgcctgctcagaaggcctgcgcgccgcatcacctgcacttaggcttggcggtccgggagacagctttcataccccacctagatcccctctcagctggggccttcttaggcattgtcacgacggaaccaacttcttcactggagaagcaggtgtgcgtcttgattacatttcgcttcatcgcaagggcgcaagatcctcaatttctatactggagcaggagaaggtggttgcacagcaaatccggcaacttttcccaaaattcgcggacactccaatctacaacgacgaggcagatcctctcgtcggttggtcgctgccccagccttggcgtgccgacgtcacctacgcggcgatggtggtcaaagtgatagcacaacaccagaatcttctgctggcaaacaccactagcgctttcccatacgccctcctgtccaacgataatgcattcctgtcttaccatcctcatccttttgcacagagaaccctgactgcaagatttcaagtgaacaacacccgcccacctcacgtgcagcttctgagaaagcccgttctgaccgcaatgggcctccttgcgctccttgacgaagaacagctctgggcagaagtttcacaagcagggaccgtccttgattcgaaccatactgtgggcgtcctcgcatcggcgcatagacctcagggtcccgccgatgcctggcgagccgcagtgctgatttacgcatcggatgacacgcgcgcccatccgaatcgctcggtggccgtgactcttcggctcaggggagtcccacctggaccaggactggtgtacgtcaccagataccttgacaacggcctttgcagccctgatggggaatggagacgcttggggcgacctgtgtttcccaccgccgaacagtttcgtcgtatgcgtgctgcagaggatccggtcgcagctgcacccagaccgctgccagctggaggacgactgaccctcagaccggcgcttagattgccttcgctgttgctggtgcatgtctgtgcaagaccagaaaagccaccaggtcaagtcacccggcttagggctcttcctcttacccaaggacaactggttctggtctggtccgatgaacatgtcggctccaagtgtctgtggacttatgagatccagttttcacaagatggaaaggcatacacgcctgtctcgaggaagccgtcgacttttaacctgtttgttttttcgcctgatactggggcggtgtcaggatcgtaccgcgtgcgcgctctggattactgggcaagaccaggtccgtttagcgatccagtgccctatctggaggtgccggtgcccaggggtccgccttctcctggtaatcct

SEQ ID NO: 13871 - DNA, 1959 bp, synthetic construct
  misc_feature 1..1959: note = source = /note="Description of Artificial Sequence: Synthetic coding sequence"
  source 1..1959: mol_type = other DNA
atgcggccactcagaccacgggctgctctcttggcccttctcgcctcgctgttggccgccccaccggtggcacctgcggaagcaccgcatctcgtacacgtggacgccgctcgagccctctggccacttcgaaggttctggcgctcgactggattctgcccgccactgccgcacagccaagccgatcagtacgtgctgagctgggatcaacagctgaatctggcttacgttggtgccgtgccccaccgtggaatcaagcaggtgcgcacgcactggctcctggagctcgtgaccactcgcggatcaactggtcgaggactgtcgtacaactttacccatttggacggctacctcgatctgttgagagaaaatcaacttctcccgggttttgagcttatgggctccgcgagcggacatttcacggatttcgaggacaaacagcaagtgtttgaatggaaagatctcgtcagctctctcgccagaaggtatatcgggaggtacggactcgcgcacgtgtctaaatggaacttcgaaacttggaacgaacctgatcaccacgactttgacaatgtgtcgatgaccatgcaaggattcctcaactactatgatgcctgcagcgaagggctgagagccgcgtcaccggctctcagactggggggtcctggtgactcgtttcacactcctccgaggagcccactgtcgtggggcctgctccggcattgtcacgatggtaccaatttcttcaccggtgaggcaggagtccgccttgactacatctcattgcaccgaaagggtgcacgttcctctatcagcatcctcgagcaggagaaggtcgtggcgcagcagatcagacaactgttcccgaagttcgccgacactcctatctacaatgacgaagccgaccctttggtggggtggtcgttgccgcagccatggcgcgctgacgtcacttacgcagcgatggtggtgaaggtgatcgcgcaacaccagaatctgcttctcgccaacactaccagcgcctttccatacgcccttctgagcaacgataacgctttcttgtcttaccacccgcatcctttcgcgcaaagaactctgactgcccggttccaggtgaacaacacccggccgccgcatgtgcagctcctgcggaagcctgtgctgaccgcaatgggactgctggcccttctggacgaagagcaactttgggcggaagtctcacaggctggaactgttctcgatagcaaccacacggtgggggttctggcatccgcacatcggcctcagggtccggctgacgcgtggcgcgccgctgtgctgatttacgcctcggatgacacccgggcacaccctaaccggtcagtggcagtcaccctgcggctgcgaggagtccctccgggcccaggactggtttacgtgacccggtacttggacaatggcctttgctcaccagacggtgaatggcggaggcttggtaggccagtgttcccaaccgccgagcaattccggcgcatgcgcgccgcagaggaccctgtggccgcggccccgcgcccgctgccggcgggaggaaggctgaccctcagacctgcactgagactcccgtcactgctgctggtgcatgtgtgcgcccgccccgagaagccgccaggacaggtcactcgccttagggctctgcccctgacccaaggccagctggtcctcgtgtggagcgatgagcatgtgggctccaaatgtctctggacttatgaaattcagttctcgcaggatgggaaggcgtacactccggtgtcccggaagcctagcacgttcaacctctttgtgttttcccccgacaccggtgcggtgtcagggtcgtaccgggtacgggccctcgactactgggcgcgcccgggaccattctcggatccggtgccttatctggaagtgcccgtgccgcgcggcccgccgtccccaggtaatccc

SEQ ID NO: 13872 - DNA, 1959 bp, synthetic construct
  misc_feature 1..1959: note = source = /note="Description of Artificial Sequence: Synthetic coding sequence"
  source 1..1959: mol_type = other DNA
atgcgaccgcttcgcccaagggctgcccttcttgccctcctagctagtttgctcgcggccccaccagttgctccagcagaagcaccacatttggttcatgtcgatgctgcccgtgcgttgtggcctcttagaagattctggcgttcaaccggattctgcccaccacttccgcacagtcaggctgatcaatacgtgctcagctgggaccaacagcttaatcttgcatacgtgggagcagttccacatcgtggaattaagcaagttcgaacccattggcttctggaactggtcaccactagaggttccacaggtcgaggattatcttataactttactcacttagatggatacttggatttattgcgagagaatcaactcctgccaggattcgagctgatggggtcagctagcggacattttaccgactttgaggacaagcaacaagttttcgagtggaaggatctcgtctccagtctagcccgtagatatatcggtaggtatggacttgcgcacgttagcaaatggaattttgaaacctggaacgagccagatcatcatgatttcgataacgtttccatgacaatgcagggtttcttgaattattatgacgcgtgctcggaaggactgcgagcggcctccccagccctcagactcggcgggccaggggattccttccacactccgccacggtcaccgctctcatgggggctgcttcgtcattgccacgatggaacgaacttcttcacaggggaggcgggagtaaggctcgattacatctcactccatcgtaagggagctcgctcaagtatttcgatactggagcaagaaaaggttgtagcacaacaaattcgacaacttttcccaaaattcgccgatactccaatatataatgatgaagctgacccattggtcggctggagtttgccacaaccctggcgtgcagatgtaacatatgccgctatggttgtaaaggtaattgcacaacaccaaaatttgttactagctaatacgacgtctgccttcccatatgcacttctttcgaatgacaacgcttttctgtcgtatcacccgcatccatttgctcaacgtacactcaccgccagattccaagtaaacaacacccgccccccacacgtccagctactacggaaacctgtactcacagctatgggactacttgctcttcttgatgaagaacagctttgggccgaggtctcacaagcgggaacagtcttggattcgaaccacactgttggtgttttagcctccgctcatagaccacaagggccggcagacgcatggagagcggctgttctcatttacgcaagcgacgataccagagcgcatccgaatcgttcagtcgctgtaacactgcgtttgcgaggagtacctccgggtcccggacttgtttacgtcacacgatacttggataatggtctgtgcagtccggacggagagtggcggcgactgggaagaccagtcttcccaaccgctgaacaatttcgtcggatgcgagctgccgaagacccggtcgcggccgcacctagaccccttcctgctggcggacgacttaccctacgacctgctttgcgactgccatctcttttacttgtccacgtatgtgctcgtccggaaaaaccaccgggccaagtaactagactgcgcgcattaccactaacacagggacaattggttctcgtgtggtcggatgaacacgttggatctaaatgtctgtggacgtacgaaatccagttctcacaagacggaaaagcatacacaccagtttcgcgaaagcccagcactttcaatctcttcgtttttagtccagataccggagcagtctcaggaagctatcgcgttagggcccttgattattgggcgaggccaggaccattctccgatccagttccttatttggaggtcccagttcctcgaggaccgccaagtcctgggaatcct

SEQ ID NO: 13873 - DNA, 1959 bp, synthetic construct
  misc_feature 1..1959: note = source = /note="Description of Artificial Sequence: Synthetic coding sequence"
  source 1..1959: mol_type = other DNA
atgaggccactcaggccaagagcagcgcttctcgccctgctggcatccttattggctgctcctcccgtggcccccgccgaggcgccccatcttgtgcatgtggacgcggcccgcgcactgtggcccctgaggcgcttctggagatctaccggcttctgccctcccctgccccactcgcaagctgaccagtatgtgctcagttgggaccagcaactgaacttggcatacgtgggagccgtccctcacaggggcataaagcaggtaagaacacactggctgttagagctggtgaccacacggggaagcaccggtcgtgggttaagctacaattttacgcacctcgatggctacttggatttgctgagggaaaatcagctcctgccaggctttgagctgatgggcagcgcctctggacacttcaccgacttcgaggataagcagcaggtctttgagtggaaagatttggtgtcaagccttgcacgccgctatattgggcggtacgggttagcacatgtgtcaaaatggaactttgagacctggaacgagccggatcatcacgacttcgataatgtgtccatgacaatgcagggatttctgaattactacgatgcatgcagtgaaggactgcgagccgccagcccggctctcaggttgggcggcccaggcgactccttccacacacctccaagaagccctctgagctggggcctgctgcggcactgccacgacggcacaaacttctttaccggagaggccggcgttaggttagattacatatcacttcacaggaaaggcgctcggtcatcaattagcatcctggagcaggaaaaagtcgtcgcccagcagattagacagctgtttcctaagttcgctgatacacccatctataatgatgaggcagatccactcgtcggatggtcactcccacagccctggagagccgacgtgacgtatgcagcgatggtggttaaagttattgcacaacaccagaacctcctgttggcaaacactacctccgcatttccatatgctttgctgtccaacgataacgcatttctgagctaccatccccatccatttgctcagagaacactcactgccagatttcaggtgaacaatacccgacctccacacgtacaacttctcagaaagccagtcctcacagccatggggctgctcgcgctgttagatgaggagcagttatgggcagaggtgtctcaggcagggactgtccttgattctaaccacacagtaggtgtcctggcctctgcacacagacctcagggccctgccgacgcgtggagagctgccgtgctaatttacgcttctgacgatacccgtgcgcatccgaatcgtagcgtcgccgtgaccctccggctcagaggggtgccccccggccctggcctggtgtatgtgactcgatatctggacaacggactgtgcagcccggatggtgaatggcggaggttgggcaggccagtgtttcctacagccgagcaatttcggcgaatgagagctgccgaagaccccgtagccgccgcgccaaggccgctgccagcaggaggcagactcacactgcgacctgcgctacgattaccctctctcctcctcgtacacgtgtgcgcacgcccggagaagcctcccggacaggtgaccagattgcgtgcactccctctgacacagggacagctggtactcgtctggtccgatgagcacgtgggctccaaatgtttgtggacctacgaaatccagtttagccaagacggtaaagcctacacacccgtgtccagaaagccctctacctttaatctgtttgtctttagtccagacacaggcgccgtgtcgggttcatatagagttcgcgccctggactactgggcccgaccagggcctttctctgaccctgtgccctatctggaggtccccgtccctcggggccccccgagcccgggcaatccc

SEQ ID NO: 13874 - DNA, 1959 bp, synthetic construct
  misc_feature 1..1959: note = source = /note="Description of Artificial Sequence: Synthetic coding sequence"
  source 1..1959: mol_type = other DNA
atgcgcccgctccggccaagagcagcccttctcgcattgcttgcatcgcttctggccgcaccaccggtggctcctgcagaggcacctcatctggtccatgtggatgcggcaagggccctgtggcctctgcgccgattctggagatccactggcttctgtccccctctgcctcatagccaggcggaccagtacgtgctttcgtgggatcaacagcttaacctggcctacgtcggggctgtgccgcaccggggcattaagcaggtgagaacccattggctgcttgaactggtgacgacgcgcggctccactggaagaggcctgtcgtacaactttacgcatcttgacggctacctggacctgctgcgggaaaaccagctgctgcccgggtttgaactgatgggcagcgcatccggacactttactgactttgaggacaaacaacaagtgtttgaatggaaagacctggtgtcctccctcgctcgacgatacatcggcagatacggactggctcatgtgtcgaaatggaactttgagacttggaatgaaccggaccaccatgactttgataatgtatcgatgaccatgcaggggtttctgaactactacgacgcctgctcagaaggtcttagagcagcaagccctgcactcaggctgggaggtcctggtgattcattccacactccgcctagatctcctctgagctgggggctgctccgacactgccatgacggaaccaactttttcaccggcgaagcaggggtcagacttgattacattagcctgcaccggaagggtgctcgcagctcaatttcgatcctcgagcaggagaaggtcgttgcacaacagatccgtcagctcttccctaagttcgcggatacgcctatttacaacgacgaagccgatccgcttgttggatggtcactcccccaaccctggcgcgccgacgtgacttacgcagccatggtggtgaaggtaattgcacaacaccagaatctgctgctcgccaataccacctcagcatttccttacgccctcctgtcgaacgataatgcattcctgtcctaccatccccacccttttgcacaacgaaccttgactgcccggttccaggtcaacaacaccagaccaccgcacgtgcaacttcttcggaagcccgtcctcactgcaatgggtttgctggcccttcttgatgaagaacagctgtgggcagaggtgtcccaagccgggacggtgcttgacagcaaccacaccgtgggtgtcctcgcatcagcacaccgcccccagggtccagctgatgcctggagggcagccgtgctcatttatgcctcagatgacactagggcacatcctaataggtcggtcgccgtcactctgaggctcaggggtgtgcctcctggtcctggactcgtgtacgtgacgcgctacttggacaacggactttgtagccccgatggcgaatggagaaggcttggacgcccagtgtttcctaccgccgagcaatttcgacgcatgagggcggccgaagatccagtcgcagcggcacctcgaccactccccgcggggggcagactgactctgcgtccagcccttaggcttccttcgcttttgttggtgcatgtctgtgcgaggcccgagaagcctcccggccaagtgacccgacttcgtgccctgcctctcacccagggtcagctcgtcctggtgtggtccgatgaacatgtgggatccaaatgtctctggacctacgagattcagttctcccaagatgggaaggcttacactccggtgtcgagaaagccctccacctttaatctcttcgtgttctcaccagatacgggtgcagtctcgggttcgtacagagtcagggcgctggattactgggcccgtcctggaccattttcagacccagtgccgtacttggaggtgccggtgcctcggggtcctccctcacctggaaaccct

SEQ ID NO: 13875 - DNA, 1959 bp, synthetic construct
  misc_feature 1..1959: note = source = /note="Description of Artificial Sequence: Synthetic coding sequence"
  source 1..1959: mol_type = other DNA
atgcgtccactgagaccgagagccgcactgttagcacttcttgcctctttactggccgcgcctccagtagctcccgccgaggccccccacctagtccatgtagacgccgcccgcgcactgtggcctttgaggcgcttctggagatctaccggtttctgtccgccgcttcctcatagccaagcagaccagtacgtgctgtcctgggatcaacagttgaacctcgcttatgttggcgcggtcccccataggggaatcaaacaggtgcgaactcactggctgctggagctggtaactacgagggggtcgactgggagaggcctgtcctacaatttcacccacctggatggatatctcgacctgttgcgcgagaaccagttgctgcccgggttcgaacttatgggatccgcatcgggtcactttacggacttcgaagataagcaacaggtctttgaatggaaagacctggtgtccagcctcgcccgcagatacatcgggcggtatggactcgcacacgttagcaaatggaatttcgagacttggaatgagcccgaccatcacgacttcgacaatgtgtctatgaccatgcaggggtttctgaattactatgatgcttgctctgagggtctgagagcggcctcccccgcgctgcgtttgggcggccccggagattcattccacactcctcctaggtcacccctgtcttgggggctgctgaggcactgtcatgatggcactaatttcttcacaggtgaagccggagtccggttggactacatcagcctgcatcgcaagggcgcgcggtcaagtatttctatcctcgagcaggagaaagtggttgcccagcaaattcgtcagctgttcccaaaattcgcagacacccctatctataacgatgaggcggacccgctggtcgggtggtccctgccccaaccatggcgcgccgatgtgacatatgccgccatggtggtgaaagtcatcgcccagcaccaaaacctcctattggccaacacaacatccgccttcccctacgccctgctgtctaacgacaatgctttcctcagctatcaccctcacccttttgctcagcgcacactgacggcgcgatttcaggtaaacaatacacgaccgccacatgtgcaactgctgcggaagcctgtgttgaccgcgatgggcctgctggccttgctcgacgaggaacagctgtgggcagaagtctcccaggctgggaccgtgctggactctaaccacactgtgggtgtcttggcaagcgcccatcgccctcagggccccgcagacgcatggagggcagctgtcctgatctatgcctccgacgacacacgtgcccatcctaatcgctctgtggcagtgactctcaggctgaggggcgtgcctcccggcccaggtctggtgtatgtcacgcgctacttggataatggactctgcagcccagatggcgagtggagaaggctcggacggcccgttttcccaaccgccgaacagttcaggcgtatgagagctgccgaggaccccgttgccgccgcccccagacctctgccagccggcggacggcttacgctgagacccgcactccgactcccgtccctccttctggttcacgtctgcgccagacccgaaaaaccccccggccaggtaacacgcctcagggcactgccacttactcaggggcaactggtgctggtgtggtctgatgagcacgtggggagtaaatgtctgtggacctatgagattcagttctctcaggatgggaaggcgtacacccctgttagtcgaaagccctccacattcaatctgttcgtctttagccctgacactggagctgtgagcgggtcctatcgggttcgcgccttagactactgggcacgcccaggtcccttttccgaccccgtgccctacctggaggtgcctgtacctcggggcccccctagccctggcaaccct

SEQ ID NO: 13876 - DNA, 1959 bp, synthetic construct
  misc_feature 1..1959: note = source = /note="Description of Artificial Sequence: Synthetic coding sequence"
  source 1..1959: mol_type = other DNA
atgagaccgttgcggccacgtgctgccttacttgctctgcttgcttctctgctggccgctcctccggttgccccagctgaggctccacaccttgtgcatgttgatgctgctcgtgccctgtggccacttagacgtttctggaggtcaaccggattctgcccaccacttcctcattcccaggcagatcagtacgtcttgagttgggaccaacagctgaacctcgcttatgttggtgcagtgcctcatcgcgggataaaacaagttagaacccattggcttcttgagctggtgacaactcgtggaagtactggcagaggccttagctataatttcactcaccttgatggctacctcgatctccttcgtgagaaccaactgttgcctggatttgaactgatgggttccgctagtggtcactttactgatttcgaagataagcagcaagttttcgagtggaaggatcttgtctcttcacttgctaggaggtacatcggacgctatggtctcgcacatgttagcaaatggaattttgagacttggaacgaacctgatcatcacgatttcgataacgtctcaatgacaatgcaaggattccttaattattacgatgcctgttctgagggattgagggcagcgagccctgctctgcgtttgggggggcctggtgatagttttcatactcctccccgatcccccctgtcatggggattgttaagacattgtcatgatggtacaaactttttcactggtgaggcgggcgtcagattagactacatctctctacacaggaagggtgcaagatcgtctatcagcattctagagcaagagaaggtagtggcccaacaaatccgtcaactttttccaaagtttgccgatacccctatttataacgatgaggccgatcctttggtcggatggtcgcttccacaaccctggcgagcagatgttacgtacgcagctatggtagtaaaggtgatagcccaacatcaaaaccttttgttggccaatacgactagcgctttcccatatgccttgctctcaaatgataacgcttttctctcttatcatccgcatccattcgctcaaaggacccttacagcccgattccaggtaaacaatactcgaccaccccatgtccaattgctacgcaagcctgttttgactgccatgggtcttcttgctcttctcgatgaggaacaactttgggccgaggtttcccaagccggaaccgtgttagattctaaccatacagtgggtgttctcgctagcgcgcaccgtccacaagggcctgcagatgcttggcgtgctgcggtgctgatttatgctagcgatgacacaagggctcatccaaatcgatcggttgctgtgacactgcggctgcgcggcgtgccacctggtcctggccttgtctatgtaacccgatatttggataacggtctgtgctcgccagacggggagtggaggaggttaggacgtccggttttcccgacggccgagcagttccgaaggatgagagccgctgaagatccggtagctgcagctcctaggccactgcctgctgggggacgactcaccctgcgccccgctttgaggcttccttctctgctccttgttcatgtttgtgccaggccagaaaagccccccgggcaagtgacacggttgagggcccttccacttacccaaggccaactggtgctagtctggtctgacgagcatgttggctctaaatgtctttggacatacgaaatacagtttagccaggatggaaaagcttatacaccagtgtcaaggaagccatccacgtttaatttatttgtcttcagtccagatacaggtgctgtctccggtagctatagggtgagggctctggattactgggcccgtccaggccctttttccgatccagttccgtatcttgaggttccagtcccaagaggcccgccttctcctggaaatccc

SEQ ID NO: 13877 - DNA, 1959 bp, synthetic construct
  misc_feature 1..1959: note = source = /note="Description of Artificial Sequence: Synthetic coding sequence"
  source 1..1959: mol_type = other DNA
atgcgcccactcagaccgcgtgccgctctccttgcgctgctcgcatcactccttgctgcaccgccagtcgcgcccgctgaagctccgcacctggtgcacgtggacgccgcccgcgcactttggccgctgcggcgattctggcgctccactggattctgtccgcccctgcctcacagccaggccgaccaatacgtgttgtcctgggaccaacaactgaatctcgcgtacgtgggagcggtgccgcatagaggaattaagcaggtgcgcacccattggttgctggaattggtcactacccggggttctaccggacgcggactgtcttacaatttcacccatcttgatgggtatctggacctcctgcgcgagaatcagttgctgcctggattcgaactgatgggctccgcgtcaggacacttcactgatttcgaggacaagcagcaggtgtttgaatggaaagacctcgtgagctctctcgcgcgccgatacatcggccgctacggattggcgcacgtgagcaagtggaacttcgaaacttggaacgaacccgaccaccacgacttcgacaatgtgagcatgaccatgcaaggattcctcaactattacgatgcctgtagtgagggactgcgggccgccagtccggccctcagactcgggggccctggcgactccttccacactccaccccggagccctctgtcatggggtctgctgcggcattgccacgatggtacgaacttcttcaccggagaggccggagtcagactcgattacatctccttgcatcgcaaaggcgcccggtcgtccatctcgatcctggagcaagaaaaggtcgtggcgcagcaaatcaggcagctcttcccgaaatttgcggataccccgatctacaacgacgaagccgaccctctggtgggatggtcgctcccccaaccgtggagggcagacgtcacctacgccgctatggtggtgaaggtcatcgcacagcatcaaaatctcctgctggccaatactacttccgcctttccgtacgcgctcctgtctaatgacaacgcattcttgtcataccatccgcatccgtttgcacaacggacgctgactgccagatttcaggtcaataacacccgccctccgcacgtccagctgctgaggaagcctgtgctcacggccatgggactgctcgcgctgctggacgaagagcagctgtgggcagaagtgtcgcaggccgggactgtgttggactcaaaccataccgtgggagtgcttgcgtccgcccacaggccacagggcccagctgacgcatggcgcgcagcagtgctgatttacgcatcggacgatactcgggctcaccccaaccggagcgtagcagtgaccctccggctgcgcggtgtcccaccaggtccaggactggtgtacgtgacccgttatcttgataacgggctgtgcagccctgatggggaatggcgcaggttgggtcggcccgttttcccgactgcagagcagttccgcagaatgagagcggcggaagatccagtggccgcagcaccaagaccgctgccggcaggcgggcgtctgactttgcggccggcacttaggctgccgtcgctgctgttggttcacgtgtgcgcgcgtccggagaagccaccagggcaggtgacccggcttcgggcgctcccgctgactcagggtcaactcgtgcttgtctggtcggatgaacacgttggatcaaaatgcctttggacgtacgagatccagtttagccaggacggaaaggcctacaccccggtatcgcggaagccgagcaccttcaacttgtttgtcttttcccctgacaccggcgctgtctcaggcagttaccgcgtgagagccctcgattactgggccaggccgggaccgttctcggatccagtgccatacctggaggtccccgtccctcgaggcccaccgtcgccgggaaaccct

SEQ ID NO: 13878 - DNA, 1959 bp, synthetic construct
  misc_feature 1..1959: note = source = /note="Description of Artificial Sequence: Synthetic coding sequence"
  source 1..1959: mol_type = other DNA
atgcggccacttagacctagagctgcactgcttgcactgctggcctctctgcttgcagcgccccccgtggcacctgcggaagcaccgcacctggtgcatgtggatgcagcaagagcactctggcctctgcggcgattctggcgatccaccgggttttgtcctcctttgcctcactcgcaagccgaccaatatgttctgtcatgggatcaacaactcaaccttgcctacgtgggcgcagtgccacatcgggggatcaagcaagtcagaactcattggttgctggagctggtcacgactcgtggaagcaccggccgagggctttcgtacaactttacgcacctggatgggtacttggatcttctccgggaaaatcaacttctcccaggtttcgaactgatgggttcggcatccggccattttactgattttgaagataagcaacaggtctttgagtggaaagacttggtgtcatccctggcacggcgatatatcggtaggtacggactggcccatgtctccaaatggaacttcgagacttggaacgaaccagatcaccatgattttgataacgtgagcatgaccatgcagggttttctgaactactacgacgcttgttcagaggggctgcgggctgcatcgcctgcactgagactgggtggccccggtgactcctttcatacgccccctagatcgccgcttagctggggactgctgcgtcactgtcacgatggaactaatttcttcacgggagaagcaggtgtgagacttgattacatctcgctgcaccgaaagggcgcaagatcgtcaataagcattctggaacaggagaaagtggtggcacagcaaatccggcaactttttcccaaattcgcagatactcctatttacaatgatgaggcagacccacttgtgggttggtcccttccccaaccatggcgggcagatgtcacctacgccgcgatggtggtgaaggtcatcgctcaacatcagaaccttctgctcgcaaatactacctcggcatttccatacgctctcctttcaaacgataatgccttcttgagctaccatccacatccctttgcccaaagaacccttactgcaagattccaggtaaacaatacccgtccacctcacgtgcagctgcttcggaagcccgtgctgaccgccatgggtcttttggcactcctggacgaagagcaactttgggcagaagtctcgcaggcggggaccgtccttgacagcaaccatactgtcggtgtcttggctagcgcgcatcgcccccaggggccagctgatgcctggcgcgcagcagtgctgatttacgcatccgatgatacccgcgcccatcctaatcggtctgtggcggtcactcttcgcctgcgcggagtgcctccaggccccggacttgtctacgtgactcgctaccttgataacggactttgttcccccgacggagagtggcggcgtcttggacgaccagtctttccgacggccgaacagtttagaagaatgcgagcagcagaagatcccgtcgcagccgctccaagaccacttccagcaggaggtcgtttgacgctccgcccagcacttcggctgccatccttgctcttggtgcacgtgtgcgcgaggcccgagaagccgcccggacaagtgaccaggctgcgcgcactgcctttgactcaaggccagcttgtccttgtctggtcagacgaacatgtgggcagcaagtgcttgtggacctacgagattcaattttcccaagatggtaaggcctacaccccagtgtccagaaagccatctactttcaacctttttgtcttttcaccggataccggcgcagtgagcgggtcctacagggtccgggcgcttgattactgggcaaggcccggtccattttcagatcctgtgccttacctggaggtcccagtgcccagaggccccccaagcccaggaaatcct

SEQ ID NO: 13879 - DNA, 1959 bp, synthetic construct
  misc_feature 1..1959: note = source = /note="Description of Artificial Sequence: Synthetic coding sequence"
  source 1..1959: mol_type = other DNA
atgcgtccgctgcgcccccgggcggccctgctggcgctgctggcctcgcttttggccgcgccgccagtggctcccgctgaggcaccgcatctggtgcacgtcgacgccgcacgggctttgtggcctctgcgacggttctggagaagcactggcttttgcccgccactgccacatagccaagcggaccaatacgtgctgtcgtgggaccaacagctgaacctcgcctatgtcggagccgtgccccatcgcggcataaaacaggtccgcactcattggctcctggaacttgtgactaccagaggctcgactggacggggactgtcctataacttcactcatctcgacggttacctggatttgcttcgggaaaaccagctgctgcctggcttcgagctgatgggctcagcctcaggacatttcacggactttgaggataaacagcaagtttttgagtggaaggatctggtgagctccctggctcggaggtacatcggacgctatggattggctcatgtgagcaagtggaacttcgaaacgtggaacgaacccgatcatcacgattttgacaacgtgtcgatgaccatgcaaggcttcctcaactactacgacgcctgttcggaaggcctccgagcggcctcgcctgccctcaggctgggtggacctggcgactcgttccacacccctcctcgctctccgctgtcatggggacttctgaggcactgtcacgacggaactaatttcttcactggagaggccggagtccgtctggattacattagcctccaccgcaaaggagcaagatcctccatttccatcctggagcaagaaaaggtagtggcccagcagatccgccagctgtttccgaagttcgcggacaccccaatttacaacgatgaggcggatccacttgtgggctggtcgctgccccagccgtggagagccgacgtcacttacgcagctatggtggtgaaggtgatcgctcagcatcagaacctcctgctcgctaataccacttccgcctttccgtacgccctgctttcgaacgataatgccttcctctcgtaccacccacaccctttcgcccagcggacgctcaccgccaggtttcaagtgaacaacacccggccgccgcacgtgcagctgcttcgcaagccggtgttgaccgcgatgggactgctcgcgctgttggatgaggagcagctgtgggctgaagtgtcacaggctggaactgtcctggactccaaccatactgtgggagtgctggcgagcgctcaccggccacaaggtccggcggatgcgtggcgagcggccgtcctgatttacgcctccgatgataccagggcgcacccgaacagatccgtcgccgtgaccctgagattgcgcggagtcccgcctggaccagggctggtctacgtgactcgatatctggacaatggtctgtgctcgccagatggggaatggcggcggctcggacgcccagtgttccctaccgcggagcagttcaggcgcatgcgcgctgccgaagatcccgtggccgccgcaccgcgtccactcccggccggggggcgcctgaccctgcgaccggcactgaggctgccgtcgctgcttctcgtccatgtgtgcgcgcgcccggagaagccaccgggccaggtcacccgcctccgcgcgctcccactgactcagggccagctggtgttggtctggtcggacgaacacgtgggatctaagtgcctctggacctacgagatccaattctctcaggacggcaaagcatacaccccggtgtcgaggaagccgtcgacgtttaatctgttcgtgttctcgccggacactggggccgtctccggatcctaccgggtgagagccttggactactgggcgcgaccggggccttttagcgacccagtgccttacttggaggtcccagtcccccgcggcccgccgtccccgggaaaccca

SEQ ID NO: 13880 - DNA, 1959 bp, synthetic construct
  misc_feature 1..1959: note = source = /note="Description of Artificial Sequence: Synthetic coding sequence"
  source 1..1959: mol_type = other DNA
atgcgaccgttacgaccgcgagcggcgttattagcgttattagcgtcgctattagcggcgccgccggtagcgccggcggaagcgccgcatttagtacatgtagatgcggcgcgagcgttatggccgttacgacgtttttggcgttcgacgggtttttgtccgccgctaccgcattcgcaagcggatcaatatgtattatcgtgggatcaacaattaaatttagcgtatgtaggtgcggttccgcatcgtggtataaaacaagtacgaacgcattggttactagaattagttacgacgcgaggttcgacgggtcgtggtctatcgtataattttacgcatttagatggttatttagatttactacgagaaaatcaattactaccgggttttgaactaatgggttcggcgtcgggtcattttacggattttgaagataaacaacaagtatttgaatggaaagatctagtatcgtcgttagcgcgtcgatatataggtcgatatggtctagcgcatgtatcgaaatggaattttgaaacgtggaatgaaccggatcatcatgattttgataatgtttcgatgacgatgcaaggttttctaaattattatgatgcgtgttcggaaggtctacgtgcggcgtcgccggcgttacgtctaggtggtccgggtgattcgtttcatacgccgccgcgatcgccgttatcgtggggtttactacgtcattgtcatgatggtacgaatttttttacgggtgaagcgggtgtacgtctagattatatatcgttacatcgaaaaggtgcgcgttcgtcgatatcgatactagaacaagaaaaagtagtagcgcaacaaatacgtcaactatttccgaaatttgcggatacgccgatatataatgatgaagcggatccgctagtaggttggtcgctaccgcaaccgtggcgagcggatgtaacgtatgcggcgatggttgtaaaagtaatagcgcaacatcaaaatttattattagcgaatacgacgtcggcgtttccgtatgcgctactatcgaatgataatgcgtttttatcgtatcatccgcatccgtttgcgcaacgtacgttaacggcgcgttttcaagtaaataatacgcgtccgccgcatgttcaactactacgtaaaccggtactaacggcgatgggtttattagcgctattagatgaagaacaattatgggcggaagtttcgcaagcgggtacggtattagattcgaatcatacggtaggtgttttagcgtcggcgcatcgaccgcaaggtccggcggatgcgtggcgtgcggcggtactaatatatgcgtcggatgatacgcgtgcgcatccgaatcgatcggtagcggtaacgttacgactacgtggtgttccgccgggtccgggtctagtatatgtaacgcgatatctagataatggtttatgttcgccggatggtgaatggcgtcgtttaggtcgaccggtttttccgacggcggaacaatttcgtcgaatgcgtgcggcggaagatccggtagcggcggcgccgcgaccgttaccggcgggtggtcgtttaacgctacgtccggcgttacgtttaccgtcgttattattagtacatgtatgtgcgcgaccggaaaaaccgccgggtcaagtaacgcgtttacgtgcgttaccgctaacgcaaggtcaattagttctagtttggtcggatgaacatgtaggttcgaaatgtttatggacgtatgaaatacaattttcgcaagatggtaaagcgtatacgccggtttcgcgaaaaccgtcgacgtttaatttatttgtattttcgccggatacgggtgcggtatcgggttcgtatcgtgttcgagcgctagattattgggcgcgtccgggtccgttttcggatccggtaccgtatctagaagtaccggttccgcgtggtccgccgtcgccgggtaatccg

SEQ ID NO: 13881 - DNA, 1959 bp, synthetic construct
  misc_feature 1..1959: note = source = /note="Description of Artificial Sequence: Synthetic coding sequence"
  source 1..1959: mol_type = other DNA
atgcgcccacttagacccagggcagcacttctcgccctgctcgcgtcacttctcgccgccccgcctgtggcacctgcagaagcccctcatcttgtgcacgtcgacgcggcaagggccctgtggcctctgagacgcttctggaggagcaccggcttctgtcctcccctccctcattcacaggcagatcagtacgtcctttcatgggatcagcagctgaacctggcatacgtgggagcagtgccacatcgtggtatcaaacaggtgcgcactcactggctgttggaactggttaccaccagaggatctaccgggagggggctctcatacaacttcacccacctcgatggctacttggatctccttcgagaaaaccaactgcttcctggattcgaactcatgggttcggcctcaggacattttactgactttgaggacaaacagcaggtttttgagtggaaggacctggtgagctcattggctagacgctacataggcagatacggacttgcacacgtgtcgaagtggaactttgaaacctggaatgagccagaccaccacgattttgataatgtcagcatgactatgcagggattcctgaactactacgacgcctgctccgaggggctgcgggcagcatcccctgcactgcgccttggagggccaggagattcattccacaccccaccacgaagcccactgtcgtggggacttctgaggcattgtcacgatggtaccaacttctttacgggcgaagcaggtgtgagactcgattacatttcccttcaccggaagggtgcgagaagctccattagcatacttgaacaggagaaggtggtggcgcaacagattagacaactgttccctaagtttgcagacacccctatctacaacgatgaggcagacccattggtgggatggtcactgcctcaaccgtggcgggcagatgtgacctatgccgctatggtggtgaaggtcatcgcacaacatcaaaatcttctgctggcaaacactacgtccgccttcccttacgccttgctgagcaacgataatgcttttctttcgtaccatccacatccttttgcacagcgaacgcttaccgcaaggtttcaagtcaacaacactagacctcctcacgttcaattgcttcggaagcccgtccttacggcaatgggactcctcgctcttcttgacgaagagcagctttgggcagaagtgtcgcaagccggtacggtccttgactccaatcatactgtcggtgttctcgcttccgcacatagacctcaaggtcctgcggatgcgtggagagccgcagtgctcatttatgcatcggacgatactcgggcacatccaaacagaagcgtcgcagtgacgcttcgtcttaggggagtccccccaggtcccggtcttgtgtacgtgaccagatacttggataatgggctctgttctccggatggcgaatggaggagacttggaaggccggtgtttccaactgcagaacaattccggcgcatgcgggcggctgaagatcctgtggcggccgctcctcggcccctgcccgcaggaggtaggctcaccctcagacccgctctgagactgccctcccttctgcttgtgcatgtgtgcgcgaggccagagaagccacctggccaagtgactcgccttagggcacttccacttacccaaggacagctcgttttggtctggtcggatgaacatgtgggatccaagtgtctctggacttatgaaattcaattttcgcaggacggaaaggcttatacccctgtgtcgcggaagccatcaacctttaacctgtttgtgttttcgcccgatactggcgcagtgtccgggtcgtaccgggtgagggccctggattactgggcaaggccaggtcctttttcagaccctgtcccttacctcgaagtgcccgtccctagagggcctcctagcccaggaaatccg

SEQ ID NO: 13882 - DNA, 1959 bp, synthetic construct
  misc_feature 1..1959: note = source = /note="Description of Artificial Sequence: Synthetic coding sequence"
  source 1..1959: mol_type = other DNA
atgcgcccgctcagacccagggccgccctgttggcgctactggcaagtctgctcgccgcacctcccgtggcgccagccgaggccccacacttggtccacgtagatgctgcaagggccctatggccactgaggaggttctggaggtctaccggcttttgccctccactgcctcacagccaggccgaccagtacgtattaagctgggaccagcagttgaatctggcctacgttggggcagtgccacatcggggcattaaacaggttagaactcactggctgctcgaactagtgacgaccagagggtctacgggccggggcctgagttacaacttcactcacctcgatggatacctggaccttctgagggaaaatcagctgctgcctggttttgagctaatggggtccgcctccgggcactttacagacttcgaagataagcaacaggtctttgaatggaaagacctcgtaagctctttggcccgccgatatattggtcggtatggcctggcacacgtttcaaaatggaactttgagacatggaatgaacccgaccaccacgacttcgataacgtgtctatgactatgcagggattccttaattattacgacgcctgctctgagggacttagggcagcctctcctgcacttcgactgggggggccaggagattcttttcacaccccaccccggagccctttgagctgggggctgctacggcattgccacgacggaactaattttttcacaggagaggccggcgtgagactcgactacattagtttacaccgtaaaggcgctagatcgtctattagtattcttgagcaggaaaaggtggtcgcccagcagatccggcagctctttccaaagtttgctgacacacccatctataatgatgaggccgaccccctggtggggtggagtctgcctcagccttggcgcgccgatgttacttacgcggctatggtggttaaggtgattgcccagcatcagaacctgctcttggccaatacgaccagcgcctttccttatgcgctcttaagtaatgataatgctttcttgtcctatcatcctcatccgttcgcgcagaggacattgaccgctcgcttccaggttaataatacccgcccccctcacgtgcaactgctacgcaaacccgtactcacggcgatggggttgctcgccctgctcgatgaagaacagctgtgggcagaggtgtcccaggctggaaccgtactcgatagtaaccataccgtcggggtgctcgcaagtgctcaccgaccccagggaccggctgacgcgtggagggcagccgtcctgatttacgccagcgacgatacccgcgcacacccaaatcgaagcgttgccgtcacccttcggttaaggggagtccctccaggaccaggattggtctacgttactaggtacttggataatggcctctgctcgcctgatggtgaatggaggaggcttgggcggcccgtttttccaacagccgagcagtttcggcgtatgagagctgcagaggatccggtggcagctgctcctcggcccttacccgcaggaggtagactaaccctgcggccagccctgcggctgccttccttgctgttagtgcatgtctgcgctcgccctgagaaaccacctggtcaagtgacccgactccgcgctctgcctttgactcagggtcagctagtgttggtgtggtctgatgaacatgtagggtccaagtgcctttggacctacgagatccaatttagccaagacggaaaagcttatactcctgtttcacggaagccatctaccttcaacttgtttgtgttcagcccagataccggcgccgtttctggcagctacagagtgcgcgctttggactattgggccagacctgggcctttttccgacccagtcccatacctggaggtgcccgtaccaagagggcctccctcccctggcaacccg

SEQ ID NO: 13883 - DNA, 1959 bp, synthetic construct
  misc_feature 1..1959: note = source = /note="Description of Artificial Sequence: Synthetic coding sequence"
  source 1..1959: mol_type = other DNA
atgcgtcctctcagacctcgcgcagcactgttggccctgctggcttcgctgttggctgcaccgcccgtggctccagccgaggcgccccatctggtgcatgtcgacgccgctagagcactttggcccctgcggcggttctggaggtcaactggcttctgtccgccactcccgcactcacaggccgaccaatacgtgctttcctgggaccagcagctgaatcttgcgtacgtgggcgccgtgccgcatcgcggtattaagcaagtgcgcactcactggctgctcgagctcgtgaccaccagaggatctaccggacggggcctttcctacaacttcacgcacctggatggctacctggatctgcttcgcgaaaatcagctgctgccaggatttgaactgatgggaagcgcatccgggcatttcaccgattttgaagataagcagcaagtgttcgagtggaaagatttggtgtcctcgcttgcgcggagatacatcggtagatacggtctggcacacgtgtcgaagtggaacttcgaaacctggaatgaacccgaccaccacgacttcgataatgtgagcatgaccatgcagggtttcctgaactactacgacgcgtgcagcgagggactgcgggcggcatcacctgcgctcagactggggggacctggagactcattccacacgccgccacggtcgccactgtcgtggggtttgttgcggcactgccatgacggcactaacttcttcacgggagaggccggtgtgcggctggactacattagcctccacagaaagggggcccggtcctccatttctatcctggagcaagaaaaggtcgtcgctcagcagatccgccagcttttcccaaaattcgcagacaccccaatctacaatgacgaggcggaccccctcgtgggctggtcactgccgcagccgtggcgagccgacgtgacgtacgcggccatggtggtgaaagttattgcacaacaccagaacctgctcctcgcaaacaccacctccgcgttcccgtacgcgctgctctccaacgataacgccttcctgtcctatcacccgcacccgtttgcccaaagaactctcaccgcccggtttcaggtcaacaatacgcggccgccgcatgtccaattgctgagaaagccggttctcaccgcaatgggcctcctcgccctgctggatgaggagcaactctgggcggaagtctcgcaagccggcactgttctggacagcaaccacaccgtgggtgtgctggcctcagcacaccgcccgcaaggtccggccgacgcctggcgggcagcagtcctgatctacgcctccgatgatactcgggcacatccgaatcgctccgtggccgtgaccctccggctgcgcggtgtgccaccggggcccggcctggtttacgtcactcgctacctcgataacgggctctgttcaccggacggagaatggcgccgactcggacggccagtgttcccaaccgccgaacagttcagaaggatgagagccgccgaggacccggtggccgccgcaccgaggccactgcctgcgggaggccgcctgacgcttagaccggccctcagactgccgagtttgctgctcgtgcatgtctgcgcccggccagagaagccgccaggacaagtgactcgcctgcgggcgctgccgcttacccaaggccagcttgtgctggtctggtcagatgaacatgtgggttcgaagtgcctttggacctacgagatccagttcagccaggacggaaaagcatacactccggtttcgcgcaaaccttcaactttcaatttgttcgtgttctcccctgataccggggctgtgtcgggctcataccgcgtgcgggcccttgactactgggcgcgcccggggccgttctcagacccggtgccttacctcgaagttcctgtcccgagagggccaccgtcaccaggaaacccg

SEQ ID NO: 13884 - DNA, 1959 bp, synthetic construct
  misc_feature 1..1959: note = source = /note="Description of Artificial Sequence: Synthetic coding sequence"
  source 1..1959: mol_type = other DNA
atgaggcccttgagaccgcgggcggcgctgcttgcccttctggccagcctgctggctgcccctccagtcgccccagcagaagctccccacctggtccacgtagatgcagcaagggcactgtggccactgcgcaggttctggagatctaccggtttctgcccccctctccctcatagtcaagccgatcaatacgtgttgagctgggaccagcagctgaatctggcatacgtgggcgctgtgccccatcgcggaattaagcaggtccggacacactggctcttggagctggtaaccactcggggctccacaggacggggactgtcttacaatttcacacatttggacgggtacctcgacctgttgagagaaaatcagcttctgcccggtttcgagctcatgggtagtgcctccgggcacttcaccgactttgaagacaaacagcaagtgttcgagtggaaggatttggtgtcctccctggctcggaggtacatcggaaggtacggcctggcgcatgtgtctaagtggaactttgagacctggaatgaacctgatcatcatgacttcgataacgtctccatgaccatgcaagggtttttgaattactacgacgcttgctccgaagggctgcgggcggcttcacctgccctcaggttgggtggcccaggagacagttttcacacacccccacgatccccgcttagctggggcctgctgagacattgtcatgacggaactaatttttttactggggaagctggggtgcgccttgattatatcagtctgcatagaaaaggcgctcgctccagcatctcaatccttgaacaagagaaggtcgtcgcccagcagatccgacaacttttccctaagttcgccgatacgcctatttacaacgatgaggctgatccacttgtgggctggagcctcccacagccgtggagagccgatgtgacatatgcggcaatggtcgtgaaggtgatcgctcagcaccagaacctgctcctggctaatacgacttctgcattcccctatgctcttctttccaatgataatgcctttctgtcctaccacccccatccatttgcgcagcgaacactcaccgctcggttccaggttaacaacaccaggccgccgcacgtccagcttctgcgcaagcctgttctgactgcaatgggtctcctcgccctcctggacgaggagcagctgtgggccgaggtgtctcaggcggggactgtgcttgattctaatcacacagtcggcgtgctggcctctgcccatcgcccacagggccccgccgacgcctggcgggccgctgttttgatctacgctagtgatgacactagggcacaccctaatcgctctgtcgctgtgactctgagactgagaggagtgcctcctggaccaggactggtatacgtgaccaggtaccttgataacggcctttgttctcccgatggcgaatggcggagattgggacgacctgtattccccacagcagagcaattccgacgaatgagggcagcagaggatccagtcgccgccgctccacgaccactccctgctggaggaaggttgacgctgcgccctgccctgcgccttccttcactcttgttggtacatgtatgcgctagacccgagaagcccccgggtcaggtgacacgcctcagggccctcccgctcactcagggacagctggtgttggtctggagtgacgagcacgtgggttcaaaatgcctttggacatacgagatccaatttagccaggacggcaaagcttatacgcctgtgagtagaaagccttccacattcaatctgtttgttttctcccccgataccggcgcagtctctgggtcatacagagtgcgggcactcgactattgggcccggcctgggccctttagtgatccggtcccctatttggaagtgcctgtcccgaggggacccccctccccagggaaccct

SEQ ID NO: 13885 - DNA, 1959 bp, synthetic construct
  misc_feature 1..1959: note = source = /note="Description of Artificial Sequence: Synthetic coding sequence"
  source 1..1959: mol_type = other DNA
atgcgtccattacgtccgcgggccgctctgctggcattacttgcgagtcttttagcagctccacctgtggcacctgcagaagcccctcatcttgtccatgtggatgccgcacgtgcactctggccactacgtagattctggagatcaaccgggttttgtccacctctacctcattctcaggccgatcagtatgtgctgtcctgggatcagcagctcaacttggcctacgtgggagcagtgccacaccgagggattaagcaggtgaggactcactggcttttggagttagtgacaacgagagggtccaccggacgaggactgtcatacaacttcacccatctggacggttatcttgatctgctgagagagaatcagctgctgcccggttttgagctgatggggagtgcatcaggacatttcaccgactttgaagataagcagcaggtgtttgaatggaaggatttggtgtcatccctggcccgacgatacatcggaagatatggtttggcgcacgtttctaaatggaactttgaaacatggaatgaaccagatcaccacgattttgataatgtttcgatgacaatgcagggttttctgaattattatgatgcctgcagtgagggcctaagggcagccagccccgcattacgcctcggtgggcccggagattcttttcacactccccctagatcacccctgtcttggggactgttgcgtcactgtcatgacgggaccaatttctttaccggagaggcaggcgtcagattagactatatcagcctccacaggaaaggagcaaggtcaagcatctcgatcctggaacaggagaaagtggtagcccagcagatccgacagctgttcccaaagttcgccgataccccaatctacaacgacgaggcagacccactggtgggttggtcattacctcaaccttggagggccgacgtcacctacgcagcaatggtcgtgaaggtgatagctcagcaccagaacctgctgctggcaaacaccacttcggcatttccatacgccttactgtccaacgataacgctttcctgagctaccaccctcaccctttcgcccagaggacgcttactgcacgttttcaggttaacaatacgagaccccctcatgtccaattgcttaggaaacccgtccttaccgccatgggccttcttgcactcttggatgaggagcagctttgggcagaggtctcgcaggcaggtactgtactggatagtaaccataccgtgggggtccttgcgtccgcccacagacctcagggtccagctgatgcatggcgagccgctgtgctgatctacgcaagcgatgacaccagagcgcatccaaataggtcagtggcagtgacgctgaggctccgtggagtccctccagggccggggctggtctatgtgacgaggtacctagacaatggcctgtgttcacccgacggggaatggaggaggttggggcgacctgtctttccaactgctgagcagttcagacggatgcgagcagctgaggatccagtggcagcagcacctcgaccactgcccgccggcggtcggctcacactgcgacccgccttgcgattgccgtcattgctgctggtgcacgtgtgcgcgagaccggaaaaaccgcctggtcaagtaaccaggctgagagctttgcctctgacacagggccaactggtgttggtgtggtctgacgaacacgtgggctcaaaatgtctgtggacctatgaaatacaattcagccaggacggaaaggcatatacccctgtttctaggaagccctccacattcaacctcttcgtctttagccccgacacaggcgcggtgtccggaagctaccgggttagggctttagattactgggctcgcccagggccgtttagcgaccctgtgccctatttggaggtgcccgtaccccgaggacccccttctcctggcaaccca

SEQ ID NO: 13886 - DNA, 1959 bp, synthetic construct
  misc_feature 1..1959: note = source = /note="Description of Artificial Sequence: Synthetic coding sequence"
  source 1..1959: mol_type = other DNA
atgcgccctctgcggcctagggctgctttgttagccctgctggctagcttactggcagctccacccgtggcccctgcagaggcccctcatctggtacatgtagacgctgcccgcgctctatggccattgaggcgattctggagatctactggtttctgtcctcccttgcctcactcgcaggcggatcagtacgtgctgtcatgggaccaacagctcaacctggcttatgtcggtgccgtgccccaccggggtatcaagcaggtccgaacccactggctgcttgagctggtgactactagagggtccaccggtcgcggcctctcttataactttacacacttagacggctatctcgatctcctcagagaaaaccagcttctgccaggtttcgagttgatgggatccgcatcaggccactttacagatttcgaagacaaacagcaagtgtttgaatggaaagatctggtcagttcattggcccggcggtacattggccgttacggcctggcccacgtgtcgaagtggaacttcgaaacatggaacgagccagatcatcacgactttgataacgtgtctatgacaatgcaggggttcttaaactattacgacgcatgtagtgaggggctgagggctgcctctccagctcttagattgggggggcctggggattcatttcacactccaccacggtcaccactttcttggggattgctcaggcattgccacgatgggaccaactttttcactggagaggccggtgtgcggttggattatatctcacttcaccggaagggggcccggtcctcaatttcaatactggaacaggaaaaagtggtggctcagcagatccgccagctgtttcctaagtttgccgacacaccaatttataacgacgaagctgatccacttgttggatggagcctgcctcagccatggcgagccgacgtcacatatgcagccatggtagtgaaggttattgctcagcaccaaaatttacttttagcgaatacaacgagcgccttcccttacgcactgttgagcaacgacaatgcctttctaagctaccatccacaccctttcgcgcaaagaacactcacagcacggttccaggtgaacaacactcgccccccgcatgtgcaactgctgcgcaagccagtgttaaccgccatgggtctgctggctctgttggacgaggagcagctgtgggctgaggtgtctcaggccggcaccgttttggactctaatcacaccgtgggagtcttggcgagtgcgcaccgtcctcagggacccgcggacgcctggagagcagcagtactcatctacgcttcagacgacactcgggcacatcccaaccgcagcgttgccgttacactcagattgaggggggtccctcctggacctggcctggtctatgtgactcggtacctggacaacggcctttgctcaccagacggagaatggcgacgactgggccgccctgtgtttcctaccgcagagcagttccgcagaatgcgggccgcggaggaccccgtcgccgccgcccccaggcccctgcctgcaggtggcaggctaacactccgccctgctctgagactgccttctctcttgctcgtccacgtttgcgcccgccccgaaaaaccgcccggtcaagtgaccagactacgcgccctgcccctgacccagggacagctggtgctagtctggtccgacgaacacgttggaagcaagtgcttgtggacttatgaaattcagttctcacaggatggaaaagcctatacaccggtgtctcgcaaaccttcaacctttaacctgttcgtgttctctcccgacacgggagccgtgtcgggctcttatcgggtgcgagctctggactactgggctaggcccggccccttttccgaccccgtaccatatctcgaggtgccagtgccccgaggccctccaagtcctggcaatccc

SEQ ID NO: 13887 - DNA, 1959 bp, synthetic construct
  misc_feature 1..1959: note = source = /note="Description of Artificial Sequence: Synthetic coding sequence"
  source 1..1959: mol_type = other DNA
atgaggcccctgcgccctagagccgcacttcttgcactgctcgcgtcgcttcttgcagcgcctcccgtggcaccggccgaagcccctcatctggtgcacgtcgacgccgcaagggcactttggcccctgagacgcttctggcggagcaccgggttttgtccccccttgcctcacagccaagcagatcagtacgtgcttagctgggatcagcaactgaatctggcgtatgtgggcgcagtcccccatcgcggaatcaagcaggtgcggacccactggctcttggaattggtcaccaccaggggttccactggacggggactgtcatataactttactcacttggatggataccttgacctgctgcgtgagaaccagcttctccctggatttgagctcatgggaagcgcatccggtcattttactgatttcgaggataagcagcaagtttttgaatggaaagatcttgtcagcagcctggcccgaaggtacatcgggcgttacggtctggcgcacgtctcaaagtggaactttgaaacttggaatgagccggatcatcatgatttcgataacgtgtccatgacgatgcaaggatttcttaactactacgacgcgtgttcggaaggactcagagcagcgtcgccagcactccggctcggcggacccggtgactcatttcacaccccgccccggtcacccctctcatggggactcttgaggcactgccatgatggtactaacttcttcaccggcgaagccggcgtccgtcttgattacatcagcctgcatcggaagggggcaagatcaagcatctccattcttgagcaagagaaagtggtggcccaacaaatcagacagcttttcccgaagtttgccgacactccgatttacaacgatgaagcagaccctcttgtgggttggtctttgccacagccgtggcgcgcagacgtcacctacgcggcaatggttgtcaaggtcatcgcgcaacatcaaaaccttcttctcgctaacacgacttccgcattcccgtacgctcttctgtcaaatgacaatgcatttctctcgtaccatcctcatccgttcgcacaacgaactctcacggcccggtttcaagtcaacaacactcgtcctcctcatgttcaacttctgaggaaacctgtgctgaccgcaatgggcctgttggcacttctggatgaggagcaactctgggcagaagtgtcccaagccggtaccgttctcgactcaaaccataccgtgggcgtgcttgcttccgcccatagaccacagggcccagcggacgcgtggcgcgcggcagtcctcatctacgcctccgatgatactcgggcacaccctaatagatccgtcgcagtgactcttcgactgcgaggagtgccacctggccccggactggtgtatgtgacgcgatacctcgataatggactttgttcccccgatggagaatggcgccgcctgggacgtccggtgtttcctactgcagaacagttccggcgcatgagagcggccgaggaccctgtcgcggcggcgcccagaccactgccggcaggtgggagactcactctgcggcccgccctccgcctcccttcgcttctcctcgtgcacgtgtgtgcccggccagaaaaacctcctgggcaggttacccgccttagagcactgcctttgacgcagggtcaacttgtcctggtctggtccgacgaacatgtggggtcgaagtgcctctggacctatgaaattcaattttctcaagatggaaaggcatacacccctgtgtcgagaaagccatcgactttcaatctgttcgtgttttcgccagataccggtgcagtgtcaggatcctacagagtgagggctctggattactgggcccgccctggcccatttagcgatccagtcccatacttggaagtccctgtccctaggggaccaccgagcccaggaaatcca

SEQ ID NO: 13888 - DNA, 1959 bp, synthetic construct
  misc_feature 1..1959: note = source = /note="Description of Artificial Sequence: Synthetic coding sequence"
  source 1..1959: mol_type = other DNA
atgaggccgcttagaccacgcgcagcactgcttgcacttctcgcatccctgttggcagcacctcccgtggcacctgcagaggcaccacatctggtgcatgtggatgcggcgcgggcactgtggccactgcgtagattctggcgctcgactggattttgtccaccactgcctcacagccaagcagaccagtacgtgctttcttgggatcaacagctgaaccttgcatacgtgggagcagtgcctcaccgaggaatcaaacaagtgcgcactcactggctgcttgaacttgttactactaggggcagcaccgggcggggtctgtcgtacaactttacccatcttgatggataccttgatttgctccgagagaatcaattgctcccaggcttcgagctgatggggtcagcatccggtcatttcaccgatttcgaagataagcaacaagtgtttgagtggaaggatctcgtgagctcactcgccaggagatacatcggccgctacggtctggcgcatgtctcgaagtggaattttgaaacttggaacgaaccggatcatcatgatttcgataacgttagcatgacgatgcagggttttttgaactactacgatgcttgctccgaaggtttgcgcgcggcgagccccgcattgagacttggaggcccaggcgacagcttccataccccaccacggtcgcctctgtcgtggggtctgctgcggcactgtcacgacggtactaacttctttaccggagaagctggagtgcggcttgattacatctcacttcaccggaagggagctaggagctcgattagcattctggaacaagaaaaagtggtggcccagcagattagacagctcttcccgaaatttgccgacactcctatttacaacgacgaagcagatccactcgtcggctggagcctgccacagccatggagagcagacgtgacctacgcagcaatggtcgtcaaggtcattgcgcaacaccagaatctcctcctggcaaacacgacttcggcctttccttacgctcttctgtccaatgataatgcgttcctgtcgtaccacccccatccgtttgcacagcgcaccctcaccgcacgcttccaagtcaacaatacgcggccaccacatgtgcagttgctcagaaagccagtccttaccgcaatgggacttctggcactgctggatgaagaacagctgtgggcagaagtttcacaggcaggtaccgtccttgactccaaccacactgtcggcgtgctggcatccgcgcacagaccacagggtcctgcggatgcgtggcgagccgcagtgctgatctacgcatcggatgatacccgagcccatcctaaccggtccgtggcagtgactctgcgactgcggggtgtccctcctgggccaggtctggtctacgtaaccagataccttgacaatggcctgtgttcaccagacggggagtggaggcggctgggcagaccggtattccccaccgctgaacaattcagaaggatgagagcagctgaggaccccgtcgcggctgcacctagaccgctccctgcgggaggtagactgaccctgcggcccgctctgcgcctgccctcactccttcttgtgcacgtctgcgcacgccctgaaaaaccacctgggcaagtcacccggctcagagcactcccactgacccaaggtcaacttgtgctggtgtggagcgatgagcatgtgggttcgaagtgcctttggacttacgaaattcaattttcccaagatggtaaggcttatactcctgtgtcgcgtaagccgtccacctttaacctctttgtgttctcgccagatactggagctgtgtccggctcgtacagagtgagagccctcgactattgggcccgaccaggaccgttttcggacccagtgccgtacctggaggtgccagtgccacggggacctccaagtccaggtaaccca

SEQ ID NO: 13889 - DNA, 1959 bp, synthetic construct
  misc_feature 1..1959: note = source = /note="Description of Artificial Sequence: Synthetic coding sequence"
  source 1..1959: mol_type = other DNA
atgcggcctcttagaccgcgcgccgcgctccttgcactgctggcaagcctgctcgccgctcccccagtcgccccagcggaagccccgcatcttgtgcacgtggacgccgctagggccctgtggccactccgccgcttttggcggtccactggattttgcccaccacttccgcacagccaagcagaccagtacgtgctgtcctgggatcagcaactgaacctggcatacgtgggagctgtgccgcatcggggaatcaagcaagtgagaacccactggctgctggagctcgtgaccacccgcggatccaccggtcggggactctcatacaatttcacccatctggacggatacctcgatctcctgagagagaatcagctgctgccaggatttgaactgatgggttccgccagcgggcacttcaccgacttcgaggataagcagcaggtgttcgaatggaaggacctcgtctcgtccctggcacggcgctacatcggacggtatggcctcgcgcacgtcagcaaatggaacttcgagacttggaatgaaccggaccatcacgatttcgataacgtgtccatgacgatgcagggattcctgaactactacgacgcttgttcagagggactgcgcgccgcctctccggccctcagattgggcggtcctggtgattcgttccataccccacctaggtcaccactgtcatggggtctgctgagacactgtcacgacggcacgaactttttcactggcgaagcaggcgtaaggctcgactacatttcgcttcatcgcaagggggctcgctcgagcatcagcatcctggagcaggaaaaagttgtagcacaacagatccgccaactcttcccaaagttcgccgacactccgatctacaacgatgaagcagacccgctggtggggtggagtctgccacagccgtggagagccgacgtgacttacgccgcgatggtcgtgaaggtgatcgcccaacaccagaatcttctgctcgccaacaccaccagcgcgttcccttacgcattgctgtccaatgacaacgcgtttctttcgtatcatccacaccctttcgcgcaacgcactttgacggctcgcttccaggtgaataacacccgccccccgcacgtccaactccttcggaagccggtgttgaccgcgatggggcttctcgcactgctcgacgaagaacaattgtgggccgaggtttcgcaagccggcaccgtcctcgactccaatcacaccgtgggtgtgcttgcctcagcccatcgccctcaggggccagccgatgcctggcgggccgcggtgctgatctacgcttccgacgatactagggctcaccctaatcggtcagtggcggtcactcttagattgagaggagtgcctcccggacctggattggtatatgtgactcggtacctcgataacggactgtgctcgcccgacggagagtggcggcggctgggtcggccggtgttcccgaccgccgaacagtttcgccgcatgagagcggctgaagatcctgttgcggctgcaccccggccgctgccagccgggggacgtctgactctgcgcccggcactcagactgccgtcactcctgttggtccacgtgtgcgctaggccggagaaaccaccgggtcaggtcaccaggctgcgggcgctgcccctcactcagggacagctcgtgctcgtctggagcgatgagcatgtcggatccaagtgcctgtggacctatgaaattcagttcagccaagacgggaaggcgtacacgccagtatcgcgtaaaccctcgactttcaacctgttcgtgttctctccagacacgggcgctgtgtcaggctcctaccgggtgagagccctggactactgggccagaccgggaccgttttcggatccggttccgtacctcgaagtgccagttcccagaggccctccgtcccctggcaacccg

SEQ ID NO: 13890 - DNA, 1959 bp, synthetic construct
  misc_feature 1..1959: note = source = /note="Description of Artificial Sequence: Synthetic coding sequence"
  source 1..1959: mol_type = other DNA
atgcgccctcttcgcccgcgcgcggctctgttggcccttctggcctccctgttagctgccccgccagtggcgccggccgaggcgccgcacttggtccatgtcgacgcagctcgtgctctctggcccttacgtcgtttctggcgttcaaccgggttctgtccccctctcccgcacagtcaggccgatcagtacgtgctctcttgggatcagcagctaaacttggcttacgtgggcgcagtaccacacagaggcatcaagcaggtccgcacccattggctgttggaactcgtcaccactaggggatccacgggccgaggcctctcctataatttcactcacctggatggctacctggatctcctgcgcgagaaccagctcctgccgggtttcgagctcatgggcagcgcgagcggccacttcaccgattttgaggacaagcagcaggtattcgagtggaaggacttggtgagctccctcgcccgtcgttacatcggtcgttacggcctggcccacgtcagtaagtggaacttcgagacttggaacgagcccgaccaccacgacttcgataacgtgtcaatgaccatgcagggcttccttaactattacgatgcatgctccgaggggcttcgtgcggcttcgccagcgctccgactgggcggaccgggcgacagctttcacaccccccctcgtagcccgttgtcgtggggcttgcttagacattgccacgacggtaccaacttctttactggtgaggctggcgtccgtctcgactacatttccctgcaccgcaagggcgcgcgttccagcatctccatccttgagcaagagaaagtcgtggcgcagcaaatccgacaactgttccctaagttcgcggacacaccaatctacaacgacgaggccgaccccctcgttggctggtcgctcccccagccctggcgcgccgatgtcacctacgctgctatggtggtcaaagtgattgcccagcaccaaaatctcctgttggccaacacaacttccgctttcccttacgcgttgctctccaacgacaacgctttcctgtcctatcaccctcatcctttcgctcagcgaaccttgactgccaggttccaagtcaacaacacccgtcccccccatgttcaactgctccgcaagcccgtcttgactgccatgggtttgctcgccttgcttgatgaggagcagctctgggccgaggtctcccaggcaggcacagtcctggactccaaccatacggtcggcgtgcttgcctcggcgcacagacctcagggtcccgcagacgcgtggcgcgccgccgtcttgatctatgcttccgatgataccagggcacatccgaaccgttccgtcgccgtcaccttacgtctgcgcggcgtgccccctggacccggtttagtttacgtcacccgctatcttgacaacggattgtgcagcccggatggtgagtggcggcgtctaggccgtccagtcttcccgaccgcggagcaatttcgtcggatgcgggcggctgaagacccagtcgcggctgcgcctcgacctctgcctgccggtggtcgcctcacgctgaggcccgccctgcgtttgccatcattgctactggtccacgtctgcgcccgaccggaaaaaccccccggtcaggtgactcgcttacgcgcgctgcctctgactcagggtcagctcgtcctcgtctggtctgatgaacacgtcggcagcaaatgcttgtggacgtacgaaatccagttctcgcaggacggcaaggcgtatacccccgttagccgtaagccctcgacgttcaaccttttcgttttcagccccgatactggtgctgtgtccggttcctaccgcgtccgtgccttggactactgggctcgaccaggaccgttctcggatccagttccgtacttggaggtccccgttcccaggggcccgccgtcaccgggaaacccc

SEQ ID NO: 13891 - DNA, 1959 bp, synthetic construct
  misc_feature 1..1959: note = source = /note="Description of Artificial Sequence: Synthetic coding sequence"
  source 1..1959: mol_type = other DNA
atgcgcccgcttagaccccgggccgccttgctggccctcctcgcgtccctcctcgcggcaccgccagtggcgccagcagaagccccccacctcgtgcatgtggacgcagcaagggcgctctggcctctgcgccgcttttggcgcagcaccggattctgcccaccgctcccgcactcgcaagcggatcagtacgtgctgtcttgggatcaacaattgaacctggcgtacgtcggtgcggtcccacaccggggaataaagcaggtgcggactcactggttgctcgaactcgtgaccactagagggtcgactggacgcggactttcgtacaacttcacccatctggacggctacctggacctgctgcgcgagaaccagctgctgccgggcttcgaattgatgggaagtgcaagcggacatttcactgacttcgaggacaagcagcaggtgtttgaatggaaggaccttgtcagctcgcttgcccgccggtacatcgggcgatacgggctggcacacgtctccaagtggaatttcgagacttggaatgagcccgaccaccacgatttcgacaatgtgtcaatgactatgcagggattcctcaactattacgacgcctgctcagaaggactccgggctgcttcacctgccctccgcctcgggggacccggtgactcgtttcacaccccacctagatcaccactgtcgtggggactgctccgccactgccacgatggaacgaatttcttcactggtgaagctggagtgaggttggattacatctcattgcatagaaaaggtgccagatcgagcatctcaatcctcgaacaggaaaaagttgtggcgcagcaaatcagacagctgttcccgaagttcgccgacactccgatctacaacgacgaggccgaccctctggtgggatggagcctcccgcagccatggcgggccgatgtcacttacgccgcaatggtggttaaggtcatcgcgcaacaccaaaatctgctcttggcgaacaccacctccgcctttccgtacgcattgctgtccaatgacaatgccttcctgtcctaccacccgcacccctttgcacagaggactctgacggcgagattccaggtgaacaatactaggcccccgcatgtgcagctccttcgtaagccggtgctgaccgcaatggggctgctcgctcttcttgatgaagagcagctttgggctgaggtgtcccaggcgggaaccgtgctggactcgaaccacaccgttggtgtgttggcatccgcccatagaccacagggaccggcggatgcatggagagccgccgtgctcatctacgcaagcgatgatacgcgggctcaccctaaccgcagtgtggccgttaccctgcggctccgcggagtgccgccggggccggggctggtctacgtgactcgctacctcgataacggactgtgctcaccagatggagagtggcgccggctcggcaggccggtgttcccgactgctgaacagttcagacggatgagagcggccgaagatccagtcgccgctgctcctcgccccctccctgcgggagggcggctgactctgcgtcctgccctccggctcccaagcctgctgttggtgcacgtgtgcgcaagaccggaaaagccgcctggacaggtgactcgcctgagagccctgccgcttacccaaggccagctggtgctggtctggtctgatgaacacgtcggaagcaagtgtctgtggacctacgaaattcagttctcccaggacggtaaggcttacactccggtgtcccggaagccttcgactttcaatctgttcgtgttttccccagataccggagccgtgagcggatcataccgcgtgcgggcgttggattactgggcgcggccgggacctttctcagaccccgtcccgtatttggaggtcccggtgccgagaggccctccatccccggggaatcca

SEQ ID NO: 13892 - DNA, 1959 bp, synthetic construct
  misc_feature 1..1959: note = source = /note="Description of Artificial Sequence: Synthetic coding sequence"
  source 1..1959: mol_type = other DNA
atgcgccccctgcggcctagagctgcccttttggccctgctcgcctccctgctcgctgcaccgccggtggctccagcagaggcgcctcacctcgtccacgtcgacgctgccagagcgctgtggccgttgcggcggttctggcgctcgaccggtttctgcccaccactccctcatagccaggccgaccagtacgtgctgagctgggaccaacagttgaatctggcttatgtgggcgctgtgcctcaccgcgggatcaagcaggtgcgcacgcattggctgctcgaactcgtgactaccaggggatccactggaagggggctgagctacaatttcacccacctggatggttacctggatctcttgagggaaaaccagctcctgcctggattcgaactgatggggtcggcgtccggacactttacggacttcgaggataagcagcaggtgttcgaatggaaagacctggtttcatcccttgcacgccggtacatcggaagatacggcctggcccacgtgtccaagtggaacttcgaaacctggaatgagccagatcatcacgactttgataacgtgtcgatgactatgcagggatttctgaactactacgatgcgtgctcagagggactccgcgcagcctcacctgccctgagactgggcggcccaggcgactcttttcacaccccgccgcgatcccccctgtcgtggggactgctccggcattgccatgacggaaccaatttcttcactggtgaagctggagtgcggctcgactatatctcgctgcataggaagggcgcacggagctcgatctctatactcgagcaggaaaaggtcgtggcgcagcagatccgccaactgttcccaaagttcgctgacactccgatctacaacgacgaggccgatcccctcgtcggttggtccctgccgcaaccgtggagagccgatgtcacttatgcagcaatggtggtcaaagtgattgcgcagcatcaaaaccttctgctggcaaataccacctcggccttcccatacgccctgctgagcaatgacaacgccttcctgagctaccacccccacccgttcgcgcaacggactctgaccgcgcggttccaggttaacaacactaggccgccgcatgtccagttgctgcgcaagccagtgctgaccgcgatgggacttcttgcgcttctggatgaggaacaactgtgggcggaagtgtcccaggcgggaaccgtgctcgactcaaaccacactgtcggggtcctggcaagcgcccatcgccctcaaggccccgctgacgcttggcgcgcagccgtcttgatctacgcgtctgatgacacccgggcccacccgaacagatcggtcgctgtcacgctgagactcagaggtgtgcctccgggaccgggactggtgtacgtgacccggtacctcgacaatggactgtgcagcccagacggagagtggcgcaggctcggacgtccagtgtttcccaccgcagaacagtttcggaggatgagagcagcggaagatcccgtggcagccgcccctcgacctctgccagcgggagggcggttgaccctgcgcccggcactcaggcttccttcgctcctcctggtgcacgtctgtgcgcgcccagaaaagccgccagggcaagtgacgcgtctgcgcgctttgcccctcacccaaggacagctcgtcctggtttggtcagatgagcacgtgggatcgaagtgtctgtggacctacgagattcaattttctcaagatggaaaggcatacacgccagttagcaggaagccgtccactttcaatttgtttgtgttctctccggatactggggccgtctcaggtagctacagggtgcgggctctggactactgggcgaggccgggtcctttctcggaccctgtgccgtatttggaagtgccggtgccaagaggaccgccctcgcccggaaacccg

SEQ ID NO: 13893 - DNA, 1959 bp, synthetic construct
  misc_feature 1..1959: note = source = /note="Description of Artificial Sequence: Synthetic coding sequence"
  source 1..1959: mol_type = other DNA
atgcggccgctgagacctcgcgcagcacttctggctctcctcgcgtctctcctagcggccccgcctgtggctccagctgaggcgcctcatctggttcacgttgatgctgcacgcgccctttggcctctgaggagattctggcgctccacaggtttctgccctcccctaccccactctcaggccgaccagtacgtgctctcatgggaccagcagctaaacttggcctacgtgggggcagtaccgcatagaggaattaaacaagttcgcacacactggcttctggaactcgtgaccacacgggggagcactgggcgcggactcagttataatttcacccatctggacggctacctggatctgctgcgagagaatcagctgctaccaggcttcgaacttatgggctcagctagcggccacttcacagattttgaggacaagcagcaggtattcgaatggaaggatctcgtatcatccctcgcacgacgatacatcggacggtacggtttggcgcacgtgtcaaaatggaactttgagacatggaacgagcctgatcaccacgatttcgacaacgtgagtatgaccatgcagggatttctgaactattatgatgcgtgttcagaagggctgcgggccgcaagtccggcccttcggctgggaggacctggggattcctttcatacccctccacggtcccctctttcatggggactgctgaggcactgccacgacggtaccaattttttcaccggcgaggccggggtgagactggattacatctccctccacagaaaaggcgcgagaagtagcataagcattctggagcaagagaaggtagtggcccagcaaatccgtcagctgttccccaagttcgccgatactccgatttataacgatgaggcagatcccttggtagggtggagtctcccacagccttggagagcagatgtcacatacgctgcgatggtcgtaaaagtcatcgcacaacatcagaatcttctgcttgcaaatactacctctgcctttccatacgccctgctaagtaatgacaatgccttcctctcctatcatccccacccatttgctcaaagaaccttgacggcgcggttccaggtaaacaacactcggccaccccacgtgcaactacttagaaagccagtactcaccgccatgggcctgctggcactgctggatgaagaacagctttgggcagaagtcagccaggccggcaccgttctagattccaatcacacagtgggcgtgctggctagcgcacaccggccgcaaggtccagctgatgcttggagagcggccgtcctgatctacgcaagtgatgacacaagggcacatcccaacagaagtgtcgcggtgaccttaaggctgcggggcgtgcctccaggaccgggcctggtgtacgtaactagatatctcgataacggcctctgctctcccgacggtgaatggagacggttgggacggcctgtgtttcctacagcagagcagtttaggcggatgagagccgccgaggaccctgttgctgcagcgcctaggccacttccagctggcggtcgccttacattgaggcccgcgctgagactgccttccctgttactagtacacgtgtgcgcccgccctgagaagcccccgggtcaggtgacaaggctgcgggcactgccattaacccaaggacagctggtgttagtgtggagcgacgagcatgtggggtccaaatgtctctggacctatgagattcagttctctcaagacggcaaggcctacacgcctgtatcccgcaaacctagcaccttcaatctgttcgtattcagtccagatacaggggctgtttctgggtcttaccgtgtgcgtgccctggattattgggcccggcccgggccctttagcgaccctgtgccttatctcgaggttcccgtgcctaggggccccccctctccaggcaatccg

SEQ ID NO: 13894 - DNA, 1959 bp, synthetic construct
  misc_feature 1..1959: note = source = /note="Description of Artificial Sequence: Synthetic coding sequence"
  source 1..1959: mol_type = other DNA
atgagaccattaagacctagagcagcattattagccttacttgcaagtttacttgcagctccaccagttgcaccagctgaagcaccacatttagttcatgtagacgctgctagagctctttggccattacgtaggttttggcgtagtactggattttgtccaccattaccacattcccaagctgatcaatatgttctttcatgggaccaacaattaaaccttgcttatgttggagctgttcctcacagaggtattaaacaagttagaacacattggcttcttgaattagtaacaacaagaggttcaacaggaagaggattatcatataattttactcatcttgatggataccttgatctacttagagaaaatcaattattgccaggttttgaacttatgggatctgcatctggacattttactgattttgaagataaacaacaagtttttgaatggaaagatcttgttagttcattagctagaagatatattgggagatatggattagcacatgtaagtaaatggaatttcgaaacatggaatgaaccagatcatcatgattttgataatgtttcaatgaccatgcaagggtttcttaattattatgatgcatgtagtgaaggattaagagcagcaagtccagctttacgtcttggtggaccaggagattcatttcatactccaccacgttcaccattgtcatgggggcttttgagacattgtcatgatggaacaaattttttcactggtgaagctggagttagattagattatatttcattgcatagaaaaggtgctagaagttcaattagtatacttgaacaagaaaaagtagttgcccaacaaattcgtcaattatttccaaaatttgctgatactccaatttataatgacgaagcagatccacttgttggatggagtcttccacaaccatggagagcagatgtaacatatgctgcaatggttgttaaagtaattgctcaacatcaaaatttactcttggcaaatactacaagtgcatttccttatgctttactttctaatgataatgcttttttatcttatcatccacatccatttgcacaaagaacattaactgctcgatttcaagtcaataatacaagaccaccacatgttcaattgttacgtaagccagttcttacagcaatggggttattagctttattagatgaagaacaattatgggctgaagtttcacaagccgggaccgtattagattcaaatcatacagtaggggtacttgcatcagctcataggcctcaaggaccagcagatgcttggagagcagctgtacttatttatgcttccgatgatactagagctcatcctaatagatcagttgcagtaacattaagattaagaggagtaccaccaggaccaggattagtttatgttacaagatatcttgataatggtttatgtagtccagatggagaatggagaagacttggaagaccagttttcccaacagctgaacaatttagaagaatgagagcagctgaagatccagtagctgcagcacctagacctttacctgctggtggtagattaacattgagaccagcattacgtttaccatcattacttttagttcatgtttgtgctagaccagaaaaaccacctggtcaagtaactagacttagagcattaccacttacacaaggacaattagtgctagtttggagtgatgaacatgtaggaagtaaatgtctttggacatatgaaattcagtttagtcaagatggaaaagcttacactccagtcagtagaaaaccatcaacatttaatctttttgtattttctccagatacaggtgcagttagtggatcctatagagtaagagcacttgattattgggcaagaccaggaccattttcagatccagttccatatttagaagtaccagtaccaaggggacctccatcaccaggaaatcca

SEQ ID NO: 13895 - DNA, 1959 bp, synthetic construct
  misc_feature 1..1959: note = source = /note="Description of Artificial Sequence: Synthetic coding sequence"
  source 1..1959: mol_type = other DNA
atgcgacctctgcgcccacgagccgcattgctggcactgctggcctcgttgctggcggccccgcccgtggccccggcagaggcaccccatcttgtgcatgtggacgccgcccgcgccctgtggccacttagaagattctggcgatcgactggattctgcccaccgctgcctcattcccaggcggaccaatacgtcctgtcgtgggaccagcaattgaatcttgcctacgtgggggcggtgccacaccggggaatcaaacaagtcagaacccactggctgctggagctggtgactacccgcgggtctactggaagaggcctgtcgtacaacttcacgcatctcgacggatacctggacttgctccgcgagaaccagctcctcccgggtttcgaattgatgggatcagcgtcgggccacttcacggacttcgaggacaaacaacaggtgtttgaatggaaggaccttgtctcgtcgctggctaggcgctacattggacggtacgggctcgcgcacgtgtcgaagtggaatttcgaaacctggaatgaacccgatcatcacgacttcgacaatgtgagcatgactatgcagggtttccttaactactacgatgcatgctccgaaggactgagagccgcctccccagccttgaggttgggaggccccggcgactcctttcacacccctcctagatcgccgctgtcatgggggcttctccgccattgccacgacggaaccaacttctttaccggagaagcgggagtcagactcgattacatttcgctccaccggaagggcgcccgctcctcaatctccatcctcgaacaggagaaggtggtggcgcagcagatccggcaacttttccctaagttcgctgatactccgatttacaatgacgaagccgatccgctggtgggctggtcccttccgcagccgtggcgggcggatgtgacctacgccgcaatggtcgtgaaagtcatcgctcagcaccaaaaccttctgctggccaataccacttccgcatttccgtacgcactgctgtcgaatgataacgctttcctctcgtaccacccgcatcctttcgcacagcgcaccctgaccgctcggtttcaggtgaacaacacccggccgccgcacgtccaactgctgcggaagccggttttgacggccatgggtctgctggcgctgctggatgaggagcagctgtgggccgaagtgtcacaggccggaaccgtgctggatagcaatcacactgtgggcgtgctcgcttctgctcacagaccccagggccctgcggacgcctggcgggccgctgtcctcatctacgctagcgacgatacccgcgcgcatccgaaccggtcggtggctgtgaccttgcgccttcggggagtgccacctggacctggtcttgtctacgtgactagatacctggacaacggactctgctccccggacggagaatggcgccggctgggacggccagtgttccctacggccgaacaattccggaggatgcgggccgctgaagatcctgtggcggctgcgcctcgccctttgccggcgggaggacggttgacccttcggccggctctgcggctcccatcactcctccttgtgcacgtgtgcgcgcgcccagaaaaaccgcctggacaggtgactcgcctgcgcgcgttgccactgactcaagggcagctggtgcttgtgtggtccgacgagcatgtggggtcaaagtgcctgtggacctacgaaatccagttctcccaggatggtaaggcctacactccggtgtcgcggaagccgagcactttcaacctgttcgtgttcagcccggacaccggggccgtcagcggctcgtaccgggtgcgggctctggactactgggcgcgcccgggaccattctcggacccggtgccctatctcgaagtgccggtgccgcgcggtcctccatcaccagggaatcct

SEQ ID NO: 13896 - DNA, 1959 bp, synthetic construct
  misc_feature 1..1959: note = source = /note="Description of Artificial Sequence: Synthetic coding sequence"
  source 1..1959: mol_type = other DNA
atgcggcccttgagaccacgggctgctctgcttgccctgctggcatctttgcttgcagcccctcctgtcgccccagctgaggctccacacctggtgcacgtcgacgccgcccgcgccctttggccactcagacgcttctggagaagcactggcttctgtcccccgctaccacattcacaggcggaccagtatgtactgtcttgggaccagcaacttaatctcgcctatgtcggcgcggtaccccacagggggatcaagcaggtaagaactcactggctccttgaactggtgaccactagagggagcaccggacgcgggttgtcttacaactttacacatctggacggttacctggacctccttcgagaaaatcagctccttcctggttttgagctcatgggatcagccagtggtcactttacagacttcgaggacaaacagcaggtgtttgagtggaaagatcttgttagttctttggcccggaggtacataggtcggtatggcctcgcccacgtcagcaagtggaacttcgagacctggaacgagccagaccaccacgacttcgataatgtatccatgactatgcaaggctttttgaactactacgatgcttgctctgagggcctgcgcgcagcgtctccggcgcttcggctcggtggcccaggggatagttttcacactcccccccggagtccattgtcttggggtctcctccgtcactgccacgacgggacgaactttttcacgggtgaggctggcgttcgcctcgattacatctctctccatcgcaagggtgccagatcgtccatcagcatccttgaacaggagaaggtggtcgcacagcagatcaggcaacttttcccaaaatttgctgacactcctatctataacgacgaagcagatccactagtgggctggtcactcccacaaccatggagagccgacgtgacgtatgccgccatggtggtcaaagtcattgcccagcaccagaatctcctgctcgcgaatacaacctcagcatttccgtatgccctcctatccaacgacaacgctttcttgtcataccacccgcacccgttcgcgcagagaacgctgacagctcgatttcaagtgaacaatacaaggccacctcacgttcagctgctgagaaagccggttttgacagcgatggggctgcttgcactgctggacgaggaacagctatgggccgaagtttcccaggccggcaccgtgctggatagcaatcacaccgtcggagtgctcgcttctgcccaccgcccccaggggcccgccgacgcatggcgcgcggccgtgctgatatacgctagcgatgacactagggcacatccaaaccgctccgttgctgtcaccttgagattgaggggagtgccacccggccctggtttagtgtatgtcactaggtacctcgacaatggcttgtgctctcctgacggtgagtggcgcaggctggggcgccctgtcttcccaacagctgaacagttcagacgaatgcgagccgccgaagatccagtcgccgccgcaccccgccccttacccgccggagggcgcctgactctcagaccagcactacggctgccctctctgctgctggtccatgtgtgcgccagacctgaaaaaccgcccggccaagtgacaagacttcgagctctccccctcacccagggacaattggttctggtttggagcgatgagcatgtgggctctaagtgcctttggacctacgagattcagttttcgcaagatgggaaggcatatacacctgtgtccaggaagccatcaaccttcaatttgttcgtttttagcccagataccggtgctgtgtctgggagttatcgcgttcgggctctcgattactgggctaggcctgggcctttttccgaccctgtgccatacctcgaagtgcccgttcctcgagggcccccatcgcccggaaatccc

SEQ ID NO: 13897 - DNA, 1959 bp, synthetic construct
  misc_feature 1..1959: note = source = /note="Description of Artificial Sequence: Synthetic coding sequence"
  source 1..1959: mol_type = other DNA
atgcgcccgctcaggcctagagccgcattgcttgccctcctcgcctcgctgcttgcggccccgccggtggcgccagccgaggccccgcatctggtgcatgtggacgcggcccgcgccctttggcccctgagacgcttctggcggtcgactggcttttgtccgcctctgccgcattcccaagccgaccagtacgtgctctcctgggaccaacaactgaacctggcatacgttggagcagtaccgcatcgcgggatcaagcaagtgcgaacccattggctcctggaactcgtcactactcggggatcaaccggtaggggactgtcgtacaacttcactcatctggacggctacctggacctgctgcgagaaaaccagcttttgccgggtttcgaactcatgggctcggcctccggacacttcaccgacttcgaggataagcaacaagtgttcgagtggaaagaccttgttagctcattggctagaagatatatcggtaggtacggtctggcgcacgtgagcaagtggaattttgagacttggaatgaacctgatcaccacgactttgataatgtctccatgactatgcagggatttctcaattactacgacgcttgctccgaaggattgagggccgcgtcgccggcgctccggctgggaggcccgggggactcctttcacacgcccccacgctcaccgctgagttggggactgctccggcactgccacgacggcactaacttcttcaccggggaggcaggtgtccggttggattacatatcgttgcatcgaaaaggggcacggtcatccatctcaattctggaacaggaaaaggtggtggcccaacagatcagacagctcttccctaagttcgctgacacgcctatctacaacgatgaggccgaccccctcgtgggatggtcgctgccacagccatggagagcggatgtgacctacgcagccatggtggtcaaggtcatcgcgcagcaccagaacctcctcttggcaaacaccacttcggcgttcccatacgctctgctctccaacgacaacgcattcctgtcttaccacccgcatccgttcgcccagaggacgctgaccgctcgcttccaggtgaacaataccaggccgccgcacgtgcaactgctcaggaaaccagtcctgactgcgatgggacttctggcgcttttggacgaagagcaactgtgggcggaggtcagtcaggccggaaccgtcctggattccaatcacaccgtgggcgtgctcgcgagtgcacacagaccgcaggggccggcagatgcatggcgggctgccgtgctgatctatgcatcagatgatactcgtgcccaccccaatagatcagtggctgtgactctgcggctgcgcggggtcccgcctggaccgggcctggtgtacgtcacccggtacctggacaacggtctgtgctcgccggacggagaatggcgccggctgggacgccccgtgttccctactgctgagcaattccggagaatgagagcagcggaagatcccgtcgctgccgcgccaagaccacttccagctggaggtcgcctgactctcagaccggcgctgagacttccttcattgctgctggttcacgtgtgtgcccgcccggagaagcctcctggtcaagtaactcggctgcgggccttgccgctcactcagggccagctggtgctcgtttggtcagacgagcatgtgggctcgaaatgcttgtggacgtacgaaattcagttctcacaggatggtaaggcctacacccctgtgtccagaaagccaagcactttcaacttgtttgtgttttccccggacacgggagcagtctcgggctcttatagagtgcgggccctcgattactgggcccgcccgggaccattctcggatccggtcccatacctggaagtgcccgtgccgagaggcccgccatctcccggaaatcca

SEQ ID NO: 13898 - DNA, 1959 bp, synthetic construct
  misc_feature 1..1959: note = source = /note="Description of Artificial Sequence: Synthetic coding sequence"
  source 1..1959: mol_type = other DNA
atgcgtccactgcgaccacgcgctgcactcctggcactgctggcaagtctgcttgccgcaccgccagtcgccccagctgaagccccgcatctggtgcatgtggacgcggctcgggcactctggccactgcgaaggttttggcgttcaacgggcttttgcccaccgctgccacattcgcaagcggatcaatatgtcttgagctgggaccagcagctaaacctggcttacgtgggagccgtgccccatcgcggaataaagcaggtacgcacccactggctgctggaactggtcaccactcgcggatcgactggccgtggcctgtcctataatttcacgcacctggatggttacctggacctattgcgggaaaatcagctcctcccgggcttcgagctcatgggaagtgcctcaggacatttcaccgattttgaggacaagcagcaggtctttgagtggaaggatctcgtttcctccctggcccgacgttatattggaaggtatggattggctcacgtgtcgaaatggaatttcgagacgtggaatgagccagaccaccacgactttgataacgtgagtatgacaatgcaaggattcctaaactactatgatgcctgctcggagggactgcgcgccgcttccccggctctgcgccttggaggtccgggtgacagcttccacacgccgccgcgctcgcccctcagctggggcctcctacgacattgccacgacggaaccaactttttcaccggcgaggcaggtgtgcgtttggattacatcagcttacaccgaaaaggcgcgcgcagctccatttcaatcctcgaacaggagaaagtcgtcgcccagcagatccggcagttgtttcctaagtttgcggataccccaatatacaacgatgaggcagaccctttggtgggctggtcgctcccccagccgtggcgagctgatgtcacgtacgccgcaatggtcgtaaaagtcatagctcaacatcagaatctcctgttggctaatactacatcagcctttccctacgccctgctcagcaacgataatgcctttctgtcctaccacccccacccttttgcccagagaactctgaccgctcgttttcaggtgaataatacccgaccgccgcatgtccagcttctccggaagccagttttgaccgctatgggcttgttggctttattggatgaggaacagctttgggctgaggttagccaggcgggaacggtattagactctaaccacaccgtgggagtcctggcgtccgcgcaccgtccccaaggccccgccgacgcctggcgtgctgcggtcctcatttacgccagcgatgacacgcgcgcgcacccaaacaggtctgtggcggtgaccctccggctgaggggagtacccccaggacccggcctagtctacgttacgcgctatctcgataacggcctgtgcagtccagacggcgaatggagacgcttgggccgacccgtttttccaacggctgagcaattccgtagaatgcgcgcagccgaagaccccgtggcggccgcgccaagaccgcttccagcaggtggtcgactcacccttcgacccgccctgcgactgccatcattgcttctcgtccatgtttgcgcccgccccgagaagccgcccggacaggtgacaaggttgcgggcgctgcccttgacgcagggtcagctggtgctggtctggagtgatgagcatgtgggttcgaagtgtttgtggacttacgaaatacaattcagccaagacggtaaggcatacacccccgtgagcaggaagccctctacattcaatctatttgtgtttagcccagacacaggtgcagtttccggcagctaccgtgtgcgagcgttggattactgggctaggcccggaccattctccgacccggtgccctacctggaggttcccgttccgcgcggtccgccaagccccggtaatccg

SEQ ID NO: 13899 - DNA, 1959 bp, synthetic construct
  misc_feature 1..1959: note = source = /note="Description of Artificial Sequence: Synthetic coding sequence"
  source 1..1959: mol_type = other DNA
atgcggccactccggccccgagcggccctcttggccttgcttgcaagtctgctcgctgcgcccccagtggcccccgctgaggcacctcacctcgtacatgttgacgcggcccgcgcactgtggccattgaggcgcttctggaggagtaccggcttctgtccaccactgcctcatagtcaggcagatcagtacgtgctcagctgggatcagcagctgaacctcgcttacgttggcgccgtgcctcacagagggatcaagcaggtgaggacccactggctgttggagctggtcacaacccgcgggtccaccgggcggggcctcagttacaacttcacccacttggatggctatcttgacctgctgcgagagaaccaactcttaccaggattcgaattgatgggatcggctagcgggcactttaccgactttgaggacaaacagcaggtattcgaatggaaggacctagtcagctcattggctcgcaggtacattggcaggtatggcctcgcccacgtgagcaagtggaatttcgagacatggaacgaacccgaccaccacgatttcgacaatgtgtcaatgaccatgcaggggttcctaaattattacgacgcttgttcggaagggctgagggcagcgagccctgctctgcgtctgggtggaccaggggactctttccacacgcccccccggtcgccgctgtcctggggcttacttcgacactgtcacgacggcaccaatttcttcactggggaagcaggggtaagactcgactatatcagtctccataggaaaggcgcccggagctctattagcatacttgagcaggagaaggtggttgctcagcagatccgccaactctttcctaagttcgcagatacaccaatttataatgatgaggcagatccgcttgtaggatggtctctcccacagccctggagggctgatgtgacttacgccgctatggtggtgaaggttatcgcccagcaccagaatcttttgctcgctaatacgacatcagcttttccctatgctcttctgagcaacgacaatgcgttcctcagttatcacccacatcctttcgctcagcgaaccctgacagccaggttccaagtcaataacacgagacctccacacgtgcaactgctgcgcaagccggttctcaccgcgatgggattactcgcccttctggacgaagaacaactgtgggccgaagtgtctcaagctggtacagtgctggattcaaatcataccgtgggcgttctggcttcagcccacagacctcaaggccctgccgatgcttggcgtgctgccgttttaatctacgctagtgatgatacccgagcgcatcccaacagatctgtggcagttacactccggctacgcggggtgccaccaggaccagggctggtttacgtgacccgctatctcgataacggactgtgcagcccggacggagaatggcgaagactggggagacctgtcttcccaacagcagagcagttcaggagaatgcgcgctgccgaagacccagttgcagcagccccgcgcccgttgcccgccggagggcgtctgacgttgcgaccggcccttagattgccaagtctgctgcttgttcatgtatgcgcaagacccgagaaaccccccgggcaggtgactcgtctccgcgcactcccactcacacagggccagcttgtgctggtctggagcgatgaacacgtcggctcaaagtgcctttggacctacgaaatccagttctctcaggatggcaaggcttacactcctgtgagtagaaaaccaagcaccttcaacctgtttgtgttcagtcctgacacaggagcggtgtcaggatcgtaccgcgtccgggccctcgattactgggcccgcccaggccctttttcagacccagttccctatctggaggtcccagtaccaagagggcctccttcccccggaaatccc

SEQ ID NO: 13900 - DNA, 1959 bp, synthetic construct
  misc_feature 1..1959: note = source = /note="Description of Artificial Sequence: Synthetic coding sequence"
  source 1..1959: mol_type = other DNA
atgcgccccctcaggccaagagccgccctcttggctctgctggccagcctcctggcagcccctcccgttgctcctgctgaagcaccccacttggttcatgttgatgcagccagggccctgtggccacttaggaggttttggagaagtaccggtttctgcccccctctgcctcacagtcaagctgaccagtacgtgctgagttgggaccagcagcttaaccttgcctatgtaggcgcggtgccccatagaggtatcaagcaagtgcgcacccattggctgctcgagctggtaactaccagaggttcaactggtcgcggcttgtcttacaatttcacccacctcgacggatacctcgatttgctgcgcgaaaaccagcttctccctggcttcgagctgatgggaagcgcctcaggccacttcactgacttcgaagacaaacaacaggtgttcgagtggaaagatctggtctcttccttggctcgcagatacatcggaaggtacggcctggcccacgtgtcaaagtggaacttcgaaacctggaacgaaccagaccaccatgacttcgataacgtatccatgaccatgcaaggattccttaactactatgacgcgtgctcagagggcttgagggcagcaagccccgccctccgcttgggtggccccggcgacagctttcacactcccccaaggagcccgctgagctggggtcttctgagacattgtcatgatggcactaacttcttcaccggagaagccggagtgcgcctggattacatctccctgcacagaaagggcgctcgcagctccatcagcattctggagcaggagaaggtcgtcgcacagcagatcaggcagctcttcccaaaatttgctgatactccgatttataacgacgaggctgaccccctggtgggctggtcccttcctcaaccctggagggctgacgttacctatgcggctatggtagtcaaagtcatcgcccagcatcagaatttgcttcttgcaaacaccactagcgcttttccctacgcactgttgtcaaacgacaatgcctttctgtcataccacccccaccccttcgcccagaggaccctcaccgccaggtttcaggttaacaatactaggcctccgcatgttcaacttctgagaaagccggtactcaccgctatgggactgctggccctgctcgacgaagaacaactgtgggcggaggtcagtcaggccggcactgtgctggatagtaatcatacggtgggcgtcctcgcttctgcccatcgccctcagggtccggcagatgcatggcgcgccgccgtactcatctacgcctccgacgataccagggcccaccccaatcgctcagtggctgtcacgctccgcttgcgcggcgtgccccccggaccaggtctggtgtacgtgactcgctacttggacaatggtctgtgttccccagatggtgagtggagacgcctgggtcgcccggtctttccaaccgccgagcagtttaggagaatgagggccgctgaggatcctgttgctgcagccccgcgccccctcccagctggcggaaggttgacactcagacctgctctgagactcccaagcctcctcctggtgcatgtgtgcgcaaggcccgagaaaccacctggacaagtgaccagacttagggcactgccactcacccaaggccagctcgtgcttgtttggtcagacgaacacgtcggttccaaatgcctgtggacctacgaaatacagttctcacaggacggcaaggcctacacccctgtgtccaggaagccaagtactttcaacctgttcgtgttttctcccgacacgggtgccgtgagcggctcctatcgcgtgcgcgctcttgattactgggctcgccccggacctttctccgacccagtgccttacttggaggttcccgtcccgcgcggacctccttcccctggtaacccc

SEQ ID NO: 13901 - DNA, 1959 bp, synthetic construct
  misc_feature 1..1959: note = source = /note="Description of Artificial Sequence: Synthetic coding sequence"
  source 1..1959: mol_type = other DNA
atgcgtcctctccgcccccgggcagcccttctcgctcttctggcgtcccttcttgcagctccaccagtggcacctgcagaagctccccatctcgtgcatgtggacgcagcgcgcgccctctggccgctccggaggttttggcggtcgactggattctgccctcctctgccacattctcaagccgatcaatacgtgcttagctgggatcagcaactgaaccttgcatacgtgggggcagtgccgcaccgcggaatcaagcaggtgcgcacccactggctccttgagctggtcacgactagaggctcgaccgggcgcggactcagctacaacttcacccatctcgatggttacctggacttgcttagagaaaatcagctgttgcctggttttgaactgatgggatccgcgagcggtcattttacggacttcgaggacaaacagcaggtgtttgagtggaaggatctcgtgtcgagccttgctcgccgttacattggccgctacgggttggcacatgtctcgaaatggaattttgaaacctggaatgaacctgatcatcatgactttgataatgtgtcaatgaccatgcaaggtttcctgaattactacgacgcgtgtagcgaaggactgcgagcagcatcgccagcactcagactgggaggtccgggtgactcctttcatactccacctcgctcgcctctttcgtggggacttctccggcattgtcatgacggcaccaatttctttaccggagaggcaggagtgcgcttggactacatttcgctgcatagaaagggtgcgaggtcgtcgatctccattctggaacaggagaaggttgtcgcgcaacagataagacagcttttccccaaatttgcagatactccaatttacaacgatgaagctgatccacttgtggggtggtcactcccacagccttggagagcagatgtgacctacgcagcgatggtggtgaaggtgatagcccaacaccaaaatctcctccttgcaaacacgacttcggctttcccctatgcccttctgagcaacgataacgcattcctctcgtaccatccccaccctttcgcacaacgcactctgaccgcacggtttcaggtcaacaacactaggccaccacatgtgcagcttttgcgcaaacctgtgctcaccgcaatgggactgctggcactgcttgatgaagagcaactttgggcagaagtctcgcaagccggtaccgtgctggactcaaaccatactgtgggagtgcttgcatccgcacatagaccccaaggtcctgctgatgcatggcgggctgcagtcctgatttacgcctccgacgacaccagagcccaccctaatcgctcagtggccgttacccttagactcaggggagtgcctcctggcccaggactcgtgtacgtgactcgctaccttgataatggactctgctcgcctgacggtgagtggcgacggctgggtagaccagtgtttcccactgcggagcagtttcggcgcatgagggcggcagaggatccagtcgcggccgcgcctaggcctctgccggcaggcggtagacttacgctgcggcccgccctgaggctgccatccttgttgcttgtgcatgtgtgcgcgcgtcccgaaaaacctcctggacaggtcacccgccttagagcacttccacttactcaaggacagcttgtccttgtgtggagcgatgaacatgtgggttcgaagtgcctgtggacctatgaaattcaattttcacaggatggaaaagcatacacccctgtctccaggaagccgtccacctttaatctttttgtgttttcccccgacaccggagcagtctctggaagctacagagtgcgggcactggattattgggccaggccaggaccctttagcgatccagtaccataccttgaagtcccagtgccacgaggccctccatcacccggaaacccc

SEQ ID NO: 13902 - DNA, 1959 bp, synthetic construct
  misc_feature 1..1959: note = source = /note="Description of Artificial Sequence: Synthetic coding sequence"
  source 1..1959: mol_type = other DNA
atgaggccacttcgtcctcgggcagcactgttagcactccttgcttccctgttagctgctccccctgtcgctcctgcggaagctcctcacctcgtccacgtggacgccgccagagccctttggccactgagacgattttggcggtctacgggattttgtcccccactgccccacagccaggctgatcaatacgtcctgagttgggatcaacagttgaacttagcatacgtgggggccgtgccccatcgcggcattaagcaggtcagaactcattggctgctggagctggttaccacacgcgggtctactggacggggattatcatataactttactcatcttgatggctacctggatcttctgagagaaaatcagcttttgcccggcttcgagttgatgggctcggcgtccggacactttacagactttgaggacaaacaacaggttttcgaatggaaggacttggtttcttctttggcccggaggtacatcgggcgttatggcctcgctcacgtttccaagtggaactttgaaacgtggaacgaaccagaccatcatgattttgataacgtgtcaatgacgatgcaggggtttttaaactattacgatgcttgtagtgagggcttacgcgctgcttccccagctctgaggttaggtggcccgggcgatagcttccataccccgcctaggtctcccctgagctggggactgctgagacactgccacgacggtacaaacttctttacgggtgaggcaggagtacgtcttgattatatctctctgcacaggaaaggagctaggtcctctatctcaattctggagcaagagaaggtggtcgcccaacaaatccggcagcttttccctaaatttgctgatactccaatttataatgacgaggcagatccactggtgggttggagtttgccacaaccatggagggccgatgtcacatatgccgctatggtcgtgaaggtcattgcccagcaccagaacttactccttgctaacacaacatctgcctttccttatgcactcctgagcaacgacaatgctttcctaagttaccatcctcatccattcgctcagcgtactctcacggctaggttccaggtgaacaatacccggcccccgcatgtccaactcttgcgaaagcccgtactaaccgctatgggcctgcttgctctgttggacgaggaacagctctgggccgaggtgagccaggctggaacggtactcgattcgaaccatacagttggtgttctggcctcagctcatcgcccccagggccccgcagacgcatggcgggcggcagttctgatatatgcgtcggatgatacccgggctcatcctaaccggagcgtcgccgtaaccctcagactgcgaggggtgccgcccggcccaggcttagtttacgtgactcgataccttgacaacggcttgtgtagtcccgacggagagtggaggagactcgggagacccgtcttccctacagccgagcagttcaggaggatgcgggctgcagaggacccagtggccgcagcaccaagaccacttcccgcaggtggccgtctgaccttacgcccggcattgcggttaccctctcttctcctcgttcacgtgtgcgctcgaccggagaaaccacccgggcaggttactagactccgggcgctgcctctgacacagggccagttggtgctggtctggtccgatgaacacgtaggcagcaaatgtctctggacgtacgagattcagttttcacaagatggcaaggcatacacacccgtttccagaaaacctagcacttttaacctgttcgtcttttcaccagatacaggggctgtcagtggatcttatagagtccgggccctagactactgggcgagaccaggccccttcagtgatccagtgccatatttagaggtcccagtccctagggggccgccctcaccaggtaaccct

SEQ ID NO: 13903 - DNA, 1959 bp, synthetic construct
  misc_feature 1..1959: note = source = /note="Description of Artificial Sequence: Synthetic coding sequence"
  source 1..1959: mol_type = other DNA
atgcggccgcttaggccccgcgccgccctcctggcactgctggcatcccttttggcagctccaccagtggctcctgcagaggcacctcacttggtgcatgtggatgcagcaagagcactgtggccgctgcggagattttggcgaagcaccggattctgtccaccacttccacattcccaagccgatcagtacgtccttagctgggatcagcagctcaatttggcttacgtcggggcagtccctcatcggggaattaagcaggtgagaacccattggcttctggagttggtgactactcgtggttcgaccgggcggggactctcatacaacttcactcatctggatggttaccttgaccttctgcgtgaaaatcagcttcttccgggatttgagctgatgggttcagcctcggggcattttactgacttcgaagataagcagcaggtctttgaatggaaggatctcgtgtcgtcactggcgaggagatatatcggacggtacgggctggcacatgtgtcgaagtggaactttgaaacttggaatgagccggatcatcacgattttgataatgtgtccatgaccatgcagggtttcctgaactactacgacgcatgcagcgaaggactccgtgcggcctcgcccgcgctgcgactcggcgggccaggtgattcattccacactccacctcggtcaccacttagctggggattgctgagacattgccatgacggtaccaacttctttacgggcgaagcaggggtcaggttggactacatctccttgcatcgtaagggtgcaagatcgtcaattagcatcctggagcaagagaaggtggtggcgcaacagattaggcaactttttcctaagtttgcggacactcctatttacaacgacgaagcagatcccttggtgggctggagcctgccccaaccgtggcgtgcagatgtcacttacgccgcaatggtcgtgaaggtgatcgctcaacatcagaatcttttgctcgccaataccacctccgctttcccgtacgccctcctctcgaacgacaatgcgtttctgagctaccaccctcaccctttcgcccagcgtactctcaccgcaagatttcaagtcaacaacactaggcctcctcatgtccaacttcttcggaaacctgtgctgactgcaatgggccttcttgcccttcttgatgaggagcaattgtgggccgaggtttcgcaggcgggaaccgtccttgactcgaaccatactgtgggagtccttgcttcggcacaccgcccccaagggccggctgatgcatggcgagcagcagtgttgatttatgcatccgatgatacccgagcacaccccaataggagcgtcgcagtgaccctcagacttagaggagtgccgcctggacctgggctggtgtacgtcacgcgttacctcgataatggtctttgttcaccagatggagagtggcgtagacttggtcggcctgtgttccccaccgcagagcaattccgtcggatgcgcgcggcagaagatcctgtggctgccgcccctcggcctctgcctgccggaggcaggcttactctgcgccccgcgctcaggctcccatcgctcctcctggtccatgtgtgtgctcgaccagaaaagccaccaggtcaggtcacccggctcagagcacttcctctgacccagggacagcttgtgctggtgtggagcgacgaacatgtgggttccaaatgtctttggacttacgaaatccaattctcgcaagacggtaaggcctacacccctgtgtcgagaaagccctccacctttaacctctttgttttctcccctgataccggggcagtgtcgggatcgtacagagtgcgggcactggactactgggcaaggcccggtccattctcagatccggtgccttacctcgaagtgcccgtgcccagagggccgccatcaccaggaaaccca

SEQ ID NO: 13904 - DNA, 1959 bp, synthetic construct
  misc_feature 1..1959: note = source = /note="Description of Artificial Sequence: Synthetic coding sequence"
  source 1..1959: mol_type = other DNA
atgcgacccttacgcccccgggccgccctgctcgccctattagcatccctgctggcggctccacccgtggctccagcagaggccccgcatctcgttcacgtagatgccgccagggcactatggcctctgcgcagattctggcggtcaaccggcttttgtccaccgctaccccattcacaggccgatcaatacgtgttgagctgggaccagcaactcaacctagcgtatgtgggggcagtgccacaccgcgggatcaaacaggtacgcacccactggctactagagctggtaaccaccagggggtcaaccgggcgcgggctttcatacaacttcacacacttggatggctaccttgatcttttacgggagaatcagcttttaccgggctttgagcttatgggcagtgctagcggtcattttacagacttcgaagacaaacagcaggtgttcgagtggaaggacctggtatccagcctggctagacgatatataggacggtatggccttgctcacgtgtcaaagtggaatttcgagacatggaatgaaccagatcaccacgactttgataatgttagcatgaccatgcaggggttcctgaactattatgatgcctgctccgaaggtctgagggccgcatcccctgcactgagattgggaggcccaggcgactcttttcatactcctccgcggtcaccattaagttggggcctgctgcgccattgtcacgacggcactaactttttcaccggggaagcgggagtacgcctcgactatatatcactccacagaaaaggcgcccgttcttccatttccattctggagcaggaaaaggtagtagctcagcaaatcagacagctgttccccaaattcgccgacaccccgatctataacgatgaggccgaccctcttgtcgggtggtccctgccacagccgtggagagcagacgtgacctatgcagccatggttgtcaaggtcatcgcccagcatcagaatctgctcctggctaataccactagcgcctttccttacgccctgctgtccaacgacaacgcgttcctttcttatcatcctcacccattcgcgcagcggacactaaccgcaagattccaggtcaataatacaagacccccacatgtgcagttgctcagaaaaccagttctgactgctatggggctactcgccttactcgacgaggagcagctgtgggccgaagtttcccaggcaggaacagtcctcgactccaatcacacggttggcgtcttggcgtcagctcacaggccgcagggacctgccgatgcttggcgggcagccgtgcttatttatgccagtgacgataccagagcccacccaaaccgcagtgtggccgtcaccctgagactgaggggcgttcccccaggtcctgggctggtgtacgttacaagatatctggataatggactgtgctctcccgacggtgaatggaggagactgggccgacctgtgtttcctactgctgagcagttccgacggatgagggcagctgaagacccagtggcggctgcccctagacccctgcccgctggcggaaggctgactctgcggccagccctgcgcctccctagtctgttgttggtgcatgtctgcgcccgacccgaaaaaccccctggccaggtaacacgacttcgagctcttccgctgacacagggtcagctcgtgctagtttggtctgacgaacacgtgggcagtaaatgcctgtggacttacgaaatccaattctcccaggacggaaaagcctacacgcccgtgtcgcgaaagcccagtacttttaacttgttcgtgttctcccccgacaccggtgccgtcagtggctcatatagagttagagcactggattactgggctagacccggcccattttcagaccctgtaccatatctcgaggtgcccgtgcctcgggggccccctagccccggcaaccca

SEQ ID NO: 13905 - DNA, 1959 bp, synthetic construct
  misc_feature 1..1959: note = source = /note="Description of Artificial Sequence: Synthetic coding sequence"
  source 1..1959: mol_type = other DNA
atgcgcccccttcgtccgagagctgcacttcttgccctgctcgcaagcctcctggcagcccctcctgtggcacccgcagaagcaccgcatctggtacacgtggacgcagcccgggcattgtggccattgcggaggttttggcggtccaccggcttctgccctccacttccacattcgcaagcagatcaatatgtgctgtcatgggaccagcagttgaatctggcttacgtgggagccgttccgcatagaggcattaagcaggtgcgcactcactggctgctggagctcgtcaccactcgtggatctaccgggagaggactttcatacaactttacccatctggacggttaccttgatctgcttagggagaaccagctgctcccaggatttgaactcatggggtcggcgagtggtcattttactgactttgaggacaagcagcaagtgttcgaatggaaggacctggtgtcatcgctcgcacgccgttacataggacgttacggcctggcccatgtgtcaaaatggaattttgaaacctggaacgagcccgatcaccatgatttcgacaacgtctctatgaccatgcagggattccttaactactatgatgcatgttctgaaggtctgagagctgcgagccctgcactgcgtctgggaggcccaggtgatagcttccatactccaccacgcagcccattgagctggggacttcttaggcattgccacgatggtactaatttctttaccggagaggccggcgtccggcttgactacatttcactccaccgcaaaggagcaaggtcctcgatctcaatactggaacaagaaaaggtggtggcccagcaaatcagacaactttttccaaaattcgcagatacccctatttacaacgacgaagcagatcctcttgtcggttggtccctcccccaaccctggagagccgatgtcacctacgccgcaatggtggtgaaggtgattgcgcagcatcaaaacctcctgcttgcaaacaccacctcggcatttccatacgcactcctgtcgaatgataacgctttcctcagctaccatccacaccccttcgcgcaacgtactctgaccgcacggttccaagtgaataacactcgccctccccatgttcaacttctgcgaaagcccgtccttaccgccatgggattgctggccctgctcgatgaagaacaactctgggcggaggtcagccaggcaggaactgtgcttgactcgaatcataccgtgggcgtcctcgcatcggctcaccggccgcaaggtccagctgatgcatggcgcgcagcagtcctgatctacgcctcggatgacactcgcgcccatccaaacaggtccgtggctgtcacccttcggctgagaggtgtgcctccaggaccgggactggtgtacgtgacgagatacctcgataatgggctgtgtagccctgatggagaatggaggaggttgggaaggcctgtgttccctacggccgagcagtttcgaagaatgcgggcagccgaggatccagtggcagcggctccacgaccacttccggcaggtggtagactgactctgcggccagcactcagactcccttccctgttgttggtccatgtttgcgcacgaccggaaaaacctcctggacaagtgacgagacttagggcacttcctctcacccaagggcaactcgtgcttgtgtggtccgatgagcacgtaggctcaaagtgcctgtggacctacgaaattcaatttagccaggacggtaaggcctacactccggtatcgcgcaagccctccacttttaacctctttgtcttttcccccgatactggcgcagtgtcgggctcgtacagagtcagagcgttggattactgggcaaggccgggaccattctcagatccggtcccatatctggaagtgccagtccctagaggaccgccatcccccgggaaccct

SEQ ID NO: 13906 - DNA, 1959 bp, synthetic construct
  misc_feature 1..1959: note = source = /note="Description of Artificial Sequence: Synthetic coding sequence"
  source 1..1959: mol_type = other DNA
atgcgcccactcagaccccgtgccgcacttctggctctgctggctagccttctggcggcacctccagtggccccggctgaagcacctcacttggttcacgtggacgccgcacgagcgttgtggcctctgagacggttttggagatcgactgggttttgtcccccactgccacattcgcaagcagatcaatatgttctctcctgggaccaacagcttaatcttgcatacgtgggcgcggttcctcatcgcggtattaagcaagtgagaacgcactggttgctggaactggtgactactagaggatcgaccgggagaggactgagctacaactttactcatcttgatggttaccttgatctcttgcgggagaaccaattgctgccaggattcgaacttatgggctccgcatccggccacttcactgactttgaagataagcagcaggttttcgagtggaaagatttggtgtcgagccttgcccgccgctacatcggcagatacggactggcacatgtgtcgaagtggaacttcgagacttggaacgagcctgaccaccacgattttgacaatgtcagcatgactatgcagggtttcttgaattactacgatgcatgttcagaaggtctgcgcgcagcgtcgcctgcactgagactggggggccccggggacagctttcatacgcctccaagaagcccactttcgtggggccttctcaggcactgtcacgacggcactaacttctttaccggagaagcgggagtcagactcgactacatatccttgcatagaaagggagccagatcaagcatttccatcctggagcaggagaaggtggtcgcccagcagattcgacagttgttcccgaaattcgcggatacccctatttacaacgatgaggcagatccactggtcggctggtcccttccccaaccttggcgcgccgatgtgacctacgccgcaatggtggtgaaggtgatcgcacaacaccagaatctcctgctcgctaataccacctccgccttcccatacgcccttctgtcgaacgacaatgcatttctctcctaccatccgcatccctttgcccaacgaacgcttacggccaggtttcaagtgaacaacacccgacccccgcacgttcagctcctgagaaagcccgtgcttaccgcgatgggactcttggcccttctggatgaggagcagctctgggcagaagtctcgcaggctggaacggtccttgactcgaatcataccgtcggagtgctggcatctgcccacagacctcaaggacctgccgacgcatggagagcagcggtgctgatctacgctagcgatgatactagagcacatcctaacagatcggtggccgtgactctccggctgcgtggtgtcccacccggacctggccttgtgtacgtgaccagatacctcgacaacgggctgtgttcacctgatggtgagtggcggaggttgggcaggcccgtgtttcctactgccgaacaattcagacgcatgcgcgcagcagaagatcctgtggcagcggcacccagaccacttccagcagggggcaggctcactctcagacctgcactcagactgccatccttgctccttgtgcatgtctgtgcaagacctgaaaaaccgccgggacaggtgacccggcttcgagccctcccactgacccagggtcaactcgtgcttgtgtggagcgatgagcacgtgggaagcaagtgcctctggacttatgaaattcaattttcgcaagatgggaaagcgtatacccctgtaagccggaagccttcaaccttcaatctgtttgtgttttctcctgataccggagctgtctctggttcgtacagggtgcgggcccttgactactgggcgaggccaggacctttctcggatccagtcccctatctggaggttcccgtgcctagaggccctcctagccctggaaatcct

SEQ ID NO: 13907 - DNA, 1959 bp, synthetic construct
  misc_feature 1..1959: note = source = /note="Description of Artificial Sequence: Synthetic coding sequence"
  source 1..1959: mol_type = other DNA
atgcgtcccctgcgccctcgcgcggcactactcgcgttgctggccagcctgcttgccgctcccccagtcgccccagctgaagccccacatctggtacacgtggacgccgcaagggcgctgtggccactgcggagattctggagaagtactggattctgtcctccattgccccactcccaagcagaccagtacgtgttgtcctgggatcagcagcttaatctggcttacgtgggcgccgtgccccataggggcattaaacaggtccgcactcattggctgttggaacttgtaacgacacgggggtcaaccggtcgtggtctcagctataatttcacacacctggacggatatcttgacctcctcagggagaatcagctgttgccaggattcgaacttatgggcagtgccagtggccacttcacggacttcgaagacaagcagcaggtcttcgagtggaaagatctggtatcctcattggcgcggcgatacatcggccggtatgggctagctcatgtttcaaagtggaacttcgagacctggaacgaaccggaccaccacgacttcgacaatgtgtctatgacaatgcagggattcctgaactattacgacgcttgtagcgagggtctacgagctgccagtcccgcccttaggcttgggggtcccggggatagcttccacacacccccacggtctccactttcgtggggcctgcttaggcattgccatgacgggacaaactttttcaccggggaagcaggggtacgcctggattacatcagcctccacaggaaaggagcccggtcttcaatctcaatactggaacaggagaaagtggttgctcaacagatacgccagctcttcccaaaattcgctgatactcccatatataatgatgaggcagatccccttgtcggctggagcctaccacagccgtggcgcgcggatgtgacttatgccgccatggtcgtcaaagtgatcgcgcagcatcagaacctattgctcgcaaataccaccagtgcgttcccttatgccctgctgtccaatgacaatgcgtttctgtcttaccaccctcacccttttgctcaacgtacactgaccgcccgcttccaggttaacaacacaaggcccccccacgtgcaacttctgaggaagccggtgctaacagccatggggctcttagccctgctcgacgaggagcagctctgggccgaagtcagtcaggcagggacagtgctcgattccaatcacaccgtgggtgtgctagcttcagcacataggccgcagggccccgccgatgcctggcgcgccgccgtgttgatttacgcttctgatgacacgcgcgcgcatcctaaccggtcagtggccgtgacactgcggctcagaggcgtccctcccggccctggcctcgtatacgtaacgcggtatttggataacggcttgtgcagccctgacggcgagtggcggagactgggtaggccagtctttcctacggcagagcaatttagacgaatgcgtgccgcagaagaccccgtggctgccgctccaaggcccctgcccgccggaggccggttaacactgaggccggccttgcggctcccctccctcctgttggtgcacgtatgcgcacgcccggagaaaccccctggacaggttacgagactccgagccctgccactcacccagggtcagctggtcctggtgtggtcagacgagcacgtcgggtcaaaatgcctgtggacctacgagatccagtttagccaggacgggaaggcctacacccccgtgtcacgcaagccatcaacttttaacctcttcgtcttttcccctgacacaggagctgtgagtgggtcataccgcgtgcgcgcccttgactattgggcacgacctggaccattcagtgatcctgtcccgtatctggaggtccctgtgccccggggccctccgtctccggggaatcca

SEQ ID NO: 13908 - DNA, 1959 bp, synthetic construct
  misc_feature 1..1959: note = source = /note="Description of Artificial Sequence: Synthetic coding sequence"
  source 1..1959: mol_type = other DNA
atgcggccattgcggccacgcgcagctttattggctttgctcgcatccctgttggctgcgccacccgtggcacctgcagaggccccccacttggttcacgtcgacgcagctagagctctgtggccactccggcgcttttggagatctaccggattctgcccccctctgcctcattcccaagcagatcaatacgtcctgtcctgggatcaacagttgaacctggcatacgttggagcagtgccccacaggggaatcaaacaggttagaacacactggctgctggaactggtcactacaaggggaagcaccggacggggcttgagctataacttcacacatttggatggttacctcgacctcttaagagaaaaccagctgctacccggctttgaactcatggggtctgccagcggccactttacagatttcgaggataaacaacaagtctttgagtggaaggatctggtgagcagccttgctagacgctacattgggaggtacggcctggcccacgtgagtaagtggaattttgaaacctggaatgagcctgatcaccatgatttcgataatgtcagtatgacgatgcagggatttctgaattattacgatgcatgtagtgaaggcctgagggcagcctctcccgcgctgcggctcggaggacccggggactcttttcacaccccgccaaggtctcctctgagctggggccttctgagacattgccatgacggcacaaacttctttaccggagaagctggcgtgcgcctggattacatcagcttgcacaggaaaggagctagatcttccatttccatactggagcaagaaaaagttgtggcgcagcagatccgccagcttttcccaaagttcgccgatactcctatctacaatgacgaggccgaccctctcgtgggatggtctctgcctcaaccatggcgagcagacgttacatatgccgccatggtcgtaaaagtgatcgctcaacaccagaacctgcttctggcgaacaccacctccgctttcccatacgctctgctttctaacgacaacgcattccttagctatcacccacatccttttgcccaaaggacactcacagctagattccaggtcaacaacaccaggcctccccacgtgcagctgctgcggaaacccgtgttgaccgccatgggcttgctcgcactcctggacgaggagcagctgtgggcagaagtcagccaagccggaactgtcttggactcaaatcataccgtaggagtcctggcttcagcccatagaccgcagggccctgcagacgcttggagggccgctgtgttgatctacgcatcagatgacactcgagctcatcctaaccgatccgtagccgtaaccctccgcttaaggggggtaccccccggtcctggcctggtttacgtcacaaggtatctggacaacggcctctgtagccctgatggagaatggaggcgccttgggcgaccagtctttcccaccgccgagcagttccgcaggatgcgcgctgcagaggatccagtggcagcagctccacgcccactgcctgctgggggacgcctcacactcagacccgccttgagacttcccagcctgcttcttgtgcatgtatgtgcaaggccggagaaaccacccggccaggtcacccggctgagggcattacccctgacccagggacagttggttctcgtgtggtccgacgagcatgtcggcagtaagtgtttatggacatacgaaatacaatttagtcaggatgggaaggcatatactcctgtatccagaaagccttcaaccttcaacctgtttgtctttagtcccgataccggcgccgtgagtggaagctaccgggtgcgcgctctggattattgggcaaggccaggcccctttagtgacccggtcccttaccttgaagtgccagtcccccgcggcccaccatcacctgggaatccc

SEQ ID NO: 13909 - DNA, 1959 bp, synthetic construct
  misc_feature 1..1959: note = source = /note="Description of Artificial Sequence: Synthetic coding sequence"
  source 1..1959: mol_type = other DNA
atgagacctttgcggccgcgagccgccttgctggccttattggcaagtttgttagcagcaccacctgtcgcacctgcggaagcgcctcatttagttcatgtggatgcggcccgcgcgttgtggccattgcggagattctggcgctctacggggttctgtccgcctcttccgcattctcaagctgaccaatacgtgctttcttgggatcagcaacttaatcttgcctatgtcggagccgtaccccaccgtggcattaaacaggtcaggacacattggcttttagaactagtaacaactaggggttctactgggagaggacttagttataacttcacacatttggatggatatctggatttactccgggaaaatcagctgcttcctggatttgagctgatggggtctgcgagtggccacttcacggattttgaagataaacaacaggtttttgaatggaaagatctcgtttcttctcttgcacgacgctacattggaagatacgggctggcgcacgtaagcaaatggaattttgaaacgtggaacgagcctgaccaccatgatttcgataacgtatctatgactatgcagggttttctgaactactatgatgcctgttcagaagggctccgagctgcttctcctgctttaagacttggcggtcctggggattcttttcatacccctcctcgttcccccttgtcatggggcttactgcgccattgccatgacggaacgaacttctttacaggcgaagcgggagtaagacttgattatatcagcctacacagaaagggcgctcgctcctcgattagcattctagaacaggaaaaagtagtcgcccagcaaatcagacaattgtttcccaaattcgcagatacaccgatttataacgacgaagcggatcctttggttggttggtccctcccacagccgtggcgcgctgatgttacgtatgccgccatggtcgttaaagtaatcgcccagcaccaaaatttgctcttagcaaacactacatccgcctttccgtatgcgttattgtctaatgataacgcgttcctctcatatcatccacatccgttcgcgcaaagaacacttacggcgagatttcaagtaaacaatacacgcccgccgcatgtccagttgcttaggaagcctgttctgacagctatgggtctcttagcgttgcttgacgaggaacagctctgggcggaagtgagccaagctggcacagttctcgactcaaatcataccgtgggggtcttggcgtcagcgcatcgcccgcaaggccccgcagatgcatggagggcggctgtcctgatttatgcgagcgatgatactagagcccatccgaatcggagtgtagctgttacactgcggctgcgtggagttccacctgggccgggactggtctatgtgacacgatacttagacaacggactttgctcgccggatggtgagtggcgcaggcttgggagacccgtattcccaacggcagaacagtttagacgtatgcgtgcagctgaagaccctgtagctgctgcaccgagaccgttgccagctggtggcagactgacattaagacctgccttgagattgccgtctctgctactagtccatgtttgcgcgcgccctgaaaaaccgccaggccaagtcactcgtcttcgtgcacttccgcttacacagggccaattggtgcttgtttggtctgacgaacatgtgggtagcaaatgtttgtggacgtacgagattcaattctctcaagatggcaaagcttacacaccggtgtctcgcaaaccttctacattcaatctttttgtcttctcaccagatacaggagcagttagcggctcataccgagtaagggcgttggattattgggcgcgtccgggcccgttttcagatccggtgccctaccttgaagtcccggtaccgaggggtccgccgagccctggcaaccct

SEQ ID NO: 13910 - DNA, 1959 bp, synthetic construct
  misc_feature 1..1959: note = source = /note="Description of Artificial Sequence: Synthetic coding sequence"
  source 1..1959: mol_type = other DNA
atgcgacctctgaggccccgagctgccttgttggctctcctggcctctctgctggccgcacctcccgtagcccccgctgaggccccccatcttgttcacgtcgacgccgcaagagccctttggcccttgcgccgcttctggagatcaaccgggttttgtcctcccctcccacacagccaggctgaccaatacgtcctctcatgggaccagcagcttaacctggcttatgttggtgccgtgccccaccgcggcatcaagcaagtgaggacgcattggctcctcgagcttgtgaccactagaggctccacagggcgcgggcttagctataactttacacacctggacggatacctggatctgctgagggagaatcagctgttgcctggttttgagctgatggggagcgcgtctgggcatttcacagactttgaggacaaacagcaggtatttgagtggaaagatttggtgagctcactggcacggagatatatcgggaggtacggactggctcacgtgagcaagtggaattttgaaacatggaacgagccggatcaccatgattttgataatgtctcaatgactatgcaaggcttcctgaactactacgacgcttgctcagaaggtctccgagccgctagccctgccctccgacttgggggccctggtgattccttccacacccctcccagatccccactctcttggggcctccttagacattgccatgacgggaccaactttttcaccggggaagctggagttaggctcgactatattagcctgcaccgcaaaggcgcccgctcatcaatctctattctggagcaggagaaggtggtggcgcagcagatcaggcagctctttcccaagttcgctgatacgcctatttataacgatgaggccgatcctctggtgggctggagtcttccccaaccctggagagctgacgtgacttacgcagctatggtcgttaaagtgattgctcaacaccagaacctcctgctggccaatacaacctcagccttcccctatgccctgttgagtaacgataatgcctttttgtcctatcatccgcaccctttcgcccagagaaccctgacggcccgatttcaggttaataatactagacctccgcatgtccagctcttgagaaagcccgtgctgaccgccatgggcttgctggccctcctcgacgaagagcagctttgggccgaagtgagtcaggcaggcacagtcctggacagcaatcataccgtcggcgtgctcgccagcgcccatagaccacagggccccgcggacgcttggagagcggcagtgctgatctacgcttctgacgatactcgagctcaccccaacaggagtgtggctgtcactctgaggcttagaggcgtgccacccggacccggtctggtttacgtcacgagatacttggacaatggtctgtgctcacctgatggagagtggcgacgactcggacgacctgtgttccccactgccgaacagttccgaaggatgagggccgccgaagatcccgtggctgctgccccaaggcccctgcctgcaggaggccgcctcacgctgagacccgctctgcgactgccttccctcttgctcgtgcacgtgtgtgcaaggcccgaaaaaccgccggggcaggtcaccaggttgcgggccttgcccctcacacagggccagctggtgctggtatggagcgacgaacatgtcggctccaagtgtttgtggacttacgagatacaattctcccaggatggcaaggcgtatacgcccgtctctcgcaaaccttcaacttttaatctgtttgtgtttagtcccgacaccggtgctgtgagtggttcatatcgagttcgggccctggactactgggctaggcctggtcctttctccgatcctgtgccatatttggaagtacccgttcctaggggacctccctctcctgggaacccc

SEQ ID NO: 13911 - DNA, 1959 bp, synthetic construct
  misc_feature 1..1959: note = source = /note="Description of Artificial Sequence: Synthetic coding sequence"
  source 1..1959: mol_type = other DNA
atgagaccactccggccgagggctgccctgctagccctgctagcatcattgctggcagcccctcctgtagctccagcagaggccccacacctcgtgcatgtggacgctgcacgggccttatggccgttaaggcgtttctggaggagcacaggcttctgtccgcccttgcctcacagtcaggctgaccagtatgtgctgagttgggatcagcagctgaatctggcctacgttggggctgtgcctcacaggggaatcaagcaagtaaggactcactggctgctggagcttgtgaccactaggggatccaccgggcgcggactttcatacaacttcactcacctggatgggtacctggacctgttgagggagaatcaattgctgccagggtttgaactgatgggcagcgccagcggtcactttacagacttcgaagacaaacagcaggtgttcgagtggaaggatctggttagcagcctggcacgtaggtacataggcagatatggcctagctcacgtctctaagtggaactttgagacttggaacgaacctgaccaccatgacttcgataatgtgagcatgacaatgcagggatttctaaattactacgacgcttgctcagaagggctgcgggcagcaagcccagcacttcgtctgggcgggcccggggacagtttccacacccccccacgtagccctctatcatgggggttactaaggcactgccatgatggtaccaactttttcacaggcgaggcaggagtacggctggattatatcagcctccatagaaaaggcgcgagaagttctatttctatcctggagcaggagaaggtggtggcacagcagattcggcagctgtttccaaagtttgccgatacccctatttacaatgacgaggctgatcctcttgtcggttggagcttgccgcagccatggcgcgccgacgtaacatacgctgctatggtggtgaaggtaatcgcacagcaccagaatctgttactggctaatacgacctccgccttcccttacgcattactaagcaatgacaacgccttcctcagctatcacccccatcctttcgcacaaagaactcttaccgcaaggttccaggtgaataacactcgcccaccacacgtgcagctactgcggaagcccgtgctgactgccatggggctcctggcgttgcttgatgaggagcagttgtgggccgaagtcagccaggcggggacagtcctggattccaaccacaccgtcggggtgctggcctctgctcaccgccctcaggggcctgcggacgcttggcgggctgcagtgcttatatacgccagcgacgacacgcgcgcccatcccaaccgttcagtcgctgtgactcttcggctgcgaggtgtgcctccgggcccgggcctggtgtatgtgacaagatacttggacaacggcctctgttccccagacggagaatggcgacgcctcggaagacctgtatttccaactgcggagcagttcaggagaatgcgcgccgctgaggatcccgtggcagcagcgcctcggccactgcctgcaggtggacgcctgaccctcaggcccgcgctgagactgccaagcctgctccttgtgcacgtgtgcgcccgaccagaaaagccccctgggcaagtcactcgcctgagggctctccctctgacccagggccaactggtgttggtgtggtctgacgagcatgtaggcagcaagtgcctctggacatatgagatacagtttagccaagatgggaaagcatacactccagtgtcgcggaagccttccacatttaacttattcgtctttagcccagatactggagctgttagtggatcataccgagtccgggcgctcgattactgggccaggcccggcccattctcggatccagttccctatctggaagtacccgttccccgtggcccaccctctccaggcaatcca

SEQ ID NO: 13912 - DNA, 1959 bp, synthetic construct
  misc_feature 1..1959: note = source = /note="Description of Artificial Sequence: Synthetic coding sequence"
  source 1..1959: mol_type = other DNA
atgcggccactgcggccacgtgcggctctgcttgcactcctcgcgtccctgctggccgcgccgcccgtcgccccggccgaggccccgcacctggtgcacgtggacgccgccagggccctgtggccgctgcgacggttctggagatccaccggattctgtcccccactgccgcactcccaggccgaccagtacgtcctgtcttgggaccaacagttgaatcttgcgtacgtgggtgctgttccccatcgcggtatcaaacaagtgcggacccattggctcctggaactggtgactaccaggggatctactggccgggggctctcctacaacttcactcacctcgacggatacctggatctgctccgcgagaatcaactgttgcccggattcgaattgatgggttcagcctcgggacattttaccgacttcgaggacaagcagcaagtgttcgaatggaaggacctggtatcaagcctcgcaagacggtacatcggtcggtatggactcgcccacgtgtcgaaatggaatttcgagacttggaatgagccggaccaccacgacttcgacaacgtctcgatgactatgcaaggctttctgaactactacgacgcctgcagcgagggactccgggcagcctcaccagctctgagactgggcgggccaggtgattcgttccacacgccccctagatcaccgctgtcatggggtttgctccgccactgccatgacgggaccaacttcttcactggggaagccggagtgcgcctggactacatctcgcttcatagaaaaggcgcacggtcctccatttcgatcctcgaacaagagaaagtcgttgcccaacagatccggcagctgttccctaagttcgccgacacccccatttacaacgacgaagccgaccctctcgtgggatggtcgctccctcagccgtggagggctgacgtgacctatgccgcgatggtggttaaagttatcgcgcagcatcagaacctgctgctggcgaataccacttcggcattcccttacgcactgctctccaatgacaatgcctttctgtcctaccacccccatcctttcgcccaacggacgcttactgcccgattccaggtgaacaatactaggccaccgcacgtgcagctgctgcggaagcccgtactgactgctatgggcttgctcgccttgttggacgaagaacagctgtgggcagaggtgagccaagcaggcaccgtcctggactcgaaccatactgtcggggtgctcgcttccgcccatcggccgcagggacctgcggatgcatggcgggcagcagtgctcatatatgcatccgacgacacccgggcgcacccgaaccgatcagtcgctgtgaccttgagactgagaggagtgcctcctgggccgggcttggtgtacgtcacccgatacctggataatggactttgctcccccgatggcgagtggcgcaggctggggcgccctgtgttcccgaccgcagagcagttcagaaggatgcgcgcggcggaagatccggtcgcagcggctccccggccactcccggctgggggtcgccttactctgcgccctgccttgcgccttccttcgttgctgctcgtgcacgtctgcgcacggcccgaaaagccgccaggccaggtcactaggctgagagccctccctctgactcagggccagctcgtcctggtctggtctgacgagcatgtgggatcgaagtgcctctggacctatgaaatccaatttagccaagatgggaaagcgtacactcctgtgtcacgcaagccatccacgttcaacctgtttgtgttctccccggatactggagcagtgtccggaagctacagagtccgggccctggactactgggccagaccgggacctttttccgatccggtcccgtacctcgaggtgccggtgcctcgcggaccgccgtccccgggtaatccg

SEQ ID NO: 13913 - DNA, 1959 bp, synthetic construct
  misc_feature 1..1959: note = source = /note="Description of Artificial Sequence: Synthetic coding sequence"
  source 1..1959: mol_type = other DNA
atgcggccgctgcgcccacgcgcggctctgctggcccttttggcaagccttctggccgcgccgccggtggcgcctgcagaagcgccacacttggtgcatgtggatgccgctcgggcgctctggccgctgcgtcgcttctggagatccaccggtttctgcccgccgctgccgcattcccaggccgaccagtacgtcttgtcatgggatcaacagctcaatttggcctatgtgggagcggtcccgcacaggggtatcaaacaagtgcggacccactggctgctcgagctcgtgactactagaggttcgactggcagaggtctgtcatacaattttactcatctggacggttacctggacctgctcagagagaaccaactgttgccggggtttgaactcatgggatcggccagcggacacttcactgattttgaggataagcaacaggtcttcgaatggaaggacctggtgtcctcactcgcccgtagatacattggaagatacgggcttgcacatgtgtcgaagtggaatttcgaaacttggaatgaacctgaccaccatgattttgacaacgtgtcgatgaccatgcagggatttctcaattactatgacgcgtgctcggagggacttagggcggctagcccggctctccgcctcggtggacctggagacagctttcacactcctccgcgatcccccctcagctggggccttctgagacattgccacgacggcaccaacttcttcacgggcgaggcgggcgttcgcctcgattacatctcccttcaccgcaagggggcacgctcgtcgatctcgatcctcgaacaggaaaaagtggtggctcaacagatccgtcagctgtttccgaagtttgccgacacccctatttacaacgatgaggctgaccctctggtgggatggtcgctcccacaaccttggcgcgccgacgtgacctacgcggccatggtggtcaaggtgatcgcccaacaccagaacctgctgctggctaacaccacgtccgccttcccttacgcccttctctccaacgacaacgccttcctgtcgtatcatccgcatccattcgcgcagcgcaccctgactgcccgcttccaggtgaataacacgcgcccgccgcacgtccagttgctcagaaagcccgtcctgacggcgatgggcttgcttgcactcctggatgaagaacagttgtgggccgaagtgtcgcaggcgggaactgtgctcgactctaatcataccgtgggagtgctggcgtcggcacaccggccgcagggaccggccgatgcgtggagggccgcggtcctgatctacgcatcagacgacaccagagcccaccccaaccgctccgtggcagtcacccttagactcagaggggtcccgccgggtccggggctggtgtacgtgacccggtacctcgacaacggactgtgcagcccggacggtgaatggcggagactgggacgcccggtgttcccgaccgccgagcaattccggcggatgcgcgccgcggaagatccggtggccgccgcaccacggccgttgccggcgggtggacgcctcaccctcagacccgccctccggctgccatcactgctgctggtgcacgtgtgcgcgcgccctgaaaagccaccgggacaggtgaccagactcagggccctcccactcactcagggacagctcgtgctggtctggtccgacgaacatgtcggttccaagtgcctgtggacctacgaaatccagttttcacaagacggaaaagcctacactccggtcagccggaaaccgtccactttcaacctgttcgtgttctcgccagacaccggagcagtctcagggtcctaccgcgtgcgggctctggactactgggcgcggccgggaccgtttagcgacccagtgccatacttggaggtcccggtgccgcgcggaccgccctcgcctggcaacccg

SEQ ID NO: 13914 - DNA, 1959 bp, synthetic construct
  misc_feature 1..1959: note = source = /note="Description of Artificial Sequence: Synthetic coding sequence"
  source 1..1959: mol_type = other DNA
atgcggccactgcgccctcgcgcggcccttctggcactcctggcaagcctcctggccgcaccacccgtggccccagcagaagcgccacacttggtgcatgtggatgcagcacgtgcactctggccgttgaggcgattttggagatcgaccggcttttgccctcctcttccacattcgcaagccgatcaatacgtgctgagctgggaccaacagctcaacctggcgtacgtcggtgcagtgccgcataggggaattaagcaagtgcgtacgcattggttgctggaacttgtgactacccggggatcaaccggacgagggctttcctacaacttcacccatcttgatggttatctggatcttctgcgcgagaaccaactgctgcctggttttgaactgatgggtagcgcatccgggcacttcactgattttgaagataagcagcaagtgttcgagtggaaagatcttgtgtcatcactggcaaggcggtacattggcagatacggacttgcacatgtgtccaagtggaacttcgagacttggaacgaacctgatcaccacgattttgataatgtgagcatgacgatgcagggctttctcaattactacgacgcatgttcggaaggacttagggcagcaagcccagctctgcgcctgggtggtcctggtgattccttccatactcccccacgatcacccctctcctggggacttctgcggcattgccatgacgggactaacttctttactggagaggcaggggtgagacttgactacatttcgcttcatcgtaagggcgccagatcctcaatttccatccttgaacaggagaaagtcgttgcccaacaaatccggcagctgttccctaagtttgcagatactccgatttacaatgacgaagcagacccccttgtgggatggtcactgccacagccatggcgcgcagacgtgacctacgctgcaatggtggtgaaagtgattgcccaacaccagaacctcctcctggcgaacaccacgagcgcgtttccctacgctctccttagcaacgataatgcgttcctgtcttaccatcctcatccattcgcacagaggacccttactgcgcgctttcaagtcaacaacaccagacctccacatgtgcagctcctgaggaagcctgtcctgaccgccatggggcttcttgcgcttcttgacgaagaacaactgtgggccgaagtctcacaagcaggtaccgtgctggattccaatcacacggtgggagttctggccagcgcacatagaccacaaggcccggcagatgcctggagggcagcagtgctgatttatgcatcagatgatacccgagcacatcccaaccggtcagtggcggtgaccctgagattgcgcggagtgcccccaggtccaggcctcgtgtacgtgactcggtacttggacaacggtctgtgctcccctgatggtgagtggagacgcctcggccgccccgtgttccccactgcggaacaatttcggcgtatgagagccgctgaagatccagtggcagctgcaccaagacccctgccggcgggtggacgacttactcttagacccgcgctgcgccttccgtcactcctgcttgtgcatgtgtgtgcaagaccagaaaagccacccggccaagtgactcgtctgagagcacttcctctcacccaaggccaacttgtgcttgtctggagcgacgaacacgtgggaagcaagtgcctgtggacttacgaaatccaattctcccaagatggtaaagcctacactccagtgtcccggaaaccttctacgttcaatcttttcgtgttttcaccagataccggggcagtcagtggtagctacagagtcagagcacttgactattgggccaggccgggtcctttctcagatccagtgccttacctggaggtgcccgtgccccgcggaccaccgtccccaggaaatcct

SEQ ID NO: 13915 - DNA, 1959 bp, synthetic construct
  misc_feature 1..1959: note = source = /note="Description of Artificial Sequence: Synthetic coding sequence"
  source 1..1959: mol_type = other DNA
atgagacccctccgcccccgagccgctcttctggcactgctggcctcattgctggcagccccaccagtcgcgccggccgaggcaccccatttggtccacgtagacgctgcgagggccctgtggccattgagacgattttggcggagcactgggttctgccctccactcccgcactcccaagcagaccaatatgtcctcagctgggatcaacagcttaatttggcatacgtgggtgcggtgccgcaccggggtatcaagcaagtgcgcacacattggttgctggagctcgtcaccacaagaggtagcactggacgaggtctttcttataacttcacacaccttgacggatacctcgatctcctgcgggagaatcagctgctgccaggcttcgagctgatgggttccgctagtggccatttcaccgacttcgaagacaagcagcaggtatttgagtggaaagatctggttagtagcctcgcacggcggtacattgggcgctatggtctggcgcacgtctcaaagtggaacttcgaaacatggaatgagcccgaccaccatgactttgataacgtgtctatgacgatgcaggggtttcttaactactatgacgcctgtagtgaagggctcagagccgccagccccgctctccgccttgggggacctggagacagctttcacacccctcccaggagtccgctctcctggggactgcttcggcactgccacgatggcactaatttttttacaggcgaagctggcgtaaggctggactacatcagcctgcatagaaagggggctagaagttccattagtatcttggagcaggagaaggtagtcgcccagcagatccggcaactgtttcctaaattcgctgataccccaatttacaacgacgaggccgatccgctggtgggctggtccttgccacagccatggcgcgccgacgtgacatacgccgctatggttgtcaaggtaatcgcacagcaccagaatctcctgctcgccaacactaccagcgcgttcccctatgctctgctgtccaatgacaatgctttcctgtcctatcatccccatccatttgcacagcggacattgactgcccgctttcaagtgaacaacaccaggcccccacacgtccagctgctgcggaaaccagtgcttaccgctatggggctgcttgccctgctggatgaggagcaattgtgggccgaggtaagccaggcaggaacggtcctcgatagtaaccatacagtcggagtgttggcttccgcacacagacctcagggtcctgcagacgcttggcgggcagccgtgctgatatacgcttctgacgacacccgcgcccacccgaaccggtccgtggcggtaacactccgcctccgcggcgtgccacctgggccgggcctggtttacgtgacacgctacttggataatgggctctgtagccctgatggtgagtggcgaagacttgggagaccagtcttccccacagccgaacagtttcggcggatgcgagcggctgaggaccctgtcgcggcagctcctcggcctctgcccgccgggggaaggctgaccttgaggccggcgcttagattgcctagcctccttctggtccatgtgtgcgcccggcctgagaagcctcccgggcaggttactaggcttagggcactgcccctgacccagggtcagctggtactggtgtggagcgatgagcacgtgggctctaagtgtctgtggacttacgaaatccagttttctcaggatggcaaggcatacacacccgtatccagaaagcctagtactttcaatctgttcgtgttctcccctgacaccggggcagtttctggaagctacagagtgcgggcactcgattactgggcacgacccggccccttctccgaccccgtgccatacctggaggtccctgtgccacggggtcctccttccccgggaaaccct

SEQ ID NO: 13916 - DNA, 1959 bp, synthetic construct
  misc_feature 1..1959: note = source = /note="Description of Artificial Sequence: Synthetic coding sequence"
  source 1..1959: mol_type = other DNA
atgaggcctttgcgcccgcgggccgcgcttctcgccctgctggccagcctcctggccgcccctcctgtagccccagccgaagcaccccacctggtgcatgtcgatgccgccagagcgctgtggcctctcaggagattctggagaagtacaggtttttgtcccccacttccgcactcccaagcagaccagtacgtgctttcctgggaccagcagctgaacctggcctacgtgggtgccgtgccccacagaggcataaagcaggtaaggacccactggcttctggaacttgttacaactagaggatcaaccgggcggggtctgagctataattttacacatctggatgggtacttggatctgcttagagaaaaccagctgctgcccggcttcgaactaatggggagtgccagtggtcactttactgatttcgaagacaagcagcaggtcttcgagtggaaggatcttgtctcgtccctagcgaggcgatatataggaagatatggcttagcccatgtgtctaagtggaatttcgagacgtggaacgagcctgatcatcacgatttcgacaatgtaagcatgactatgcagggctttctgaactattacgacgcttgctcggaaggccttagagccgccagcccagccctgcggttagggggtccgggtgactcttttcatacccccccccgtagccccctgtcctggggtctccttagacattgccacgacggtaccaactttttcacgggggaggctggggtgcgtttagactacatctctctacacagaaagggcgctcggtcatcaatttctatcctggaacaagaaaaagtagttgcgcagcagatccggcagctctttcccaagttcgctgacacacccatctacaatgatgaagcagatcccctggtgggctggtcattaccgcagccttggagagctgatgtgacctatgccgctatggttgtgaaggtcatcgcgcagcatcagaatctgctgctagcgaataccacaagtgcgttcccttacgctctgctgtctaatgataacgcatttttgtcttaccacccccatccttttgcacagcggacccttaccgcccggtttcaggtcaataatacgcggccaccccacgtgcagcttctgaggaaaccggtcctcacagcaatggggttgctggcactgttagatgaggaacagctttgggctgaagtctcacaggccggaacagtgctcgactctaatcacacagtcggtgtcctggcctccgcccaccggccccagggacctgcagacgcttggagggccgccgtcttgatttatgcaagcgatgacaccagggcacaccccaatagaagcgtcgccgtgacgcttcgtctgcggggggtcccccccggcccgggcctcgtttacgtgacacgctacctggacaacgggctttgctcgcctgacggcgagtggaggaggctgggtcgccctgtcttcccgaccgctgaacagtttagacgcatgagagccgcggaggaccccgtcgcagccgcccccaggcctttgccggcagggggcagactaactcttcgcccagccctacgcctgccctcactcctgttggtgcacgtttgtgctagacccgagaagcctcccggccaggttactcgtctaagggccttacccttgacccagggccagctggtcctcgtctggtccgacgaacacgtcggatccaaatgcctttggacatatgagattcagttctcccaggatgggaaggcatatacccccgtgagccggaagccatcgacattcaatctatttgtcttctcacccgacaccggggcggtcagtggcagctatcgtgtacgcgccctggattattgggctcggcctgggccattcagcgatcctgtgccctacctggaagtccctgtgccccgtgggcctccaagccccggcaatccc

SEQ ID NO: 13917 - DNA, 1959 bp, synthetic construct; identical to SEQ ID NO: 13856
  misc_feature 1..1959: note = source = /note="Description of Artificial Sequence: Synthetic coding sequence"
  source 1..1959: mol_type = other DNA

SEQ ID NO: 13918 - DNA, 1959 bp, synthetic construct
  misc_feature 1..1959: note = source = /note="Description of Artificial Sequence: Synthetic coding sequence"
  source 1..1959: mol_type = other DNA
atgaggcctctgcggccgagggccgcacttctagccctgttggcctcactcctggcggcaccaccggtggctccggccgaggctccccatctggtccacgtggatgccgcacgggctctgtggcctttgaggcggttttggcgatcgaccggattttgtccgccgctcccccactcacaggcagatcagtatgtcctgtcttgggaccagcaactgaacctggcctacgttggagctgttccccataggggaataaaacaggtgcggacccattggctcttagaactggttaccacacgggggagcaccgggcggggactctcctacaacttcacacacttagatgggtacctcgacctgcttcgcgagaaccagctgctcccgggttttgagttgatggggtccgccagtggtcactttacagattttgaggataaacagcaggtgttcgaatggaaagatctggtgtcttccctcgctagaagatatataggccggtacggcctggcccacgtgagcaaatggaatttcgaaacttggaacgagccagaccaccatgactttgataacgtgtctatgacaatgcagggttttttgaattactacgacgcgtgcagcgagggactacgtgccgcaagccctgctttacggctcggcggtccaggcgattcctttcatacaccaccccgatcccccttgtcttgggggttgctgcgtcattgtcacgacggaaccaacttcttcaccggagaggccggtgtgaggctcgattacatcagtcttcacagaaagggcgctcgctcctctatctctatattagaacaggagaaggtggtcgcccaacagatacgccaactgtttcctaaatttgccgacaccccaatctacaacgatgaagctgacccactggtaggctggtccttacctcagccgtggagagccgacgtaacgtatgccgcgatggttgttaaggtgatcgctcaacaccagaatctgctgctagcaaacacgacatccgcatttccttatgcacttctgtccaacgacaatgccttcttaagttaccatccccatccatttgcccaacggactttgactgcccgcttccaggtgaataacactcgtccacctcatgtgcagttattgcgcaagcccgtgctgactgccatgggccttcttgctctcctggacgaagagcagctatgggccgaggtatcacaggctgggactgtgcttgatagtaatcacacagtgggagttttggccagcgcacaccgacctcaagggccggcagatgcgtggagggccgccgtgctcatctacgcctcagacgatacacgcgctcaccccaaccgatccgtcgccgtgaccctccgcctccggggcgtgccaccgggcccagggctagtctatgtaacgagatatctcgacaacggcctctgcagtccagacggcgaatggcgccgactcgggcgcccagtcttcccaacagcagaacaattccgcagaatgcgagctgctgaagacccggtggctgctgcccccaggccgttgccagccggcggccgcctaactctacggccagccctaaggttgccaagtctactgcttgttcacgtgtgtgccagacccgaaaaacctccgggacaggtgacgaggctgagggcactgcccctgacgcagggtcaactggtgctggtctggtccgacgaacacgtgggctctaaatgcctgtggacctacgagatccagttttcccaggacggcaaggcctatactcctgtcagcagaaagccctccacatttaatttatttgttttcagccctgataccggcgccgtgtctggttcgtatagagttcgtgctcttgattattgggcacggccaggacccttttctgatcccgtcccttatttagaggtccccgtcccacgtgggcctccttcccctggcaatcct

SEQ ID NO: 13919 - DNA, 1959 bp, synthetic construct
  misc_feature 1..1959: note = source = /note="Description of Artificial Sequence: Synthetic coding sequence"
  source 1..1959: mol_type = other DNA
atgcgaccattgcgtcctcgcgcagccctgcttgcgctcttggcttcgctcctggcggccccaccagtcgcaccggcggaagcgcctcatctagttcatgttgacgccgcacgcgcactgtggcctctgcgccgcttctggcgcagcaccgggttctgcccccctttgccacatagccaggccgaccagtatgtactcagctgggatcagcagctgaatttggcgtatgtgggggctgtgccccatcgcggtataaagcaagtgcgcacacactggctcttggagctcgtgaccacccgaggatctacaggaagagggctctcttacaatttcacccatttggacggatatctagacctccttagagagaatcagctgctccccggctttgaattgatgggctctgcctcgggccatttcacagacttcgaggataagcaacaggtattcgaatggaaagatttggtatctagcctggcgcgcagatacatcggtaggtacgggttggctcacgtaagcaaatggaacttcgaaacatggaatgaacccgaccatcacgacttcgacaatgtgtccatgacaatgcaagggtttctgaactattacgacgcatgctctgagggactccgggcggccagtccagctctacgtctcgggggccccggtgactccttccatacaccaccgcgctctcccctcagctggggacttttacgacattgccacgacggtactaacttctttaccggggaggcgggtgtgcgtcttgactatatctctctccacaggaaaggcgcccgttcatccatctcgattctcgaacaggagaaggtggtcgctcaacagattcggcagctgttccccaaattcgccgatacaccgatctacaacgatgaggcagacccccttgttggttggtcgctgccacaaccttggcgggctgacgtcacttacgccgctatggttgtgaaggttatagctcaacatcaaaatcttctccttgccaataccacgtctgcgttcccctatgcactgctcagtaatgacaacgcctttctaagttaccacccgcacccgtttgcacaacgtacgctgacagcccggttccaggtcaataacacacgacctccccacgttcagctccttcgcaaaccagtccttactgcaatgggccttctggctctccttgatgaagagcagctctgggccgaagtctcgcaggctggaaccgttctcgattcgaatcacaccgttggcgtccttgccagcgctcaccgacctcaaggccctgcagatgcttggcgggctgcggttcttatttatgcttctgacgatactcgggcccacccaaaccgctctgtggcagttaccctcaggcttcgtggtgtcccaccaggacctgggctggtttatgtaacccgatatctggataacgggttatgctcaccggacggcgagtggcgacgactcggacgtcctgtttttcctacggcggagcagttccgccgtatgcgtgccgccgaggatccagtagctgccgctccccggccacttcccgcgggtggtcgtttaactttgagacctgccctccggctgccatccttgcttttagttcacgtttgcgcgaggccagagaagccacctggccaggtcacccggctacgggccctacctctgactcagggccaactagtgctagtgtggagcgatgagcacgtgggatccaaatgtttgtggacttacgaaatacagttttcgcaagacggaaaggcatatacacccgtttcccggaagccgagcacatttaatcttttcgttttttcgcctgacaccggggcagtgtcgggttcgtatcgggtgcgtgcactcgactattgggcacgtcctggcccgttctctgatccagttccctatctagaggtgccggttccgcgcggtcccccctcgccaggtaatccg

SEQ ID NO: 13920 - DNA, 1959 bp, synthetic construct
  misc_feature 1..1959: note = source = /note="Description of Artificial Sequence: Synthetic coding sequence"
  source 1..1959: mol_type = other DNA
atgcggccacttcggccaagagccgccctgcttgccctgcttgcttcacttttggcggcaccacctgtcgctccagcagaggcaccacacctggtgcatgttgacgcagcaagagcactttggccactgagaagattttggcggtccacgggtttttgccctcccctgccacacagccaagcagatcaatacgtgctgtcctgggatcagcagctgaacctggcatatgtgggcgccgtgccgcaccgtggaatcaaacaggtccggactcattggctgcttgaactcgtgaccacgaggggtagcactggcaggggactttcatacaactttacccacctggacggatacctcgacctgctgcgggagaaccaactccttcccggtttcgagcttatgggttcggcgtcagggcattttactgatttcgaggacaagcagcaagtctttgaatggaaggaccttgtgtcctctcttgctagacggtacattggtcgctacggactggctcatgtgtcaaaatggaacttcgaaacttggaacgaacctgaccatcacgacttcgacaacgtctcgatgaccatgcagggatttcttaactactacgatgcgtgttcggaggggcttagagccgcatcccccgcactgcggctgggcggaccgggtgattcatttcatacccctcctcgttcacccctttcgtggggactgcttagacactgccacgatggtaccaactttttcaccggagaagcaggcgtccgtctcgattacatttcacttcaccgcaagggagcccggagctcgatatcaatcctcgaacaagaaaaagtcgtggcacagcagattcgtcaattgtttcctaagtttgcagacactccaatttacaatgatgaagcagatccgctggtcgggtggtccctcccacagccttggcgggcagatgtcacttacgccgcgatggtcgtgaaagtcatagcgcagcaccagaacctgctgttggcgaatacgacctccgcgtttccttacgcactgctctccaacgacaatgcatttctttcataccacccccatccttttgcacaaagaactcttaccgcccgatttcaggtgaacaatactcgccctccgcatgtgcagctgctgaggaagcctgtgcttaccgcaatgggtctgcttgcccttttggacgaagagcagctctgggcagaagtgtcacaggcaggtactgtgctggattcaaaccacaccgttggcgtactcgcatccgcacataggccccagggaccagcagatgcgtggagggcagcagtgctgatttacgcatcagacgatactcgagcccacccgaacagaagcgtcgcggtcacccttagactccggggagtgcctcctggaccgggactggtctacgtgactcggtaccttgacaacggcctgtgtagccctgacggagaatggcgcaggctggggaggccagtctttcccactgcagaacagttcagaagaatgagagccgcagaagatccagtggcagcagcgcctcgacctcttcctgcagggggacgtctgactctgcggcccgcgcttaggcttccttcgctccttcttgtgcatgtgtgcgcccgaccggagaagccccctggacaggtgacgcgattgagggcactgcctctcacccaaggacaactcgtgctggtttggagcgacgaacacgtgggaagcaagtgcctctggacgtacgaaattcaattctcccaagacggtaaagcgtacacgccagtgtccaggaagcccagcacgtttaacctgtttgtcttttccccagacaccggtgcagtgtccggcagctaccgggtgcgagcattggattattgggcacggccagggcctttctccgatccagtgccttacctcgaagtgcctgtcccccgtggcccaccttccccaggtaacccc

SEQ ID NO: 13921 - DNA, 1959 bp, synthetic construct
  misc_feature 1..1959: note = source = /note="Description of Artificial Sequence: Synthetic coding sequence"
  source 1..1959: mol_type = other DNA
atgagaccactaaggccgagagcggcactgctggctctacttgcatctctgctggcggctccacctgttgcacccgcagaagccccccatcttgttcacgtggatgccgctcgggctctgtggccactgcggaggttttggaggtcgactggtttctgtccacccctcccacattcacaagccgatcagtatgtcctgtcatgggaccagcagctcaatctggcctatgtgggtgcggtgccgcaccggggtatcaaacaggtcaggacacattggctccttgagctcgtcactacaaggggatccacgggtagaggtctgtcttacaactttacccatctggacggttatttggacctgctcagagaaaaccagctcctgccagggttcgagctgatgggcagtgcctctggccactttaccgacttcgaagacaagcagcaagtattcgaatggaaagatttggtgtcgtccctggctaggcggtatattgggcggtacgggttggcacacgtcagcaaatggaatttcgagacttggaacgaaccagaccatcacgatttcgacaatgtgagcatgaccatgcagggcttcttgaattactacgacgcatgctccgagggcttgcgggcagccagtcccgctctccgcttgggaggacccggggacagctttcacactccccctcggtcaccattgagctgggggctgctcaggcactgtcatgatggaacaaatttcttcaccggagaggccggagtgagactcgattacatcagcctgcacagaaagggagcccgctcctccattagcatattggaacaggaaaaggtcgtggcgcaacagatccggcaactgtttccaaagtttgctgatactccaatatacaatgacgaagccgatcctctggtcggctggagcctgccgcagccctggcgtgctgacgttacctacgcagccatggtggtgaaagtcatcgcacagcaccagaatctgttgctggcaaacacaacatccgctttcccatacgctctcctctccaatgataatgctttcctttcctaccatcctcatcccttcgcgcaaaggaccttgaccgcaaggttccaggtgaacaacaccaggccccctcacgtgcagcttctgcgaaaaccagtgctgacagccatgggcctcctagccctcttggatgaggagcagttgtgggctgaagtgagtcaggcaggcaccgtcttggactctaatcatacagttggagttctggcctctgctcaccggccacagggacccgcagacgcatggcgggcggctgtgctgatatatgcatcagatgatacaagggcccatccaaaccggtcggttgctgtcacacttaggctccgcggggtgcccccaggacctggcctggtctacgtgacacgctaccttgacaatggcctgtgctctcctgatggtgagtggaggcgtctagggaggcccgttttcccaaccgctgaacagtttaggcgcatgcgtgccgccgaagaccccgtagccgcggcaccaagaccactgcctgccgggggccggctgacactgcggcccgcattgaggttgcccagcctcctcctggttcatgtgtgcgccagacccgaaaagcctccaggtcaggtgacacggctgagagctctgcccctgacgcaggggcagttagtcctggtatggagtgatgagcacgtggggtcaaagtgcctgtggacctatgagatccagttttctcaagacgggaaggcatacacaccggtcagccggaagccctctacattcaacctttttgtgttcagccctgacactggcgctgtgtccgggagctacagggtgcgggcactcgattactgggctagaccaggccccttctccgacccggtgccctacctggaggttccagtcccccgaggacccccctcacccggaaacccc

SEQ ID NO: 13922 - DNA, 1959 bp, synthetic construct
  misc_feature 1..1959: note = source = /note="Description of Artificial Sequence: Synthetic coding sequence"
  source 1..1959: mol_type = other DNA
atgcggccacttcgcccccgggcggccctcctggcactcctcgcatcacttctcgccgccccgcctgtcgctcccgcagaagctccccatttggttcacgtcgacgctgcccgagcgctctggcctcttcgccgattttggcgctccaccggattttgtcccccactcccacactcacaagccgatcagtatgttttatcatgggaccagcagttaaatttggcctatgtgggagctgtcccccaccggggcattaagcaggtgcgcactcactggctgcttgagctcgttacgacacgaggctccacagggcgcgggttgtcttataatttcacacatctggacggctacctggaccttcttcgtgagaatcaactcctgccaggattcgaacttatgggctcggcaagcggacatttcactgattttgaggataagcagcaagtgtttgaatggaaagacctggtcagctccttggcacgacgctacatcggccgttacgggcttgcacatgttagcaagtggaatttcgagacctggaatgagcctgatcatcacgacttcgacaatgtctctatgaccatgcagggcttcctcaattattacgatgcctgttcggaaggcctgcgcgccgccagccccgcccttcgactgggcggcccaggcgatagctttcacaccccaccacggtctccgttgagttggggactgctaaggcattgccacgatggtactaacttctttacgggtgaagctggagttaggctcgactatatatccttacacaggaaaggagcgcggtcatcaatctcaattctggaacaggaaaaagttgtggcacagcagatcaggcaactgtttccaaaattcgccgatacccctatttacaatgatgaggccgatcctctagtggggtggagcctgccccagccatggcgcgccgacgtcacctatgctgccatggtcgtcaaagtgatagctcagcaccagaacctactcctggcaaacacaacgagtgccttcccttacgctctgctgtcaaacgataacgcgtttctcagctaccatccgcacccctttgcgcaacggaccctcaccgctcggtttcaggtcaacaatacccgacccccccacgtccagctgctgagaaagcccgtcttaacagccatggggctccttgcgctgttagacgaagagcagctgtgggctgaagtgtcgcaagccggaaccgtgctggattctaaccatacggtgggggttctggccagtgcgcatcgcccacaggggccagcagacgcctggcgcgcagccgtccttatctatgcttcagacgacactagagcacaccctaaccggtcagtggcggttacactccgcttacgaggggtgcctcccggaccaggactggtctatgtcactcgttatctggataatggactctgttcacctgacggagaatggcgccgccttggccgcccagtgtttcccaccgctgaacaattcaggaggatgcgggccgcagaggatccagtggctgctgccccacgacctttgcctgctggcggtcggttgacactgaggcctgccctccgactgccctctctactcctggtccacgtttgcgctagacccgaaaagccgcctggccaggtcacaagacttcgcgcactacccctgacacaaggacagctggtgttggtttggtccgatgagcacgtgggcagtaaatgcttgtggacttacgagatacagttcagtcaggatggtaaagcctacaccccagtctcccggaagcccagcacttttaatttgtttgtgttcagtcccgacacgggagcagtttccggctcctacagagtccgtgcactcgattactgggcccggcccggcccattctccgatccggtaccctacctggaagtgccagtacctaggggaccgccctctcccggtaatccc

SEQ ID NO: 13923 - DNA, 1959 bp, synthetic construct
  misc_feature 1..1959: note = source = /note="Description of Artificial Sequence: Synthetic coding sequence"
  source 1..1959: mol_type = other DNA
atgcggcctctcaggcctcgcgccgcattactggcccttctggcatcattgctggccgctccccctgtggctcctgctgaggcgccccacctggtgcacgtagatgctgcgcgggccttgtggccattgaggcgcttctggcggtccaccggattctgccccccgttaccccattcacaggctgaccagtatgtgttaagctgggaccagcaactgaaccttgcatacgtgggtgccgtgccccacagggggattaagcaggtacgcactcattggctgttggagctggtgacgacacggggttccactggacgcggactctcctacaacttcacacatctagacgggtatcttgatcttttgagagaaaatcagcttctcccaggcttcgaattaatgggctctgcgtctggacactttactgacttcgaggataagcagcaggtttttgagtggaaagatctggtgtcttctctggcccgccgctatatcgggcgatacggcctcgcccacgtatccaaatggaatttcgagacttggaacgaacctgaccatcacgacttcgacaacgtatccatgactatgcagggctttctgaattactacgacgcctgtagcgagggcctgcgtgcggcgagcccagcacttcgactcggaggccccggagattctttccacaccccgccccgctctccccttagttggggactgctgaggcactgtcacgatggaacgaatttctttactggcgaggcgggcgtcagactagactatatctctctccaccgaaaaggcgccagatcctctatctctatcctggagcaggaaaaggtggttgcacagcagattaggcaactgtttccaaagtttgcagataccccaatatacaacgacgaagccgatcctctcgtagggtggtccctgccccagccttggagggccgacgtaacttatgccgccatggtcgtgaaggttattgctcagcatcagaatctcttgctggcaaataccacttctgccttcccttacgcattgctttccaacgacaatgcattcttatcttaccacccacatcccttcgcccagcggaccctaactgcaagatttcaagtgaacaacactaggcccccccacgtgcaactgctgagaaagcccgtgctgacggcaatgggtctgctggctcttctcgacgaagagcagctttgggcggaagtaagccaggcggggacagtgctcgattccaaccatacagtgggggtgctcgccagcgctcaccgccctcaaggccccgctgatgcatggagagccgccgtgctgatatatgcatcagacgacactagggcccacccaaacagaagcgtggctgtaacactgcgcttgcgcggggtcccccctggccctggactggtatacgtgacacgatatctggacaatggcctgtgttctcctgatggcgagtggcggcggttgggtcggcccgtttttcccacagccgagcagttcagaagaatgcgggctgccgaagaccccgtggcagcagctccccgccctctccctgccggcggaagactgaccttgcgtcccgccctcaggctcccttcactcctgttagtgcacgtgtgcgcacgccccgaaaagcccccaggccaggtcaccagactgagggcccttcctcttacacaaggtcagctggtactcgtgtggtctgacgagcatgtgggaagcaagtgtctgtggacatacgagatacagttttcccaagacggtaaggcatacacccccgtttcacgtaaaccttcaacttttaatttattcgtgttctctcccgatacaggcgccgtgagcggtagctacagggtaagggctctggactattgggcccggcctggaccattctccgatcccgtgccttacctggaggtgcctgtcccaagaggcccaccttcgcccggcaacccc

SEQ ID NO: 13924 - DNA, 1959 bp, synthetic construct
  misc_feature 1..1959: note = source = /note="Description of Artificial Sequence: Synthetic coding sequence"
  source 1..1959: mol_type = other DNA
atgagaccactcaggccccgtgcagccttgcttgccctgttggctagtctcttggctgccccaccagtcgctcccgctgaagctccccacctggtgcacgttgatgccgcccgtgctctgtggcctctgaggaggttttggagatctactggattctgcccaccactgccacactcacaagctgatcagtatgtattgtcctgggatcaacagttgaatctggcttatgtgggtgctgtgccacaccgcggcatcaagcaggtccgtacccactggcttcttgagctggtaaccaccaggggctctaccggtcgcggactgtcttataatttcacacaccttgatggatacctcgatcttttgcgcgaaaatcagctgctccctggatttgagctcatgggcagcgcctctggacatttcactgactttgaagataagcagcaggtgttcgaatggaaggatctcgtttcctccctggcccgtaggtacattggcaggtacggacttgctcacgtgagcaaatggaatttcgagacctggaacgagcccgaccatcacgattttgacaacgtttccatgacaatgcagggtttcctgaactactacgatgcttgctcagagggcctcagagccgcctcccctgctctcagactcggaggacccggcgattctttccataccccccctaggagccccctgtcttggggcctgctgaggcattgccacgacggtactaacttttttactggtgaggctggcgtgaggctggattatatctccttgcatcgcaagggagcacgcagcagtatatcaatccttgagcaagagaaagtcgtcgcacaacagatcaggcagctgttccccaagtttgccgatacccccatatataacgacgaggccgatcccttggttggatggagtctgcctcagccctggcgcgctgacgtcacctacgctgctatggtagtcaaggtgatcgcccagcatcagaacttgctccttgccaacaccacctcagctttcccatatgccctcctgtccaacgataacgccttcctgagctaccatccacatcccttcgcccagcgcaccttgactgccaggttccaggtcaacaacactcgcccaccccacgtccagcttctgaggaaacccgtactgacagccatgggtctcctggccttgctggacgaggagcaactgtgggctgaagtgagtcaagccggaactgtgctggattccaaccacaccgtgggcgtgctcgcatctgctcacaggccccagggacctgccgatgcctggcgtgcagctgtccttatctatgctagcgatgatactagggcccatccaaatagaagcgtggccgtcaccctgagacttcgtggagtgcctccaggcccaggactcgtgtacgttacacgttacctcgacaacggcctgtgcagtcccgatggtgagtggaggcgcttgggtcgccccgttttccctactgcagagcagttccgtaggatgagggccgctgaagatcccgtcgctgctgcccctcgcccactgccagccggtggtaggctgacattgaggcccgccctccgcttgccctcattgctgctggtccacgtctgtgctcgccctgagaagcctccaggtcaggtgactcgtctgagggccttgcctcttacacagggtcaattggtgttggtttggtcagatgagcacgtcggaagcaagtgtctctggacatatgagattcaattcagtcaggatggaaaggcctatacccctgtgagtcgtaagccatccaccttcaacctgttcgtgttctcccccgacactggcgcagtcagcggctcctaccgcgttagagctctggattactgggcccgcccaggccccttcagcgaccccgtaccctatctcgaggtacccgtgccccgcggcccaccaagccccggtaaccct

SEQ ID NO: 13925 - DNA, 1959 bp, synthetic construct
  misc_feature 1..1959: note = source = /note="Description of Artificial Sequence: Synthetic coding sequence"
  source 1..1959: mol_type = other DNA
atgcggcccctacgcccccgggctgccctactagccctgctggccagccttttagcagctccacccgtggcccctgcggaagccccccacctcgtgcatgtagacgctgcgcgcgccttgtggccactccggcgattttggcgtagtacagggttctgtcctcccttaccccactctcaggccgatcagtacgtgctcagctgggaccagcagctgaacctggcctacgtgggtgctgtcccacatagggggatcaaacaagtgagaacccattggctactggagctggtcaccaccagaggctcaaccgggagagggctgagctacaattttacacatcttgacggctacttggacctgttacgggagaatcagcttctccctggattcgagctgatgggctctgcatctggtcattttacagattttgaagataaacagcaggtgttcgaatggaaggacctcgtctcaagcttggctcgcaggtacataggacgctatggactggctcacgtgtccaagtggaacttcgaaacatggaacgaacctgaccaccacgacttcgataacgtcagcatgaccatgcaaggcttcctcaactactatgacgcatgttcagagggattacgggccgcctccccagccctgagactggggggcccaggagattccttccacacgcctcctcggtcacctctatcgtggggcctcctccgtcactgccacgatggaaccaattttttcaccggggaagccggggttcggctggactacatttcccttcatcgaaaaggagcccggtcgtctataagcatccttgagcaggagaaagttgttgcccaacagattcggcagttatttcccaaattcgcggacactccaatttacaacgacgaggccgatcctctggtgggttggagtctgccacagccttggagggccgatgtaacttacgccgctatggtagttaaagttatcgcgcagcatcagaacctgttactggcaaacactacctcagcttttccttacgccctgctctcaaacgacaatgcatttctgagctaccacccccacccttttgcccagagaactctgactgcccggtttcaagtgaacaatacacgacctccccatgtacagctgctgaggaagccagtgttgacggcaatgggcctcttggctctcctggacgaggaacagctttgggcagaagtcagccaagctggcacagtgctggactctaatcacaccgtgggtgtcttggcctcggcccaccgtccccaaggaccagccgacgcatggagggcagccgttcttatctacgcgagtgatgatacacgggcccatccgaaccgctcggttgccgtgacattgcgcttgcgcggcgtgccgcctggccccgggcttgtgtacgtgacacggtacttagataacggcctttgcagccccgacggagagtggagacgcctgggcagacccgtgttcccgaccgccgagcaattccgaagaatgagagctgcagaggatcctgtcgccgctgcccctcgccctcttccagctggaggacgcctgacgctgcgccccgcccttcggctcccatctctcctattagtccacgtgtgcgcccgcccggaaaagcctccagggcaagtcactaggctccgggctcttcccctcactcaaggacaactggtgctggtctggtccgacgaacatgtgggctctaaatgtttatggacatatgagatccagttctcccaggacgggaaagcttacacaccagtctctagaaagccgtctacttttaatttgtttgtgttctcccccgacactggggctgtgagcggttcttatcgtgtgcgtgccttggactactgggctagaccgggcccattctcagaccctgttccgtaccttgaagtccccgtgccaagagggccaccctctcccggtaatccc

SEQ ID NO: 13926 - DNA, 1959 bp, synthetic construct
  misc_feature 1..1959: note = source = /note="Description of Artificial Sequence: Synthetic coding sequence"
  source 1..1959: mol_type = other DNA
atgagacccctccgacctcgcgctgcactcctggccctgctggccagcctgcttgcggctcctccggttgctcccgccgaagcgcctcacctggtacatgtggacgcagccagggccctatggcccctaagacgcttttggcgttccacgggcttctgtcccccattgcctcatagccaggccgatcagtacgtcctctcgtgggaccagcagcttaacctcgcctacgttggggctgtcccccacaggggaatcaagcaggtgcgcacacactggctgctggagctggtgactacaagagggtccacagggagagggcttagttataacttcactcacttagatggatacctggaccttcttcgtgaaaaccagctgctcccaggatttgaactgatgggctcagctagcggtcattttactgactttgaggacaagcagcaagtgtttgagtggaaggatctggtttcttcgctggctaggcgctatattgggcgatatggattagcacacgtgtctaaatggaatttcgagacttggaacgaacctgatcaccacgactttgacaacgtatctatgacaatgcagggcttcctgaattactatgacgcttgctccgaggggctgcgtgctgcttcacccgcccttcgccttggggggccaggcgattctttccatacacccccacggagcccactgtcctggggtctgctgcggcattgccatgatggcactaacttctttaccggagaagccggagtacgattggattatataagcctacaccggaaaggggctcggtcaagtataagtattctagagcaggaaaaggtggttgcccagcagattcgccagctctttcccaagtttgccgatacacccatctataacgacgaggcagatccccttgtcggttggtcgctgccccagccttggcgcgcagacgtgacgtacgcagctatggtcgtgaaggtgatcgcacagcaccaaaacctgttattggctaacacgacatcagcctttccctatgcactcctgtcaaacgacaatgccttcctgagttaccatcctcatccatttgcccaacggacccttaccgccaggttccaggtaaacaacaccaggccccctcacgtgcagcttctgagaaagcccgttctcacggccatgggactattagcccttctcgatgaggaacagctgtgggcagaggtgagccaggccgggaccgttctggatagcaatcacacggtcggcgtgttagctagcgcccaccggccccagggcccggccgatgcctggcgtgccgccgtactcatctacgccagcgacgatacgagagcccatcctaaccggtctgtagctgtgaccctccggttgcgtggcgtgccgcctggccccgggctggtctacgtaactagatatttggacaatggcctctgtagccctgacggcgagtggagaagacttgggaggcctgtgttccccaccgcagaacagtttcggagaatgcgagcggctgaagatccggtggcagctgctccacgtccattgcctgccgggggcaggctgaccctgcgccccgctctgcggctgccaagcctgctgctcgtgcatgtttgcgcaaggccagagaaacctcccgggcaagtgacacgtcttcgggcccttccgttgacacagggtcagctggtgttggtgtggagcgacgagcacgtgggaagcaagtgtctttggacctatgagatacagttttcccaggatggtaaggcatacacccccgtaagcaggaaaccctcaacctttaacttgttcgtcttttctcccgacactggcgctgtgtccggctcctaccgagtaagggccctggattactgggcccgtcctggtccctttagcgaccctgtgccttacctggaggtgcccgttccccgggggccgcccagtccagggaaccca

SEQ ID NO: 13927 - DNA, 1959 bp, synthetic construct
  misc_feature 1..1959: note = source = /note="Description of Artificial Sequence: Synthetic coding sequence"
  source 1..1959: mol_type = other DNA
atgagaccacttagacctagagcagccctacttgcattacttgcttccttacttgccgctccacctgtggcccccgccgaagctccacatctagtgcacgtagatgctgcaagggctctgtggcccctacggcgcttctggaggtctactgggttctgcccaccacttccccattctcaggcagatcagtatgttctctcttgggatcaacagcttaacctcgcatatgtaggagccgtgcctcaccgcgggataaaacaggtacggactcattggcttctagaacttgtgactactagagggtccactgggagggggcttagttataattttacgcaccttgacgggtatctcgatctcctgagggaaaatcagttactgccagggtttgaactgatggggtccgctagtggacattttacagatttcgaggataaacagcaggtgtttgaatggaaggatttagtgtcttcgctagctcggagatatatagggagatatggactggctcatgtgtcaaaatggaactttgaaacatggaatgaacccgatcaccatgatttcgataatgtatcaatgactatgcaaggatttctcaactattatgatgcctgctctgaagggttgcgagcagcaagtccagctctacggctggggggaccaggggattcctttcacactcctcctcgttctcccttaagttgggggctcctccggcattgtcatgatgggactaacttcttcacaggagaagctggagtacggttggattacatctccttacaccgaaaaggggcccgcagttctatttccatacttgagcaggagaaagtcgtggcccagcagattaggcagctgttcccaaagttcgccgatacgccaatctataatgatgaagccgaccctcttgtaggatggagtctgcctcagccttggcgagctgatgtaacatatgcagccatggtggttaaagtcatcgcccagcatcaaaatctcctcctagcaaatactacttcagcttttccctacgcccttctttccaatgataatgcttttctaagttaccatccccatcctttcgcccaacgcacactcacagcccggttccaggtcaacaatactcggcccccacacgtccaactcctcagaaaacctgtcttaacagccatggggctcctggctctcctagatgaagaacagctctgggccgaagtatcccaggctgggactgttctcgattctaaccatacagtcggggtgctcgcgtcagcacaccgaccccaggggccagctgacgcttggcgcgctgcggtgctgatctatgcatccgatgatactcgcgcccatcccaacagatctgtcgcggtaactttacgtctgaggggagtgcctcccggaccaggactagtctacgtgacacggtacctggataatggactgtgctcacccgatggagaatggaggcgcctgggaagacccgtattcccgacagctgaacagttcaggcggatgcgggctgctgaagatcccgttgccgcagctccacgccctctgccagcaggggggcgactcactctccgcccagctctccggctccctagtttattgctcgtccacgtctgtgcacggccagaaaaacctcccggacaggtcactagacttcgagccttaccccttacacagggacagttggtgttggtgtggtctgatgaacatgtagggtctaaatgtctttggacttatgaaatacagtttagtcaggatgggaaggcatatacacccgtgagtaggaaaccttctactttcaacctcttcgtgttctcacccgatacaggggccgtttctgggtcgtatcgggtaagggccttggattattgggctagacctggacctttctctgaccccgtgccgtatctggaagtcccagtaccccgaggacccccttctcctgggaatcct

SEQ ID NO: 13928 - DNA, 1959 bp, synthetic construct
  misc_feature 1..1959: note = source = /note="Description of Artificial Sequence: Synthetic coding sequence"
  source 1..1959: mol_type = other DNA
atgcggccacttcggccgcgcgccgcacttctggcactgcttgcttcactgctggctgcaccgccggtggcaccagccgaggcgccccacctcgtccacgtggatgcagctcgcgcgttgtggcctttgcgccgcttttggcggtccaccggcttctgccctccgctcccccattcccaagcagaccagtatgtgctgtcatgggatcaacaactgaatctggcctacgtcggggctgtgccgcatcgcggaatcaagcaggtgaggacccactggctcctggaactggtgactactcggggatcgaccggaaggggcctgtcctacaatttcacgcacttggacggataccttgaccttctcagagagaaccagctgctccctgggtttgaattgatgggatccgcctccggtcatttcacggacttcgaggacaagcagcaagtctttgaatggaaagacctcgtgtcctccctggcccgcagatatatcggaagatacggactggcgcacgtgagcaagtggaacttcgaaacttggaacgagccggaccatcatgattttgataacgtttcgatgactatgcagggctttctgaattactacgatgcttgcagcgaaggacttcgggcagcgtcacctgcgttgagactcggaggcccgggggactcattccatactcccccgcggtcaccactctcctggggcctgctgcggcactgccatgacggtactaacttctttactggagaggcgggagtgcggctcgactacatctcgctccatcggaagggagctaggtcctcgatcagcatcctggaacaggagaaggtggtcgcgcagcagatccgacagctcttccctaagttcgcagatacccccatttacaacgacgaggcggatccgctcgtgggctggagcctgcctcagccgtggcgggccgatgtgacctacgcggcgatggtcgtgaaagtgatcgcacagcatcagaacctcctgctcgccaacactacgtccgctttcccgtacgcgctcctcagcaacgataatgcatttctgtcctaccatcctcatcctttcgcgcagaggaccctgactgcgcgctttcaagtcaacaatacccggccgccgcatgtgcagctgctgcgcaagccggtgctgaccgcaatgggactcctcgccctgctggacgaagagcagttgtgggcggaagtttcccaagcaggaaccgtgctggactccaaccacactgtcggtgtgctcgcctcggcccaccgcccacaaggtccagccgatgcttggcgcgcggcggttctgatttacgcgtccgatgacaccagggcgcaccctaaccgctccgtggccgtgactctcagactgcgcggtgtgccgcccggaccgggtttggtgtacgtgactaggtaccttgacaatggactgtgtagcccggacggagagtggcggcgcctcggtagacctgtgtttccgactgcagaacagttcagacgcatgagagcagctgaggacccagttgccgctgcacccagaccactgcccgccggcggacgactgacccttcgccctgccctccgcctcccatctctgctgctggtccatgtgtgtgcccgcccggaaaaaccgccaggacaggtgactcgcctgcgcgcacttccgttgacccaaggacaattggtgctcgtgtggagcgacgaacacgtcgggagcaagtgcctctggacctacgagatccagttttcgcaagatggtaaggcatacaccccggtcagccgcaagccttcaacgttcaatctcttcgtgttctctcccgataccggagctgtgagcggctcgtaccgggtccgggcgctggactactgggcccgccctggacctttctcggacccagtgccataccttgaagtgccggtgccgcgcggcccaccgtcccccggcaacccg

SEQ ID NO: 13929 - DNA, 1959 bp, synthetic construct
  misc_feature 1..1959: note = source = /note="Description of Artificial Sequence: Synthetic coding sequence"
  source 1..1959: mol_type = other DNA
atgaggcctctgcgtcccagggccgcgctccttgcgctccttgcttctcttcttgccgcgccgcccgtggcacccgccgaggcaccacatctagtccatgtggacgccgctagagctctgtggcctcttcgacgcttttggcgttcaacagggttctgccctccccttccccactcccaggccgaccagtatgtccttagttgggatcagcagctaaatctggcatacgtgggggccgttccccaccgcggcataaaacaggttcgtacccactggctgctggaactcgtgactacacgaggatctaccggtcgggggctgtcctacaacttcacccatctggacggctacctcgacctgttacgcgaaaatcagcttctgcctgggttcgagctgatggggtcagcctccggccacttcaccgattttgaggataagcaacaggtgtttgagtggaaggacctcgtgtcttcattggcgaggaggtacatagggcggtacggcctggctcacgtgtctaaatggaacttcgagacatggaacgagcctgaccaccacgacttcgataacgtaagtatgactatgcagggctttcttaactactatgacgcctgcagcgaaggcttaagagcagcctctcccgcactgaggttaggaggccccggggattcattccacacccccccccggagcccgctgagctggggcctcctgcgccactgccacgatgggactaacttcttcactggagaagctggagtccgattggactacattagcctccatcggaaaggcgccaggagttccatcagtattctggagcaggagaaagtggtggcccagcagatcagacagctgttcccgaagtttgccgatacaccgatttacaacgatgaagcggacccgctcgtgggatggtcgctgcctcagccgtggagggcagacgtaacatatgctgctatggttgtaaaagtgattgcccagcatcagaatctgctgctggccaacaccacttcagcttttccttacgcgttactaagcaacgataatgccttcctttcataccacccacaccctttcgcacaaagaacacttactgctcgattccaagtgaacaacacccgaccccctcacgtgcagctgttacgtaagccagtgctgaccgcaatgggactcttggccctactggatgaagagcagctgtgggcggaagtctctcaggccggtactgtgctggacagcaatcacaccgtgggggtgctggcctccgcacatcggcctcagggacctgccgacgcgtggagagccgctgtgctcatctacgcaagcgacgatacccgggctcacccgaaccgcagtgtggccgtcacactccgcctaaggggcgtaccgcccggtcctggcctggtgtacgtgacacggtacctggacaacggactctgttctcctgatggcgaatggcgaagattgggccgacccgtttttcccacggctgagcagtttagaaggatgcgggccgccgaggatcccgtggctgccgccccaagaccactgcccgccggcggacggttgactcttcggccggccttacgactcccctcactgctgttagtccacgtgtgcgcacggcctgagaaacccccagggcaggtcacccgactgagagcactgccccttacccagggccaactggtcctcgtgtggtccgatgaacacgttgggagtaaatgcctctggacctacgaaatccaattttcgcaggacggcaaggcgtatactccagtgtcgcggaaaccgagtacattcaacttgtttgtattttctcctgatactggggccgtttctgggagctacagagtgcgggcgctggattactgggctaggccagggcccttctccgacccagtgccctatctcgaggtgcctgtgcccagagggccgccatctcctgggaacccg

SEQ ID NO: 13930 - DNA, 1959 bp, synthetic construct
  misc_feature 1..1959: note = source = /note="Description of Artificial Sequence: Synthetic coding sequence"
  source 1..1959: mol_type = other DNA
atgaggccactccggcccagagcagcattgctggcgctacttgcctcattgctggccgcccctcctgttgctcccgccgaagctccacacctggtacacgtagacgcggcgcgcgccttgtggcctttgcggcgattttggcgctctaccggcttctgcccgcccctcccccactctcaagcagatcaatacgttctcagctgggaccagcagttaaacctggcgtacgtaggagcagttccccatagaggaatcaaacaagtgcggacccattggctgttagaattggtgaccacacgaggatcaaccggtcggggtctcagctacaatttcacgcatctggatgggtacctggacctcttgcgcgagaaccagctgcttccagggtttgaactgatggggtccgcctccggccacttcacagacttcgaggataagcagcaggtattcgagtggaaggaccttgtctcatccctggcccggcgctacatcggacggtacggattagctcacgtgtcaaagtggaacttcgagacgtggaacgagcccgatcaccacgatttcgacaacgtgagcatgactatgcagggattcttaaattattatgatgcatgctctgagggcctacgcgctgccagccctgctcttcggctgggcggtcccggtgattcattccacacaccgccccgtagccccctgtcctggggactgctgcggcactgccacgacggcacaaacttttttacgggtgaggctggagttcgcttggactatatctcgctccacaggaagggcgcccggagctcgatctctatcctggaacaggagaaggtggtggcccagcagattaggcagttattccctaagtttgcggatactcccatctataacgatgaagcagatcccctcgtcgggtggtctctgccccagccttggcgcgcggatgtgacctatgctgcaatggtggtgaaggtcatcgcacagcatcagaatcttcttctggctaacaccactagtgcgtttccttatgcgctgcttagcaacgataatgcattcctgtcctatcatccacacccgtttgcacaacgtacgctgactgctagattccaggtgaacaacactcgccccccccatgttcagttgctccggaaaccagtgctcacagccatgggcctgctggccctgctggatgaagagcaactatgggcggaagtgtcgcaagcgggcacagtcctggattcgaaccatacagtcggggtgctagcctcggcccaccgaccccagggccccgctgacgcctggcgcgcggcagttctaatctatgccagcgacgatacgagggcccacccaaatagaagcgtcgccgttacgctacgtctgagaggggttccacccggcccggggttggtgtatgtaactagatatctagataatgggctgtgttctcccgacggagagtggagacgtttggggcgacccgtgtttccgactgcagaacagtttagaagaatgagggcagcagaagacccggtagcagcggcgccgcgcccgctgcctgcgggaggtagacttaccttgcggcctgccttaagacttccaagtttgctacttgtccacgtatgcgctagaccagaaaagccacctggacaggttactagattgcgtgccctcccactcactcagggtcagcttgtattggtgtggagtgacgaacatgtgggatctaaatgcttgtggacctacgaaatccagttttctcaagacggaaaggcatatactccagtctcccgaaaaccctctacctttaatctgtttgtattctctccagacacaggtgccgtgagcggctcataccgggtgcgggccttggactattgggcgagacctgggccttttagcgaccctgtgccttacctggaggtgccagtgccgcgcggccccccctctcctgggaacccc

SEQ ID NO: 13931 - DNA, 1959 bp, synthetic construct
  misc_feature 1..1959: note = source = /note="Description of Artificial Sequence: Synthetic coding sequence"
  source 1..1959: mol_type = other DNA
atgcgacccctgcggccacgggccgcactgctggctcttctcgcttcgctcctcgcggcccctccagtggcaccggccgaggccccgcatctcgtgcacgtcgatgccgctcgggcgctgtggcctctgcgccgcttttggcgaagcaccggattctgcccgccgctgccgcactcacaggcggatcagtacgtgctgtcctgggatcagcaactgaacctggcctatgtgggcgccgtgccacatcgcgggatcaaacaggtcaggacccattggctgcttgaactcgtgacgactaggggctcgacggggcgcggactctcctacaacttcacgcacctcgacggatacctcgatctcctccgcgagaaccaactgctgccaggcttcgagttgatgggaagcgcttcgggacatttcaccgacttcgaggacaaacagcaagtgttcgagtggaaggatttggtgtcatcattggcccggcggtacatcggacgctacggactggcccatgtctctaagtggaacttcgagacttggaatgaaccggatcaccacgattttgacaatgtgtcaatgactatgcaggggttcctgaactactacgatgcctgcagcgaggggctgcgggctgcgtccccggcgctccgactcggaggcccgggtgatagctttcacactccgccacggtcaccactgagctgggggctgctccgccactgccacgacggaactaatttcttcactggagaggccggagtgcgcctggactacatctcactgcaccggaagggcgccagatcatcgatcagtatcctggaacaagaaaaggtcgtggcgcagcaaattagacagctgtttccgaaattcgcagacacgccgatctacaacgacgaagccgacccactggtgggatggtcgctgccacaaccctggcgcgctgatgtcacttacgcagccatggtagtgaaggtgatcgcacagcatcagaatctgctgctggctaataccacctcagctttcccttacgccctcctctcgaacgataacgcctttctgtcgtaccatccacaccccttcgcacagagaactctcaccgcgcgcttccaggtcaataacacgcgcccgcctcacgtgcagctcctcagaaagccagtcctgaccgccatgggcctgctcgccctccttgacgaggaacaactttgggctgaagtgtcccaggcgggcaccgtcctggatagcaatcatactgtgggtgtgctggcttcggctcaccgcccacaaggaccggcggatgcttggcgcgccgccgtgctcatctacgcctcagacgatacccgagcccaccccaaccggagcgtggccgtgacgctccgcctcaggggtgtacctccaggtccgggactggtgtacgtgacccgctacttggacaacggcctttgcagcccggacggtgagtggcgaaggctcggacgccctgtttttccgactgctgagcaatttcggaggatgcgcgcagccgaagatccagtggctgccgcacctcggccactcccagcgggaggtcgcctgacgttgcggccggccctgcggctgccgtcactgttgctggtgcatgtgtgcgcgcggcctgaaaaaccccctggacaggttacgagactcagggcgctgccactgacccagggccaactggtcctggtgtggtctgacgaacatgtgggctcgaaatgcctctggacttacgaaattcagttctcgcaggacggcaaggcttacaccccggtgtcgcggaagccttcgacctttaaccttttcgtgttctccccagatactggagcggtttccgggtcttacagggtcagagctctcgactactgggcgcggcctgggccgttctcagatcccgtcccgtatctggaggtcccggtcccacgcgggccgccctccccggggaaccca

SEQ ID NO: 13932 - DNA, 1959 bp, synthetic construct
  misc_feature 1..1959: note = source = /note="Description of Artificial Sequence: Synthetic coding sequence"
  source 1..1959: mol_type = other DNA
atgcgtcccctaagacctcgggccgcactgctggcactgctcgcatcgttgctggcagcacctcctgtcgcccccgccgaggcccctcacttggtgcacgtagacgctgcccgtgctctctggcccctgagaagattctggagaagtaccggcttctgccctcctctgccccatagccaggcggaccagtatgtgctgagctgggaccagcagcttaacctcgcttacgtgggcgctgtgcctcaccgggggatcaagcaggtccgtactcattggctgcttgaattggtgacaacgcgcggttccactggtcggggactttcgtacaacttcactcatctggatggttatctggatctgctgagagagaatcaattgctccctgggttcgagctgatggggagcgcatcagggcactttacagacttcgaggacaagcagcaagtcttcgaatggaaagatctggtgtcgagcctcgcaagaagatacattggcagatacgggctagcccatgtgtctaaatggaactttgaaacctggaacgagcctgaccatcacgactttgataatgtctccatgaccatgcaggggttcttgaattactacgatgcttgttctgaggggctgcgcgctgcttccccggccctgaggctcggaggaccaggagattcttttcacacccccccccgatcaccactaagctggggtctgctgcgacactgccacgacggaacaaacttctttactggcgaggcaggcgtgaggctggattacatttccctgcatcgtaagggggcacgatcatctatctctattttggaacaagagaaggtggtggcacagcagattcggcagctttttccgaagttcgccgataccccaatctacaatgacgaggcggatcctctggtggggtggtcacttccgcaaccatggcgcgcggacgtcacgtacgcagcgatggtggtaaaagtgattgcacagcaccagaatttgcttctggcgaacactacctcagcattcccctacgcgctcctgtccaacgacaacgcctttctcagctaccatcctcacccgttcgcgcagagaaccctcacggctcgctttcaggtcaataatactcgaccaccccatgttcagcttctacggaaacctgtgctcactgccatggggctcctagcactgttagatgaggaacaattgtgggcggaagtgtcccaggcaggtaccgtgctggactctaatcacaccgtcggcgtgctagccagcgcccatcggccacagggcccagctgacgcatggcgcgcagccgtgctgatctacgcgagcgacgacacgagagcgcatcccaataggtcagtcgctgtgacgttgaggcttcgcggggtgccgccaggcccaggcctcgtgtacgtgacacgctacctggacaacggactttgctctcctgacggcgagtggcgaagattgggccggcccgtatttccaaccgccgagcaattcagacgaatgagggcggctgaggacccagtggctgccgccccgaggccattgcccgccggtggtcggctgaccttgcgtcctgcgctccgcctgccatcactgttgctggtgcatgtgtgcgcgagacccgagaaaccacccggccaggtaacacgcctgagagccctccccctgacacagggacagcttgtgctcgtctggagtgatgagcacgtcggatcgaaatgcctctggacctatgagatccagttcagccaggatggcaaggcctatactcccgtgtcgcggaagccaagcacattcaatctcttcgtcttctcccccgacactggagctgtgagcggatcctaccgggtgcgggctctcgactactgggcccggcccggacctttttccgaccccgtgccatacctggaagtgcccgtcccgaggggaccaccctcccccgggaaccct

SEQ ID NO: 13933 - DNA, 1959 bp, synthetic construct
  misc_feature 1..1959: note = source = /note="Description of Artificial Sequence: Synthetic coding sequence"
  source 1..1959: mol_type = other DNA
atgcgccctcttagacctcgggctgcactgcttgcactccttgcctcgctgctcgcggcacctcccgtggcacctgcagaagcaccacatcttgtgcacgtggatgccgcgagagcactctggccacttcgacgtttctggcgatccactggattttgtccaccacttccacattcgcaggcagatcaatacgttctgtcctgggatcaacagttgaacttggcgtacgtcggggcagtgcctcaccgtgggattaagcaggtccgcactcattggctgcttgaactggtcaccaccagggggagtactgggcgcggactttcctacaactttactcatctcgatggatacctcgacctgcttagagaaaatcagctgttgcccggcttcgaacttatgggtagcgccagcggccacttcactgattttgaagataagcaacaagtgttcgaatggaaggatctggtgtcatccctggcacgacgctacattggccggtacggtctggcacatgtgagcaagtggaacttcgagacttggaacgagcccgatcatcacgatttcgacaatgtgtcaatgacgatgcaaggttttttgaactactacgatgcgtgttcggagggacttcgcgctgccagcccagcccttcgactgggaggcccaggggattcgtttcatactccacctcgctcacctctttcgtgggggcttctgcgacactgtcatgacggcaccaactttttcactggagaagcgggagtgcgactggactatatctcactgcatcggaagggcgcgcggtcctcaatctcgatccttgaacaagaaaaggtggtcgcacagcaaattcgccagctttttcctaagtttgcagatactcccatttacaacgatgaggcagatcctctcgtcggctggagccttccacagccttggcgcgctgacgtcacctacgctgcaatggtggtgaaagtgattgcgcagcatcaaaatcttctcctggccaacaccacctccgcatttccttacgctcttttgtccaacgacaatgcatttctgtcgtaccatcctcacccctttgcgcaacgaacgctgactgcaagattccaggtgaacaatacccgaccacctcatgtgcagctgctgaggaaaccagtgctgaccgcaatgggtctgctggcccttctcgatgaagaacagctttgggcagaagtgagccaggccgggaccgtccttgattcaaaccatactgtcggcgtcctggcaagcgctcatcggccacagggtccagcagacgcgtggagagcagcggtcctgatttacgcatcagatgatactagggcacatccaaaccggtcggtggctgtgactctgcgacttcgcggtgtgccacctggacctgggctcgtgtacgtgacccggtatctggacaacggtctgtgttcgcccgacggagagtggagaaggcttggtagaccagtctttccaaccgcagaacagtttcggaggatgcgcgccgcagaagatccagtggcagctgctccacggccacttccggcaggagggaggcttaccttgcggcccgcccttcgtctgccttcactgttgcttgtccatgtgtgcgcgaggcccgaaaagcctccgggacaggtgacccggttgcgagcactccctctcacccaaggtcagctcgtactcgtgtggagcgacgaacatgtgggatcgaagtgtttgtggacctacgaaattcaattctcccaagacggaaaggcatacactccagtgtctcgcaagccctccacctttaacctcttcgtgtttagcccagataccggagccgtgtcagggtcataccgagttcgtgcgcttgattactgggcacgcccgggccccttttcggacccagtcccgtatctcgaagtgcccgtgccgagaggaccaccctcaccaggaaatcct

SEQ ID NO: 13934 - DNA, 1959 bp, synthetic construct
  misc_feature 1..1959: note = source = /note="Description of Artificial Sequence: Synthetic coding sequence"
  source 1..1959: mol_type = other DNA
atgcgccccctgcgtccccgagctgcattgctcgcgctgcttgcctctctccttgccgcacctcctgtggcacccgcggaagcacctcaccttgtccatgtggacgcagcccgcgcactttggcctctgaggagattttggcgatccacgggattctgtcctcccctgcctcactcgcaagcggatcagtacgtgttgagctgggaccagcaactgaacctcgcatacgtgggcgcagtgccacacagaggcataaaacaagtccggacgcactggttgcttgaactcgtgaccaccagagggtccaccggtcggggactgtcctacaatttcacccatcttgacggttacctggatctgctgcgggagaaccagctcttgcctgggtttgaactgatgggatccgcttcaggtcactttaccgatttcgaagataaacaacaggtgtttgaatggaaagatttggtcagtagcctggcacggcgctacattggtcggtatggactggctcatgtgtcaaagtggaatttcgagacttggaatgaacctgaccaccatgattttgataacgtgagcatgacgatgcagggttttcttaactattacgacgcatgctccgaagggttgagagcagcgtcgcctgcactgagacttggcggtcccggtgattcatttcatactccccctagatcgcctcttagctggggattgctgcgacattgtcatgatgggaccaatttctttaccggagaggcaggcgtgaggcttgattacatctcgctgcacaggaagggagcgcgaagctcgatctcgatacttgagcaagaaaaggtggtggcccagcaaatccgccaattgtttcctaaattcgctgatactccaatttacaacgacgaagcagacccgcttgtcggatggtctttgccccaaccatggagagctgatgtaacgtacgcagccatggtcgtcaaagtcattgcacaacatcagaacctgttgcttgcaaatactacctcagcctttccatatgccctgctgtcgaacgacaacgcatttctttcgtaccatcctcatccgttcgcgcaaaggactctgactgcccgctttcaagtgaacaataccaggcctccccacgtgcagcttcttcggaagcctgtgctgaccgctatgggactccttgcactcctggacgaggagcaattgtgggcggaggtgagccaagcgggtactgtgctggactccaatcatactgtgggtgtgcttgcttcggcacaccggccacagggtcctgcagacgcatggcgggccgcggttctgatctacgcatcagacgacactcgcgcccatcccaatcgatcggtggccgtcaccctgcgtctcaggggtgtcccgccaggcccaggacttgtatacgtgacgcggtacctggataacggtctgtgtagccctgatggagaatggagaaggctggggcgcccggtttttcctaccgcagaacaatttaggagaatgcgtgccgcagaagatcccgtcgcagcagcaccccgcccactcccagcaggaggccgtcttactcttcggcctgccctgaggcttccatcgttgctcctggttcatgtatgcgcgcggcccgaaaagcctccaggtcaagtgactcgccttagagcccttcctctcactcagggccaactcgttttggtgtggagcgacgagcatgttggcagcaaatgcctgtggacttacgaaattcagtttagccaagatggaaaggcgtacacccccgtctcaaggaagccatcgacgttcaaccttttcgtgtttagccctgatacgggagcagtgtccggatcctacagggtccgtgccctggactactgggcaagaccgggtcccttctcggatcctgtcccatacctcgaggtgcctgtgcctagaggaccaccatcgcctgggaaccca

SEQ ID NO: 13935 - DNA, 1959 bp, synthetic construct
  misc_feature 1..1959: note = source = /note="Description of Artificial Sequence: Synthetic coding sequence"
  source 1..1959: mol_type = other DNA
atgcggccgttgcgtccgagagcggcccttctggcgcttctcgccagcctgctggcagcacctccagtggctcccgctgaggccccgcacttggttcacgtggacgccgctcgtgccctgtggcccttgcgccgcttttggagaagtacagggttttgtcctcctctgccgcatagccaggcggatcagtacgttctgagctgggaccagcagttaaacttggcatatgtaggtgctgtgccgcaccgcggtattaagcaggtgaggacgcactggctgctagaacttgtgacaacccgcggttctactggccgtggtctgagctataatttcactcacctcgatggttatcttgatctgctgcgagaaaaccagttgctaccggggttcgagctgatggggtccgcaagtggccatttcaccgactttgaggataagcagcaagtgtttgagtggaaggatctggtgtcctccctggcgagacgctacatcggccgctacggcctggctcacgtgagcaaatggaacttcgaaacttggaatgagccggatcatcacgacttcgacaacgtgtccatgaccatgcaaggcttcctgaattactacgacgcctgtagcgagggtttgagagcggcgtccccagccctgcgactcggcggcccgggcgactccttccatactccaccacgctcccctctgagttggggattgctgcggcattgccacgacggaactaacttttttactggtgaggcaggcgtgcgcctggactatattagcctgcaccgcaagggtgctcgcagcagcataagcatcctggagcaagagaaggtcgttgcgcagcagatccgacaactttttccgaagttcgccgatacccccatctataatgatgaggccgatcctctggtcggttggtccctgccacagccttggcgggcggacgtgacctacgcggcgatggtggtgaaggtaattgcgcagcaccagaatctgctgctggccaatacgactagtgcattcccatacgctctgttatcgaacgacaacgcttttctgagctaccaccctcatcctttcgcgcaacggaccctgactgcgagattccaagtgaacaatactcggccacctcacgttcagttactccgaaagccggtgctgactgcgatgggtctgctggctcttctggacgaggagcagctgtgggctgaggtgtcccaggcaggaaccgtcctggactctaatcatacggttggcgtcctggcgtctgctcacaggccacaaggcccagccgacgcgtggcgcgcagccgttctgatctacgcctcagacgataccagagcacaccctaatcgctctgtggctgttaccctgcgcttgcgcggggtccccccagggccaggccttgtttatgtgacgcgatatctcgacaacgggctctgctccccggacggcgagtggcgtcgcttagggcggcctgtcttcccgaccgccgagcagttccgacgaatgcgcgccgccgaggaccctgttgcggcggctccgcgtccacttcctgccggcggccgcctgacgctacgcccagccctgcgtctgcctagtctcctgctggtgcatgtctgcgcgcgtccggaaaaacctcctgggcaggtgacgcgcctgcgagccctgccgttgacccaaggtcaactggtcctggtctggagcgacgaacacgttgggtcgaaatgtctgtggacgtacgaaatccaatttagtcaagatgggaaagcctacacgccagtgtctaggaaaccgagcacctttaatctgttcgtgttctcccctgacacaggagccgtgagcggtagctaccgagtgcgcgcgctggattactgggcgcggccgggaccatttagcgacccggtaccgtatctggaggtgccggttcctcggggtccgccaagcccaggcaatcca

SEQ ID NO: 13936 - DNA, 1959 bp, synthetic construct
  misc_feature 1..1959: note = source = /note="Description of Artificial Sequence: Synthetic coding sequence"
  source 1..1959: mol_type = other DNA
atgcggcccctccgccctcgggcagcgctgctagcactcttggcttcgcttcttgccgctcccccagtagcgccagcagaggcgccccacctggtccatgtggacgccgcccgagcattgtggcccttgcggcggttctggaggtcaacaggcttctgccccccattacctcattcacaggctgaccaatacgtgttatcttgggaccagcagctcaacctggcctatgtcggagccgttccccatagggggattaagcaagtcaggacccattggctgctggagctggtgacaacaaggggctcaacgggccgcggtctgtcttacaacttcactcacttggatggttacctggacctactgcgcgaaaatcaactactgcctggctttgagctcatgggatctgcaagcgggcatttcacagactttgaggacaaacagcaggtgtttgaatggaaggatttggtgtcttcactggctcgcagatatatcgggcgctatggactggcccacgtttctaaatggaacttcgaaacatggaacgaacctgatcaccacgactttgacaatgtgagcatgactatgcaggggtttttgaattattatgatgcttgcagtgagggcttacgcgctgcttcacctgcactcaggctcgggggacctggagacagcttccacaccccccccaggagccccttgtcatggggtttgctgcgccactgtcacgacggtacgaacttctttaccggtgaagccggcgttcgacttgactacatctccctgcatagaaaaggagccagaagtagtatttcaatcctggagcaggagaaggtcgtggcacagcagataaggcaactgtttcccaagtttgctgacacgcccatttacaatgatgaggctgatcccctggttggatggagtctcccccagccctggcgggccgacgttacctacgccgcgatggtggttaaggtaatcgcccaacatcagaatctgctgttggctaatactacctctgcttttccatacgctctgctctctaatgacaatgcctttttaagttaccacccgcaccctttcgcacaacgaactctgacagcgcggttccaggttaacaatactcggcccccccatgtccagctattaagaaagccagtcctaacggctatgggacttctggctctactggatgaagaacagctgtgggccgaggtatctcaggcaggaacggttttggactcaaaccataccgtcggagttctcgcatccgcacatcggccgcaggggcctgcggatgcttggcgggccgcagtgctgatttacgccagcgatgacaccagggcccatcccaatcggagtgtcgcagtgacgttgcgtctacgcggcgtgcccccaggacccggtctggtgtacgttactagatatcttgataacggcctgtgttcccccgacggagaatggagaaggttgggaaggccagtctttcctaccgccgaacagtttcgtcgcatgagggccgccgaggacccggtcgctgcggcgccacggcccctccctgcgggcggacgtctcactttgcgccccgccctccgtctgccatcactgctactggtccatgtgtgtgcgcgaccagagaagcctccaggccaggtcacccggcttagggctctgccccttacacaaggccaactcgtgcttgtctggtctgacgagcatgttgggtctaagtgtctgtggacatatgagattcagtttagccaggacggaaaggcgtacaccccggtcagtcgaaagccaagcacctttaacctgttcgtgtttagcccagatacaggagctgtctccgggagttatcgagtaagagcactcgactactgggcgcgccccgggccatttagtgatccagtaccctacctcgaagtgcctgttccccgaggaccgccaagtccaggaaacccc

SEQ ID NO: 13937 - DNA, 1959 bp, synthetic construct
  misc_feature 1..1959: note = source = /note="Description of Artificial Sequence: Synthetic coding sequence"
  source 1..1959: mol_type = other DNA
atgcggccactcagacccagggccgcgctcctcgccctgctggcgtcgcttctggcagctccgccagtggcccctgcagaggcacctcacctggttcacgttgatgcagcaagagcactgtggcctctgaggagattttggcggtccaccggcttttgtccacctcttccacactcacaggcagaccaatacgtgcttagctgggatcagcaactcaatttggcatacgtgggagcagtgccccataggggtattaagcaagtgagaacccactggcttctggaactggtgactacccgaggaagcaccggtcgcgggcttagctacaactttacccacctcgacggatacctcgacctgctcagagaaaatcaactccttcctgggtttgagcttatgggttccgcgtcgggtcattttactgattttgaggacaagcaacaggtgttcgaatggaaagatctggtgtcatcgctggcacggcggtacatcggtagatacggactggcacatgtgtcgaaatggaacttcgaaacttggaacgaacccgatcaccatgatttcgataacgtcagcatgactatgcagggatttttgaactactacgatgcttgttcggaaggcctcagggcggcctcgcccgcactgcgccttggagggcctggtgactcatttcatacccctccgcgctcacctctgtcgtggggactcctgagacattgtcatgatggcaccaacttctttactggcgaagcaggagtgaggcttgattacatcagcctccacagaaaaggtgcaagatcgagcatttcgattctggaacaggaaaaggtggtggctcagcaaattcggcagctctttcccaaatttgcagataccccaatctacaacgacgaagcggatccactggtcggctggtcccttcctcagccttggagagcagatgtcacctacgccgccatggtcgtcaaagttattgcacaacaccagaatttgctcctggctaacacgaccagcgcattcccatacgcactgctgtcgaacgataacgcatttctttcgtaccatccacatccatttgcacaaagaaccctgactgcgcgctttcaagtgaacaatactcgacctcctcacgtgcagctgctgcgtaaacctgtcctcaccgctatggggctcctggccctgcttgacgaggaacaactgtgggcggaagtgagccaagcaggaaccgtcctcgactcaaaccatactgtcggagtgctcgcctccgcgcaccgccctcagggaccggcagatgcctggagggcggcagtgttgatatacgcatcagatgacacgcgagcgcacccaaatcggtcggtggctgtgactctgcgccttaggggagtgcctcccgggccgggactggtgtacgtgactcggtacctggataatggcctttgttccccggacggagaatggcgcagactcggtcggccagtgtttccgaccgcagaacagtttcggagaatgcgggcagcagaagatcccgtggcagcagctccacgccccctgccagccggtggtaggctgaccctccgccctgctcttaggctgccttcgcttcttctggtgcatgtatgtgcccgtccggaaaaaccaccaggacaagtcacccgccttagggcccttcctcttactcaaggacagctcgtccttgtctggtccgatgagcatgtcggatccaagtgtctgtggacctacgaaattcaattttcccaagatggaaaagcatatactccggtttcgagaaagccatcaacgttcaacctgttcgtgttctccccagataccggagcagtgtccggtagctatagggtcagagcacttgattattgggcgcgccctgggcctttctcggatccagttccataccttgaggtgccggtcccacgcggtccccccagccctgggaacccg

SEQ ID NO: 13938 - DNA, 1959 bp, synthetic construct
  misc_feature 1..1959: note = source = /note="Description of Artificial Sequence: Synthetic coding sequence"
  source 1..1959: mol_type = other DNA
atgaggccccttagacctcgagcagcacttctggcacttctcgcctccctccttgcggctccacccgtggcaccggccgaagccccccacctcgtgcacgtggacgcagcgagagcgctttggcctctgaggcgtttctggaggagcacgggattctgtccacctctccctcactcgcaagcagaccaatacgtgctgtcgtgggatcaacaacttaaccttgcatacgtgggtgccgtgcctcatcggggcattaagcaagtaagaacccactggctgctcgaactcgtcaccacgcgaggctccaccggtagggggctgtcctacaacttcacccatcttgacggatatcttgatctcctgcgggaaaatcagttgctgcctggcttcgagctcatgggatcggcctctggtcattttactgactttgaggacaagcagcaggtgttcgaatggaaggatcttgtgagctcgctcgctagaagatacattggtagatacggactggcccacgtgagtaaatggaattttgagacgtggaacgaacctgaccatcacgattttgataacgtgtccatgactatgcaaggctttctgaattactacgatgcctgttcggaagggctgagagcagcatcccctgcgctgcggttgggcggtccaggagattcgtttcacacgcctccaagatcgcccctctcctggggcctccttcgccattgtcatgacggaacgaactttttcaccggcgaagcaggagtgcgacttgattacatttcactgcatagaaagggcgctcgctcatccatctcaattcttgagcaagagaaggtggtcgcacaacaaatccgtcagcttttcccaaagtttgccgacactcctatttacaacgatgaagcagatccgctcgtcggttggtccctgccgcaaccttggcgtgctgacgtgacctacgcagcaatggtcgtgaaggtaattgcccagcaccagaatcttctgctcgccaacactactagcgcgtttccatacgcactgctgtcgaacgataacgcatttctttcataccacccccatccgtttgcacagcgcactctgaccgcacgatttcaagtgaacaacacccgcccacctcatgtgcaacttctgcgtaaaccagtgcttaccgcaatgggtcttttggccctgctcgacgaagaacagttgtgggccgaggtgtcacaagcaggcactgtgctggattcaaaccacaccgtgggagtcctggcctcggcgcacaggccgcagggacctgccgacgcctggcgggcagctgtcctcatctatgcatcagacgatactcgggcacatcctaatcgttcagtggcagttaccctgcggctgcgaggtgttccccctggacccggactggtgtatgtgacccgatacctcgataatgggctgtgctcgcctgatggagaatggagaaggcttggcaggccggtgtttcccaccgcggaacagtttcggcgaatgcgagcagcagaagatcctgtggcagcggcccccagacctctgccggcgggcggacgtctcactctccgacctgcactgagacttccgtctctgcttttggttcatgtctgcgcacgaccagagaagcctccaggacaagtcactcgtctccgggcgctgccgcttactcaaggacaactcgtgcttgtgtggtcggacgaacatgtcggtagcaaatgtctctggacttatgagattcagttcagccaggacggtaaagcctacacccccgtctcccggaagccttcaaccttcaaccttttcgtgttctcgcctgatactggtgccgtgtcaggttcgtacagggtgcgcgcactggattactgggccaggccagggccattttcagatcctgtgccttaccttgaagtcccagtgccaagaggtcccccctccccaggtaatccc

SEQ ID NO: 13939 - DNA, 330 bp, synthetic construct
  misc_feature 1..330: note = source = /note="Description of Artificial Sequence: Synthetic coding sequence"
  source 1..330: mol_type = other DNA
atggctctgtggatgcgcctgctgccgcttctggccctgttggcgctctggggtcctgacccagccgctgcattcgttaatcaacacttgtgcggatcgcacctcgtcgaggcactgtacctggtgtgcggtgaacgcggctttttctacactccaaaaactcgccgtgaagccgaggatctgcaggtgggccaggtggagctgggagggggacccggcgcaggctctcttcaaccgctggctctcgaaggatcgttgcagaagcggggaattgtcgagcagtgttgcacctcaatctgcagcctttaccagctggagaactactgcggt

SEQ ID NO: 13940 - DNA, 330 bp, synthetic construct
  misc_feature 1..330: note = source = /note="Description of Artificial Sequence: Synthetic coding sequence"
  source 1..330: mol_type = other DNA
atggcactgtggatgcgccttttgccgttgctggcccttctggctctgtggggtcctgaccccgcagccgcttttgtcaatcagcatttgtgtggatcccacctggtggaagcgttgtacctggtctgtggagagagaggattcttttacactcctaagactcggcgtgaggcggaagatctgcaagtgggacaagtggagctggggggtggccctggagccggaagcctccagccgcttgcgctcgaaggctcgctccagaaaagaggcattgtggaacaatgctgtaccagcatctgctctctctatcagcttgaaaactactgcgga

SEQ ID NO: 13941 - DNA, 330 bp, synthetic construct
  misc_feature 1..330: note = source = /note="Description of Artificial Sequence: Synthetic coding sequence"
  source 1..330: mol_type = other DNA
atggcactttggatgagactgcttcctctcctcgctctcctggccctgtggggaccggacccagcggccgcctttgtgaatcagcacttgtgcggaagccacctcgtggaagccctctatctggtgtgcggcgagagaggatttttctacaccccaaagacccgccgagaagcggaggacctgcaagtgggacaggtggagctggggggcggacccggagcgggcagcctccaaccgctggctctcgaggggtccttgcagaaacgtggaattgtggaacaatgttgcacctcgatctgcagcctgtaccagctcgaaaactactgtgga

SEQ ID NO: 13942 - DNA, 330 bp, synthetic construct
  misc_feature 1..330: note = source = /note="Description of Artificial Sequence: Synthetic coding sequence"
  source 1..330: mol_type = other DNA
atggctctatggatgcgacttctccctttgttagcactactcgccctctggggtccggatcccgcggcagccttcgttaaccaacacctttgtggcagtcatctggttgaagccctctaccttgtttgtggggaacgcggcttcttctacactcccaagacccgaagagaggcagaggacttacaggttgggcaagtagagttgggtggtgggcccggcgcaggttcactgcagcctctcgccttagagggctccctgcaaaagagaggaatagtagagcaatgttgtacctcaatctgctcactctatcagctggagaattattgtgga

SEQ ID NO: 13943 - DNA, 330 bp, synthetic construct
  misc_feature 1..330: note = source = /note="Description of Artificial Sequence: Synthetic coding sequence"
  source 1..330: mol_type = other DNA
atggctctgtggatgcggctgctgcctctcctggcactgctcgccctttggggccctgaccctgctgcagctttcgtcaatcagcatctctgcggctcgcacctggtggaggccttgtacctcgtctgtggagagagaggattcttctacacccccaaaactaggcgcgaggctgaagatctccaggtggggcaggtggagctgggcggtggaccgggtgccgggtccttgcagccactggcactggagggctcgctgcaaaagcgcggtatcgtggaacaatgctgcacttcgatctgcagcctgtaccaactggaaaactactgtggc

SEQ ID NO: 13944 - DNA, 330 bp, synthetic construct
  misc_feature 1..330: note = source = /note="Description of Artificial Sequence: Synthetic coding sequence"
  source 1..330: mol_type = other DNA
atggcactgtggatgcgcctgctccctctgctcgccctgctcgcattgtggggtcctgatcctgctgcagcgttcgtgaatcagcatctctgcggatcccacctggtcgaagcgctttacttggtttgtggagaacgtggctttttctacactccaaagaccaggagagaagccgaggatttgcaagtggggcaggtggagcttggtggagggccgggtgcagggagccttcaaccgcttgctcttgagggatcgcttcaaaagcgcggcattgtcgaacaatgctgtacttcaatctgttcgctctatcaactggagaactactgtggg

SEQ ID NO: 13945 - DNA, 330 bp, synthetic construct
  misc_feature 1..330: note = source = /note="Description of Artificial Sequence: Synthetic coding sequence"
  source 1..330: mol_type = other DNA
atggcgctctggatgcggttactccccctattggccttgctggccctttggggtcctgaccctgccgccgccttcgttaaccagcacctttgcgggtcacacctggtggaggcactttatcttgtctgtggcgaacgaggttttttttacaccccaaagacgcgccgggaggcagaggatctccaggtcggtcaggtggagctcggcggcggacccggcgcaggcagcctgcagccactcgctttggaggggtccctgcagaagcggggcatcgttgagcagtgctgtacctctatttgcagtttgtatcagcttgaaaattattgtggt

SEQ ID NO: 13946 - DNA, 330 bp, synthetic construct
  misc_feature 1..330: note = source = /note="Description of Artificial Sequence: Synthetic coding sequence"
  source 1..330: mol_type = other DNA
atggcgctgtggatgcgcttgctgccgctcctcgccctgttggcactgtggggaccggacccggccgcagcgttcgtgaaccagcatctctgtggatcccatctggtggaggccctgtacctcgtctgcggtgagcgcggtttcttttacaccccgaagactcgccgggaggcagaagatctccaggtcggtcaagtggagctgggaggaggaccgggggccggatcgctccaaccccttgcactcgaaggctcactccaaaagcgagggatcgtggagcagtgttgcacctcaatctgcagcctgtaccaactcgagaattactgtgga

SEQ ID NO: 13947 - DNA, 330 bp, synthetic construct
  misc_feature 1..330: note = source = /note="Description of Artificial Sequence: Synthetic coding sequence"
  source 1..330: mol_type = other DNA
atggctctttggatgcgcctcctgcctcttttggcattgctggctttatggggacctgaccccgcagctgcattcgttaatcaacacctgtgtgggtcacatctcgtagaagccctgtaccttgtttgcggggagcggggttttttttatacccccaagactcgccgcgaagccgaggatttacaggtgggccaggtagagttgggaggtggacccggggccggaagcttacagcccttagctctggagggttccctgcaaaaaagaggtatcgtcgaacaatgttgcacatcaatttgctccctttatcagctggagaattactgtggg

SEQ ID NO: 13948 - DNA, 330 bp, synthetic construct
  misc_feature 1..330: note = source = /note="Description of Artificial Sequence: Synthetic coding sequence"
  source 1..330: mol_type = other DNA
atggcactttggatgcgcctgcttcctttgctggcccttctggcattgtggggacccgaccctgcagccgcatttgtgaatcagcatctctgtggatcacatcttgtggaggcgctgtacctggtgtgtggggagcggggcttcttttacacccctaagactcgtcgagaagccgaagatctccaggttggccaagtcgagcttggtggcggccctggcgcggggagccttcagccgttggcgctggaggggtcgcttcaaaagcggggaatagtggaacaatgctgcacctctatctgttccctgtaccaattggagaactattgtgga

SEQ ID NO: 13949 - DNA, 330 bp, synthetic construct
  misc_feature 1..330: note = source = /note="Description of Artificial Sequence: Synthetic coding sequence"
  source 1..330: mol_type = other DNA
atggcgctctggatgaggctactgcccctgctcgctctgttagcgctctggggaccagatcctgcagccgcattcgtgaaccaacacttatgcgggtcacacctcgtagaggccctgtatttggtctgtggcgagcgtggatttttttatacccctaagactcgtcgtgaagcggaagatttgcaggtcggacaggtcgagctgggcggtgggcctggcgctgggagtctgcagcctctcgcccttgaagggtctttgcagaagcgcggcatcgtcgagcagtgctgtacatctatctgctccctttatcaactcgagaactattgtggg

SEQ ID NO: 13950 - DNA, 330 bp, synthetic construct
  misc_feature 1..330: note = source = /note="Description of Artificial Sequence: Synthetic coding sequence"
  source 1..330: mol_type = other DNA
atggccttgtggatgaggctgcttccactgctagcgctgctcgctctctggggtcctgatccagctgccgcctttgttaaccagcacctgtgtgggtcacatttggtcgaagctctgtatctggtttgtggggagcgtggtttcttttatactcccaagacacgcagggaggccgaggacctgcaagtgggtcaggtggaactcggaggagggcctggtgccgggagcctccagcccttggcgcttgagggttcccttcagaaacgggggattgtggagcagtgctgtacctctatttgcagtctgtatcagctggagaattattgcggg

SEQ ID NO: 13951 - DNA, 330 bp, synthetic construct
  misc_feature 1..330: note = source = /note="Description of Artificial Sequence: Synthetic coding sequence"
  source 1..330: mol_type = other DNA
atggcactttggatgagactcttgccactccttgccctccttgcactctggggccctgatcctgcagcagcctttgtcaaccaacatctgtgtgggtcgcatctggtcgaggccctgtaccttgtgtgtggagaaagaggctttttctacactcctaaaactcggcgcgaggcagaggacctccaggtgggccaagtcgagctgggaggaggcccgggagctgggagccttcagccacttgcattggagggtagcctgcaaaagcgcgggatcgtggagcagtgctgtacctcgatatgctctctgtaccagctggaaaactactgtgga

SEQ ID NO: 13952 - DNA, 330 bp, synthetic construct
  misc_feature 1..330: note = source = /note="Description of Artificial Sequence: Synthetic coding sequence"
  source 1..330: mol_type = other DNA
atggctttatggatgcgcctcttgccccttctggctctgctggccctgtgggggcccgatcctgctgccgcttttgtcaatcagcatctctgcggctcgcacctagtggaggcgctgtaccttgtttgcggagaacgaggtttcttctataccccaaagactaggcgggaggcagaggacttgcaagtcggccaggtcgaactgggaggcggcccaggagctgggtccttgcagccactcgcactcgaaggaagtcttcaaaagagaggcatcgtggaacaatgttgcacttccatttgcagtttgtatcagctggaaaactactgcggc

SEQ ID NO: 13953 - DNA, 330 bp, synthetic construct
  misc_feature 1..330: note = source = /note="Description of Artificial Sequence: Synthetic coding sequence"
  source 1..330: mol_type = other DNA
atggccctctggatgcgccttctgcccctgctggccctgttggccctgtggggcccggaccccgccgcagcatttgtgaaccagcatctgtgtggctcacaccttgtcgaggcactgtacttagtttgcggagagagaggtttcttctacacccccaagactcggcgggaagcggaggacctacaggtgggacaggtagagctaggagggggtcccggcgctggaagtctccagcccctggccctggagggatctctccagaaacgggggatcgtggaacagtgttgtaccagtatttgcagtttgtaccaattggagaattactgtggc

SEQ ID NO: 13954 - DNA, 330 bp, synthetic construct
  misc_feature 1..330: note = source = /note="Description of Artificial Sequence: Synthetic coding sequence"
  source 1..330: mol_type = other DNA
atggctttgtggatgcggctcctgccgctcctcgcactcctcgcgctgtgggggccagatcctgccgcggcatttgtcaaccagcatctctgcgggtcgcaccttgtggaagctctgtacctggtgtgcggggagcggggcttcttctacaccccgaaaacccgccgggaagcagaagatctgcaagtgggccaggtggagctcggaggaggacctggtgccgggtcacttcaaccgctcgccctggagggttcccttcagaagagaggtattgtggaacagtgctgtacttcgatttgcagcctgtaccagctggaaaactactgcgga

SEQ ID NO: 13955 - DNA, 330 bp, synthetic construct
  misc_feature 1..330: note = source = /note="Description of Artificial Sequence: Synthetic coding sequence"
  source 1..330: mol_type = other DNA
atggccctctggatgcgactccttccgctgctggctttgcttgcactctggggaccggacccggcagccgctttcgtgaaccaacatctgtgtggatcgcacctggtggaagccctttacttggtgtgcggcgaaaggggttttttctacacccctaagactcggcgcgaggcggaggatctgcaagtcggtcaggtggagttgggcggcggccctggtgctggatcgctccagccactggcactggaaggaagccttcagaaacgcggaatcgtggaacaatgctgcacgtctatctgctctctgtaccagctggagaattactgtggg

SEQ ID NO: 13956 - DNA, 330 bp, synthetic construct
  misc_feature 1..330: note = source = /note="Description of Artificial Sequence: Synthetic coding sequence"
  source 1..330: mol_type = other DNA
atggctctgtggatgcgccttctgccactgctcgccctgctggccttgtgggggccggacccggcggcggccttcgtgaaccaacacctgtgtggatcgcatctggtggaagctctctacctggtgtgtggagaacggggattcttttacactcctaaaacccgccgagaggccgaggatctgcaagtcggacaggtagagctgggaggcggtcctggcgcgggatcgctgcagccgctggctctggaaggaagtctccagaagagaggaatcgtcgaacagtgctgcaccagcatctgctcactctaccaactcgagaattactgtggc

SEQ ID NO: 13957 - DNA, 330 bp, synthetic construct
  misc_feature 1..330: note = source = /note="Description of Artificial Sequence: Synthetic coding sequence"
  source 1..330: mol_type = other DNA
atggccctctggatgagacttctcccacttctcgcactcctcgcactttggggtcctgacccagcagcagcctttgtgaatcaacacctttgtggatcacatctggtggaggcgctctatctggtctgtggtgaaaggggttttttctacacccctaagacccgtagggaagctgaggacctccaggtgggccaagtggagctcggagggggacctggagcaggtagcttgcagcctctggcactcgaaggatcactgcagaaaagaggaatagtggagcaatgctgtacttccatctgcagcctttaccaactcgaaaactactgcggg

SEQ ID NO: 13958 - DNA, 330 bp, synthetic construct
  misc_feature 1..330: note = source = /note="Description of Artificial Sequence: Synthetic coding sequence"
  source 1..330: mol_type = other DNA
atggcactgtggatgagactgctgccgctgctggccctgctggctctgtggggaccggaccctgccgccgctttcgtgaatcagcacttgtgcggatcgcatctggttgaagcgctctacctggtctgcggagaaagagggttcttctacaccccaaagacgcggcgggaagctgaggacctgcaagtgggacaggtggagctcgggggaggacctggagcgggaagcctccaaccgctggctcttgagggatcgctccaaaagaggggtattgtggaacagtgttgcacttcgatctgctcgctctaccaactcgagaactattgcgga

SEQ ID NO: 13959 - DNA, 330 bp, synthetic construct
  misc_feature 1..330: note = source = /note="Description of Artificial Sequence: Synthetic coding sequence"
  source 1..330: mol_type = other DNA
atggcactctggatgcgattgcttcctttactggcgttattagcactatggggcccagacccagccgccgccttcgtcaaccaacacctgtgcggctcacatcttgtcgaggccctatatcttgtgtgtggggaacgaggctttttctatacaccgaagacacgaagagaagccgaagacctgcaggtgggccaggttgagcttggaggtggcccaggggcaggaagtctccagcccctggcactcgaaggcagcttgcagaagcgaggaatcgtcgaacagtgttgtactagcatatgttccctgtaccaactagagaactattgtggc

SEQ ID NO: 13960 - DNA, 330 bp, synthetic construct
  misc_feature 1..330: note = source = /note="Description of Artificial Sequence: Synthetic coding sequence"
  source 1..330: mol_type = other DNA
atggcactctggatgcgtctattgcctttgttggccctgctggcactgtggggccccgatcccgcagcggccttcgtgaaccagcacctgtgcgggagccacctggtcgaagccttatacctcgtgtgtggagaaagaggatttttttacacgccaaagacccggcgcgaggcagaggacctacaagtcggacaggtggaactgggaggtggcccgggcgcaggtagcctccagcccctggcactggaggggagcctgcagaagcgcgggatagtggagcagtgttgcacatcaatatgtagcctgtaccagctcgagaattactgtgga

SEQ ID NO: 13961 - DNA, 330 bp, synthetic construct
  misc_feature 1..330: note = source = /note="Description of Artificial Sequence: Synthetic coding sequence"
  source 1..330: mol_type = other DNA
atggcactctggatgaggctgctaccacttctggccctcctggccttgtggggccccgatccggcggccgcttttgtcaaccaacatttgtgcggtagtcatctggtggaagctctctatttggtgtgcggcgagcgagggtttttctataccccgaagacacgacgcgaagcagaggaccttcaggtgggtcaggttgagctggggggaggacccggcgctggcagcctgcagcctctagcgctcgaaggcagcctccaaaagcgcggaatcgtagagcagtgctgcacatcgatctgctccttgtatcaattggaaaactactgtgga

SEQ ID NO: 13962 - DNA, 330 bp, synthetic construct
  misc_feature 1..330: note = source = /note="Description of Artificial Sequence: Synthetic coding sequence"
  source 1..330: mol_type = other DNA
atggctctttggatgcgcctccttcctctgctggccttgctggcactgtggggtcccgaccctgcagctgcgttcgtgaatcaacacctgtgcggatcccatttggtggaggccctctacctggtttgcggagaaaggggttttttctacaccccaaagaccagacgagaggccgaagatctccaggtgggacaggtagaactcggcgggggaccgggggcgggatcgcttcagccactggctctggaaggctctttgcagaaaaggggcattgtcgagcagtgttgtactagcatctgctcattgtaccaactcgagaactattgcgga

SEQ ID NO: 13963 - DNA, 330 bp, synthetic construct
  misc_feature 1..330: note = source = /note="Description of Artificial Sequence: Synthetic coding sequence"
  source 1..330: mol_type = other DNA
atggccctttggatgagattgttaccacttcttgcacttctagcattatggggtcctgacccagcagcagctttcgtcaatcaacatctctgcggaagtcacttggtggaagccctctacctcgtctgtggagaacggggatttttttatacccccaaaacacgcagggaggctgaagatctgcaggtgggccaggtggagcttggaggagggcctggtgccggctcccttcaacctttggctctagagggcagtttgcaaaaaaggggaatagtcgagcaatgttgtacctcaatttgttccctctatcagctcgaaaattattgcggc

SEQ ID NO: 13964 - DNA, 330 bp, synthetic construct
  misc_feature 1..330: note = source = /note="Description of Artificial Sequence: Synthetic coding sequence"
  source 1..330: mol_type = other DNA
atggccttgtggatgcggctgcttcctttgctggcactcctggcgctgtgggggccagacccggccgcggcgttcgtgaaccagcatctttgtggctcccacctcgtcgaagcgttgtacctggtgtgcggagaacgcggattcttctacaccccgaaaacgaggagagaagcagaagatctgcaagtgggacaggtggaactgggtggaggacctggggccggatcgctgcagccgctggcgctcgagggttcgctccagaagcgcggaatcgtggaacagtgctgcacttctatctgctccctctaccagctggagaattactgtgga

SEQ ID NO: 13965 - DNA, 330 bp, synthetic construct
  misc_feature 1..330: note = source = /note="Description of Artificial Sequence: Synthetic coding sequence"
  source 1..330: mol_type = other DNA
atggccctctggatgaggctccttcctttgctcgctctcctcgcactgtggggccctgatccagcagccgccttcgttaaccaacatctgtgtgggtcacatcttgtggaggccctttaccttgtgtgtggagaaagagggtttttctatacccctaagactagaagagaggcagaagatctgcaagttggtcaggtggaactgggcggcggacctggcgcaggttcgctgcagccacttgcgcttgaggggtccctgcagaagcgcggtatcgtcgaacaatgctgtacttcgatttgttcattgtaccagctcgaaaactactgcggt

SEQ ID NO: 13966 - DNA, 330 bp, synthetic construct
  misc_feature 1..330: note = source = /note="Description of Artificial Sequence: Synthetic coding sequence"
  source 1..330: mol_type = other DNA
atggcactttggatgcggttgctgcctctgctggcactcttggcactttggggcccggaccctgcagccgccttcgtgaaccaacacctgtgcgggtcacatctcgtcgaggcactttacctcgtgtgtggagagcgcggattcttttacacccccaagaccaggcgtgaggccgaagatcttcaagtgggtcaagtggaactgggaggaggaccaggggcgggatcgcttcaaccccttgctcttgaaggatcgctccagaaaagagggatagtggaacagtgctgtacctcgatttgttcactttaccaacttgaaaactactgcgga

SEQ ID NO: 13967 - DNA, 330 bp, synthetic construct
  misc_feature 1..330: note = source = /note="Description of Artificial Sequence: Synthetic coding sequence"
  source 1..330: mol_type = other DNA
atggccctgtggatgcgactcctgccgctcttggcccttcttgcactgtggggaccggaccctgcggcggctttcgtgaatcagcatctgtgcggatcgcaccttgttgaggccttgtacctggtgtgcggagagagaggttttttctacactcccaaaaccaggcgcgaagctgaggatctccaagtaggccaggtcgaattgggaggaggcccaggagcaggttcgctgcaacctttggccctggaaggatcactccaaaagcggggtatcgtagagcagtgttgcacgagcatctgctccctctaccagctcgaaaactattgtggg

SEQ ID NO: 13968 - DNA, 330 bp, synthetic construct
  misc_feature 1..330: note = source = /note="Description of Artificial Sequence: Synthetic coding sequence"
  source 1..330: mol_type = other DNA
atggccttatggatgcggctgctgccgcttctcgcacttctggcactctggggcccagatcctgctgcagcttttgtgaaccagcacctttgtgggagccacctcgtggaggctctatacctggtctgtggggaacgcgggttcttctacacccccaagacaaggcgcgaagcagaggacctccaggtcggccaggtggagcttggcggcggcccgggtgcaggtagcctccagccccttgctctagaaggcagcctgcaaaagaggggcatcgttgagcagtgttgcaccagtatctgttctttgtatcaactggaaaattattgcggc

SEQ ID NO: 13969 - DNA, 330 bp, synthetic construct
  misc_feature 1..330: note = source = /note="Description of Artificial Sequence: Synthetic coding sequence"
  source 1..330: mol_type = other DNA
atggcattgtggatgagacttcttccacttcttgcgctgctggcactctggggaccagatcccgcagcggcctttgtcaaccagcacctgtgtgggtcacacctcgtggaagcactgtaccttgtgtgtggagaacgcggcttcttttacacgcccaagactcgtcgagaagcagaagatcttcaggtgggccaggtggagctgggaggtggacctggagccggtagccttcaacccttggcgcttgagggttcacttcaaaagagaggaattgttgaacagtgttgtacttcgatctgttccctgtaccagctggagaattactgtggt

SEQ ID NO: 13970 - DNA, 330 bp, synthetic construct
  misc_feature 1..330: note = source = /note="Description of Artificial Sequence: Synthetic coding sequence"
  source 1..330: mol_type = other DNA
atggcactctggatgaggctgttaccgttgcttgcgctgctcgcactttggggaccagacccagccgccgcctttgtgaaccagcacctttgcgggtcccacttagtagaggccttgtatttagtgtgcggagagcgcggttttttctataccccaaagacaagacgggaggccgaggacttacaggtcggacaggttgagcttggcggtgggcctggggctgggtcgctgcagcccttagcattggaaggttctttgcagaagcgggggatcgttgaacagtgctgtaccagtatttgcagcctctatcagcttgagaactactgtggt

SEQ ID NO: 13971 - DNA, 330 bp, synthetic construct
  misc_feature 1..330: note = source = /note="Description of Artificial Sequence: Synthetic coding sequence"
  source 1..330: mol_type = other DNA
atggcactttggatgaggctgctgcctctcttggcccttttggccctctgggggcccgaccctgctgcagcctttgtgaatcagcacctgtgcggctcacacctcgttgaggctctctatctcgtctgcggagagcgcggatttttctacacacctaagactcggcgtgaggctgaagaccttcaagtgggtcaagtggagctgggtggggggccaggtgccgggtccctgcagcccctcgccttagagggctccctgcagaagcggggcattgtcgaacagtgttgtacttccatttgcagtctttatcaactcgaaaactactgcggt

SEQ ID NO: 13972 - DNA, 330 bp, synthetic construct
  misc_feature 1..330: note = source = /note="Description of Artificial Sequence: Synthetic coding sequence"
  source 1..330: mol_type = other DNA
atggcgctgtggatgcggcttctgcccctgctggcgctcctggcgctctggggacccgacccagccgccgccttcgtgaaccagcatttatgtgggagtcacctggttgaagcactgtacctggtctgcggcgagcgaggcttcttttacacacccaagacgcgtagagaggcagaggatctccaagttggtcaggtggagctggggggtgggcccggagccggttccctacagcctttggccctagagggatcactgcagaaaagaggcattgtcgaacagtgctgcaccagcatatgttctctctatcaactagagaattattgtgga

SEQ ID NO: 13973 - DNA, 330 bp, synthetic construct
  misc_feature 1..330: note = source = /note="Description of Artificial Sequence: Synthetic coding sequence"
  source 1..330: mol_type = other DNA
atggccctgtggatgagactgcttccactgttggcgcttctagcactatgggggccagatcccgccgctgccttcgttaaccagcacctctgcggatctcacctagtagaagccctatacctcgtgtgtggggaacgcgggttcttctatactccaaaaacacggcgtgaggccgaagatctccaggttgggcaggttgaactgggaggagggcctggggctgggtcacttcagccacttgctcttgaagggtctctacagaagaggggaattgtggagcagtgttgtacttcaatatgttccctttaccagctggagaactactgtggg

SEQ ID NO: 13974 - DNA, 330 bp, synthetic construct
  misc_feature 1..330: note = source = /note="Description of Artificial Sequence: Synthetic coding sequence"
  source 1..330: mol_type = other DNA
atggccctatggatgcgattgctcccactactagccctcctcgctttgtggggtcctgatccagcggcagcgtttgtcaaccagcacctctgcggaagtcaccttgtggaggcactctatcttgtatgtggtgagcgtggattcttctacacgccgaagacccgtcgcgaggccgaggaccttcaggtaggccaggttgagctgggcgggggacctggggctggatccctacaaccgttggccctagaaggctcgttacagaaacgcggtatcgtcgaacagtgctgcacgtctatctgtagtttgtatcaactcgagaattactgcggc

SEQ ID NO: 13975 - DNA, 330 bp, synthetic construct
  misc_feature 1..330: note = source = /note="Description of Artificial Sequence: Synthetic coding sequence"
  source 1..330: mol_type = other DNA
atggcactctggatgcggctgctcccgctgctggcgctgttggcgctctggggccctgatcctgccgccgcttttgtcaaccagcacttatgtgggagtcaccttgtggaagccttatatctagtgtgcggagagcgcgggttcttctacactccaaaaacgcgccgggaagccgaagatctccaggtcggacaggtggaactaggtggcggccctggcgcaggatctcttcagcctctcgccctggaggggtcacttcagaagcggggtatcgtggaacagtgttgtaccagcatttgcagcctgtaccagctggagaactattgtggc

SEQ ID NO: 13976 - DNA, 330 bp, synthetic construct
  misc_feature 1..330: note = source = /note="Description of Artificial Sequence: Synthetic coding sequence"
  source 1..330: mol_type = other DNA
atggcgctgtggatgcgccttctgccactgttggcactgctggcgctttgggggccagaccctgcagcagccttcgtgaaccaacacctgtgcggtagccatctggtcgaggcgctctaccttgtctgcggagagcgcggatttttctacaccccgaaaacccggagggaggctgaagatctgcaagtgggacaggtcgagctggggggaggtccaggggctggatcgctccagcctcttgcccttgagggatcgcttcagaagcggggcatcgtggaacagtgttgtacctcaatttgtagcctctaccaactggaaaactactgtgga

SEQ ID NO: 13977 - DNA, 330 bp, synthetic construct
  misc_feature 1..330: note = source = /note="Description of Artificial Sequence: Synthetic coding sequence"
  source 1..330: mol_type = other DNA
atggctctgtggatgcggctccttccccttcttgccttgttggccctttggggaccggatcctgcagccgcttttgtgaatcaacacctttgtggaagtcatctggtcgaagcactttaccttgtttgcggggagagaggattcttttacaccccaaagacgcgtcgcgaagccgaggacctgcaagtgggccaggtcgaactggggggcggacccggtgcaggtagcctgcaacctcttgcattggaaggatcgttgcagaaaagagggattgtcgaacagtgttgcacctcaatctgttcgttgtatcaactcgaaaactactgcggc

SEQ ID NO: 13978 - DNA, 330 bp, synthetic construct
  misc_feature 1..330: note = source = /note="Description of Artificial Sequence: Synthetic coding sequence"
  source 1..330: mol_type = other DNA
atggctttgtggatgcggttgcttccccttctggcccttctggccctctggggtccggatcccgctgccgcattcgtcaaccagcatttgtgcggatcacacttggttgaggccctgtatcttgtttgtggcgaaaggggatttttctacaccccaaagaccaggagagaagcagaagacctccaggtgggacaggtcgaactcggaggggggcccggagccggaagtctgcagcccttagccttggaaggcagtctccagaaaagaggcatcgtggaacagtgttgtacctccatctgcagcctgtatcagcttgagaactactgtggg

SEQ ID NO: 13979 - DNA, 330 bp, synthetic construct
  misc_feature 1..330: note = source = /note="Description of Artificial Sequence: Synthetic coding sequence"
  source 1..330: mol_type = other DNA
atggcgctctggatgcgcctgcttccgcttctggccctgctggctctctggggaccggatcctgcggccgctttcgtgaatcaacacctctgtggctcgcatctcgttgaagcactgtacctggtgtgcggagagcggggattcttctacacccctaagactcggcgcgaagccgaggatctgcaagtcggacaggtggaattgggaggtggtcccggcgccggctcccttcagccgctggcgttggagggatctctccaaaagagagggatcgtggaacaatgctgtacctcgatctgctcactttaccagctggaaaactactgcggc

SEQ ID NO: 13980 - DNA, 330 bp, synthetic construct
  misc_feature 1..330: note = source = /note="Description of Artificial Sequence: Synthetic coding sequence"
  source 1..330: mol_type = other DNA
atggcactttggatgagactccttcctctgctggcacttctggcgctgtggggtccagaccctgccgcagcatttgtgaaccaacatttgtgtggctcccatttggtcgaagccttgtacctggtctgtggcgaacgcggttttttctacacccctaagacccggcgtgaagcagaggatctgcaagtgggacaggtggaactgggtggagggcctggtgcaggttccctgcaaccacttgctctggagggatcgctgcagaaaaggggaatagtggagcagtgttgcacttcgatatgctcactctaccaactggaaaactattgcggg

SEQ ID NO: 13981 - DNA, 330 bp, synthetic construct
  misc_feature 1..330: note = source = /note="Description of Artificial Sequence: Synthetic coding sequence"
  source 1..330: mol_type = other DNA
atggcactgtggatgcggctgcttccacttcttgctctgttggcgctgtggggacctgaccctgcagcagcctttgtgaaccagcatctgtgcggaagccatctcgtggaagcactctacctggtgtgtggcgaacggggattcttctacacccctaaaactagacgcgaagccgaggacctgcaggtgggccaagtggagctgggcggcggaccaggagcaggatccttgcaaccacttgccctggagggatcgcttcaaaagaggggtatcgtggaacagtgttgtacttccatttgtagcctttaccagctggagaactactgcgga

SEQ ID NO: 13982 - DNA, 330 bp, synthetic construct
  misc_feature 1..330: note = source = /note="Description of Artificial Sequence: Synthetic coding sequence"
  source 1..330: mol_type = other DNA
atggcactctggatgcgcctcctccctctgctggccctgctggcactctggggccccgatcctgccgccgcattcgtgaaccagcacctgtgcggctcccatttggtagaagccctgtatcttgtctgtggcgagcgtggtttcttctacactccaaaaacacgtagggaagccgaagacctccaggttggccaagtggagctcggcggcggccccggcgctggaagtctccaacccctcgctcttgaaggaagtctgcagaagagaggcatcgtggagcagtgctgcacctccatttgttcactttaccagctggagaactactgtgga

SEQ ID NO: 13983 - DNA, 330 bp, synthetic construct
  misc_feature 1..330: note = source = /note="Description of Artificial Sequence: Synthetic coding sequence"
  source 1..330: mol_type = other DNA
atggctctgtggatgaggctccttcctctcctggcattattagcattatggggcccggatcctgcggcggcatttgtcaaccagcacttatgcgggtcccacttggttgaagccctctatcttgtctgcggcgaacggggctttttctatacgccgaaaactagaagagaagccgaagatttacaggttggtcaagttgagcttggaggtggacctggcgcaggctctttacaaccgctggccctggagggaagtctgcaaaagcgcggcatcgtggaacagtgttgtacgtctatctgttctctctatcagctggaaaactattgcggc

SEQ ID NO: 13984 - DNA, 330 bp, synthetic construct
  misc_feature 1..330: note = source = /note="Description of Artificial Sequence: Synthetic coding sequence"
  source 1..330: mol_type = other DNA
atggccttatggatgagactactgcctctgttagctttgcttgctctttgggggcctgaccccgctgccgccttcgttaatcagcacttgtgcggttctcacttggtggaggctctgtacctagtatgcggtgaaagaggtttcttctatacaccgaaaacccgcagagaagccgaggatttgcaggtcggccaggtcgaattaggaggaggcccaggcgctggtagtctccaacctctagcccttgaaggatccctgcagaagcggggcatagttgaacagtgctgtacttccatttgttccctctaccagctggaaaactattgtggc

SEQ ID NO: 13985 - DNA, 330 bp, synthetic construct
  misc_feature 1..330: note = source = /note="Description of Artificial Sequence: Synthetic coding sequence"
  source 1..330: mol_type = other DNA
atggccctctggatgcgccttctgcctctgctggccctcctggcactttggggtccagatcctgcggctgcatttgtgaaccagcacctgtgtgggtcccatctggtagaggcactctatctggtgtgtggcgaaagagggttcttctatactcccaaaacacgccgagaagctgaagacctccaggttggacaagttgaactgggaggagggcccggtgccggatccctccagcccctggcattggagggaagcttgcagaagcggggaatcgttgagcagtgctgtacttcaatctgctcactctaccagctcgagaattattgcgga

SEQ ID NO: 13986 - DNA, 330 bp, synthetic construct
  misc_feature 1..330: note = source = /note="Description of Artificial Sequence: Synthetic coding sequence"
  source 1..330: mol_type = other DNA
atggcactgtggatgagactgctgcctcttctggcactgcttgcactctgggggccggatccagcagccgcttttgtgaaccagcacctgtgtggctcccatcttgtggaggcactttacctggtgtgtggggagagaggctttttctatactccaaaaacccggagagaagcagaggatctccaagtgggtcaagtggagctcggaggaggacctggtgctggatcactccaacccctggctctggagggtagcttgcaaaagagaggaattgtggaacagtgttgcacttcaatttgttccctctaccagcttgagaattactgcggt

SEQ ID NO: 13987 - DNA, 330 bp, synthetic construct
  misc_feature 1..330: note = source = /note="Description of Artificial Sequence: Synthetic coding sequence"
  source 1..330: mol_type = other DNA
atggcattgtggatgcgtctgctccctcttctggcgcttcttgctctctggggtcctgatcctgccgccgcgtttgtaaatcaacacctgtgtggatcccatcttgtggaagccttgtacctcgtctgtggcgagaggggtttcttttacacgcctaaaactagacgggaagcagaggacctgcaggtgggacaggtcgaactgggcggcgggcccggagcagggtcacttcagccgctggcacttgagggatcgctccaaaagcggggaattgtcgaacagtgctgcacctcgatctgctcattgtaccaactggagaactactgtgga

SEQ ID NO: 13988 - DNA, 330 bp, synthetic construct
  misc_feature 1..330: note = source = /note="Description of Artificial Sequence: Synthetic coding sequence"
  source 1..330: mol_type = other DNA
atggcactgtggatgcgcctgcttcctcttctggcgctgctcgcactctggggaccagatcctgcggccgcctttgttaatcagcatctttgtggttcacacctcgtggaggcactctatctggtgtgcggcgagcgcgggtttttctacacccctaagactcgcagggaagcagaggacctgcaagtgggccaagttgaacttggcggaggtcccggagcaggatctctgcaaccactggcccttgaaggaagccttcagaaacgtggaatagtggaacagtgttgtacgtcgatttgctcgctctaccaattggagaattactgcggt

SEQ ID NO: 13989 - DNA, 330 bp, synthetic construct
  misc_feature 1..330: note = source = /note="Description of Artificial Sequence: Synthetic coding sequence"
  source 1..330: mol_type = other DNA
atggcactgtggatgagactcctgcctctgcttgcattgctcgccctttgggggccggatcctgcagcagctttcgtcaaccagcacctttgcggcagccatttggttgaagctctctacttggtttgcggggagcgcggttttttttatacacccaagacccgaagggaggccgaggatctgcaagttggccaggtggaattggggggcggccctggggctgggtccctccagccattggctctggaaggtagcttgcagaagaggggcatagtggagcagtgttgtacatctatctgctctctgtaccagctggagaactactgtggt

SEQ ID NO: 13990 - DNA, 330 bp, synthetic construct
  misc_feature 1..330: note = source = /note="Description of Artificial Sequence: Synthetic coding sequence"
  source 1..330: mol_type = other DNA
atggcgttatggatgcgactcttgccactcctcgcgttgctggcgctttggggccccgaccctgctgcagcgttcgttaaccagcacctgtgcggtagtcacctggtggaggccctatacctggtgtgtggagagaggggcttcttctacactcccaaaaccaggcgggaggctgaggatttgcaggtgggccaggtggagctgggaggaggtccaggagcaggctctcttcagcctttagcactggagggcagtctgcagaaaagaggtatagtcgagcagtgctgcacgagcatttgctcactctatcagttagagaattactgtggc

SEQ ID NO: 13991 - DNA, 330 bp, synthetic construct
  misc_feature 1..330: note = source = /note="Description of Artificial Sequence: Synthetic coding sequence"
  source 1..330: mol_type = other DNA
atggcactgtggatgcgattgctgccactcctggctctgctggccttgtgggggccggaccccgcagccgcttttgtcaaccaacacctgtgtggatcacatctggtggaagccctatatctagtatgtggcgaacgcggattcttttacacaccaaaaactcgtagagaggccgaagatctgcaggtcggccaggtggagcttggaggagggcccggagccggctccctccagccattagccctcgaaggctcactccagaagcgagggatcgttgagcagtgttgcaccagcatctgctccctgtaccagctggagaactactgtggg

SEQ ID NO: 13992 - DNA, 330 bp, synthetic construct
  misc_feature 1..330: note = source = /note="Description of Artificial Sequence: Synthetic coding sequence"
  source 1..330: mol_type = other DNA
atggcactgtggatgagactgttgccactacttgctctcctggctctgtgggggcccgatcctgcagccgccttcgtcaaccagcacttatgcggatcgcacctggtggaagccctgtacttagtgtgtggggaaaggggctttttctacacacctaaaacaagaagggaagcggaagacctgcaggtcggccaggtggagctcggtggtgggcccggggccgggagtcttcagcccttggcactggagggatccctacagaaaagagggatcgtggagcagtgttgtacttcaatttgcagtctttaccagcttgagaattattgtggc

SEQ ID NO: 13993 - DNA, 330 bp, synthetic construct
  misc_feature 1..330: note = source = /note="Description of Artificial Sequence: Synthetic coding sequence"
  source 1..330: mol_type = other DNA
atggccctgtggatgcggctactgcccttattagcccttctggcactgtgggggccagatccagccgccgccttcgtgaatcagcacctctgtggaagtcatctggtagaggcactctatttggtatgcggggaacggggattcttctacaccccaaagacccggagggaggccgaggacctgcaagtaggccaggtggagctgggtggtgggccaggggccggatcactgcagcccctcgcgttagagggcagtctccagaaacgcggtatcgtcgagcaatgttgtacctcaatctgcagtctctatcaacttgagaactattgcggc

SEQ ID NO: 13994 - DNA, 330 bp, synthetic construct; identical to SEQ ID NO: 13984
  misc_feature 1..330: note = source = /note="Description of Artificial Sequence: Synthetic coding sequence"
  source 1..330: mol_type = other DNA

SEQ ID NO: 13995 - DNA, 330 bp, synthetic construct
  misc_feature 1..330: note = source = /note="Description of Artificial Sequence: Synthetic coding sequence"
  source 1..330: mol_type = other DNA
atggcactgtggatgcggttgctcccgctgctggccctgctcgcactgtggggcccagacccggctgctgcatttgttaatcaacatctgtgcggctctcatctagtcgaggcactgtacttggtgtgcggtgagcgcggttttttctatacgcctaaaacccgccgcgaggccgaagacctgcaggtgggtcaggtagagcttggcggtggtccaggggctggttcactgcaaccactcgccctcgaaggcagcctccagaagcgcggcattgtggagcagtgttgtacgtctatctgtagcctgtaccagctggaaaattactgcggt

SEQ ID NO: 13996 - DNA, 330 bp, synthetic construct
  misc_feature 1..330: note = source = /note="Description of Artificial Sequence: Synthetic coding sequence"
  source 1..330: mol_type = other DNA
atggcactttggatgcgattgctcccactgctcgccctcctggccctttggggccccgaccccgctgccgcattcgtgaatcaacacctctgcgggagccatctagtggaagcactttacttagtgtgcggggagaggggcttcttttacacccccaagaccagaagagaggcagaggatctgcaggtcggacaagtcgaactgggcggcggcccgggtgctggctccctccagcctcttgccctcgagggaagtttgcagaagagaggcatcgtcgagcagtgttgcacatccatttgttctctctaccagctggaaaactattgcgga

SEQ ID NO: 13997 - DNA, 330 bp, synthetic construct
  misc_feature 1..330: note = source = /note="Description of Artificial Sequence: Synthetic coding sequence"
  source 1..330: mol_type = other DNA
atggcactgtggatgagacttctcccattgctcgcgctattagcattatggggaccagatccagcagctgcttttgtaaaccagcacctgtgcggtagtcatctagtcgaagctctctaccttgtttgtggagaaagaggcttcttctacacacccaagactcgacgcgaagccgaagatctgcaagtcgggcaagttgagcttgggggaggacccggagccggatccctgcagccgctcgctctggagggatctcttcaaaaacgtggaatcgttgaacaatgttgtacttcgatctgcagcctgtatcaactcgagaattattgtgga

SEQ ID NO: 13998 - DNA, 330 bp, synthetic construct
  misc_feature 1..330: note = source = /note="Description of Artificial Sequence: Synthetic coding sequence"
  source 1..330: mol_type = other DNA
atggccctgtggatgcgattacttcccctgttggctctcctcgcgctctggggccctgacccggctgctgcattcgtgaaccagcatttgtgcggtagccatctggtagaagccctgtacctcgtctgcggtgagaggggatttttctacacgcccaaaacaaggcgggaagcggaagatctgcaggtcggtcaggttgaacttgggggaggcccaggggctggtagcttgcagcccttagccttggaggggtcactgcaaaaacgaggcatcgtcgagcagtgctgcactagtatctgctctctgtatcagctagaaaactattgcggg

SEQ ID NO: 13999 - DNA, 330 bp, synthetic construct
  misc_feature 1..330: note = source = /note="Description of Artificial Sequence: Synthetic coding sequence"
  source 1..330: mol_type = other DNA
atggcactgtggatgcggctgctcccgttattggcccttctggcactttggggcccagaccctgcagccgcgtttgtcaatcagcacctttgtggatcacatctcgttgaggccctttatctcgtctgcggagaaagaggatttttctatacccctaagacgcgtcgtgaggccgaagacctacaggtcggtcaggtggaactgggaggcggaccaggtgcagggtccctgcagccgttagcgctggagggatctcttcaaaaaaggggtatcgttgaacagtgttgtactagtatttgctcgctgtaccagttggaaaattactgcggt

SEQ ID NO: 14000 - DNA, 330 bp, synthetic construct
  misc_feature 1..330: note = source = /note="Description of Artificial Sequence: Synthetic coding sequence"
  source 1..330: mol_type = other DNA
atggccctctggatgcgactcttgccgctgctggccctgctcgcactttggggaccagatcctgctgcggcctttgtcaatcagcacctctgcgggtcccacctggtcgaagccttgtacctcgtgtgcggggagcgcggtttcttctacaccccaaagactcggcgggaagctgaagatctgcaggttggacaggtggaactgggaggagggccgggtgctgggagcctgcaaccgctcgccctggagggctcgctgcagaagcgcggaatcgtcgaacagtgttgcacctccatttgtagcctgtaccaactcgaaaactactgcggc

SEQ ID NO: 14001 - DNA, 330 bp, synthetic construct
  misc_feature 1..330: note = source = /note="Description of Artificial Sequence: Synthetic coding sequence"
  source 1..330: mol_type = other DNA
atggcgttatggatgcgtttactaccgttattagcgttactagcgctatggggtccggatccggcggcggcgtttgtaaatcaacatttatgtggttcgcatttagtagaagcgctatatttagtatgtggtgaacgtggttttttttatacgccgaaaacgcgtcgagaagcggaagatttacaagtaggtcaagttgaattaggtggtggtccgggtgcgggttcgttacaaccgctagcgttagaaggttcgttacaaaaacgtggtatagtagaacaatgttgtacgtcgatatgttcgctatatcaactagaaaattattgtggt

SEQ ID NO: 14002 - DNA, 330 bp, synthetic construct
  misc_feature 1..330: note = source = /note="Description of Artificial Sequence: Synthetic coding sequence"
  source 1..330: mol_type = other DNA
atggccttgtggatgaggttgttgccattgctggcgcttttggcattgtgggggcccgaccccgccgctgctttcgtcaaccagcatttgtgtggaagtcacctcgtcgaggcgctttacctggtgtgtggagaaagagggtttttttatacacctaaaactaggagggaagcagaggaccttcaagttggccaggtggagcttggcggaggccctggcgctggttctctccagcccctggctctggagggctccctgcagaaacggggaatcgtggaacagtgctgcacatcaatctgtagcctgtatcagctcgagaactactgcgga

SEQ ID NO: 14003 - DNA, 330 bp, synthetic construct
  misc_feature 1..330: note = source = /note="Description of Artificial Sequence: Synthetic coding sequence"
  source 1..330: mol_type = other DNA
atggcattgtggatgcgactcctgccgctgctggcgcttctggcgctttggggccctgacccggctgctgccttcgtcaatcagcacctgtgcgggagccatctggtggaagctctctacctcgtttgcggagagcgcggctttttctacacccccaaaactcggcgcgaggcggaagatttgcaggtgggccaagtggaactggggggaggccctggcgcggggagtctccagccgttggcactcgagggatcgctgcagaagagaggaattgtcgagcaatgctgtacgagcatctgctccctttaccaactcgaaaactactgcggg

SEQ ID NO: 14004 - DNA, 330 bp, synthetic construct
  misc_feature 1..330: note = source = /note="Description of Artificial Sequence: Synthetic coding sequence"
  source 1..330: mol_type = other DNA
atggcgctgtggatgcgactgcttcctttgctggcactgctcgccctgtggggccccgatccagctgctgcttttgtaaatcagcatttgtgtggctctcacttagtggaggctttgtacctggtttgtggagagcgcggcttcttttatacccccaagacgaggagggaggccgaggacttacaggtcggtcaggtggagttgggaggtggacctggggctggcagcctgcagccactggctcttgagggcagcctgcagaagaggggaatcgtggaacagtgctgtaccagcatttgctcgctgtatcagctggagaattactgcgga

SEQ ID NO: 14005 - DNA, 330 bp, synthetic construct
  misc_feature 1..330: note = source = /note="Description of Artificial Sequence: Synthetic coding sequence"
  source 1..330: mol_type = other DNA
atggcactgtggatgaggctccttccgctccttgccctgctggccctttggggtccggatcccgcagcagcatttgtgaatcaacatctctgtggttcccacctcgtggaagcactttaccttgtgtgtggagaaagaggctttttctacacccctaagaccaggcgagaggcagaagatttgcaagtggggcaggtcgaactcggcgggggacctggggccggttcgctgcaaccattggcgctggaaggctcacttcaaaagcgcggaatagtggaacagtgttgtaccagcatctgttctctgtaccagcttgaaaactactgtgga

SEQ ID NO: 14006 - DNA, 330 bp, synthetic construct
  misc_feature 1..330: note = source = /note="Description of Artificial Sequence: Synthetic coding sequence"
  source 1..330: mol_type = other DNA
atggccctgtggatgcgcctgctgccgctgctggcacttctggccttgtggggccctgaccctgccgcagcctttgtgaatcaacacctgtgcggaagtcatctagtggaagccttgtatttagtttgtggggagagaggcttcttctatacccctaagacgagaagggaggccgaagatctgcaggtgggacaggtcgaattaggggggggacctggcgccggaagtctccaaccccttgctctcgagggttcactccagaaacgaggtatcgtggagcaatgttgcacatccatatgctccctgtaccagctggagaactactgcggg

SEQ ID NO: 14007 - DNA, 330 bp, synthetic construct
  misc_feature 1..330: note = source = /note="Description of Artificial Sequence: Synthetic coding sequence"
  source 1..330: mol_type = other DNA
atggcactttggatgcggctgctgcctctgcttgcgctcctcgccctgtggggccccgatccagcggctgcctttgtgaaccagcatctttgtggcagccacctggtcgaggcgctgtacctggtgtgcggagagcggggattcttctacaccccgaaaacccgtagggaggccgaggacctgcaggtgggacaggtcgaattggggggcggaccgggggcaggaagtctgcaaccgctggctcttgaaggctcgctgcaaaagcgcggcatcgttgaacagtgttgcacttccatctgctctctctatcagctcgaaaactactgcgga

SEQ ID NO: 14008 - DNA, 330 bp, synthetic construct
  misc_feature 1..330: note = source = /note="Description of Artificial Sequence: Synthetic coding sequence"
  source 1..330: mol_type = other DNA
atggcgctttggatgcggctgctcccgctgttggctctcctggcactgtggggacctgatcctgccgcggcttttgtgaatcagcatctgtgcggatctcacctcgtcgaagcactgtacctggtctgcggagaacgcggcttcttctacaccccaaagactcgccgcgaggctgaggacctgcaagtggggcaagtcgagctcggaggaggccctggagcaggctcactgcagccgctcgccctggagggatcgcttcagaagcggggaatcgtcgagcagtgctgcacttcaatctgttcgctgtaccaactcgagaattactgtgga

SEQ ID NO: 14009 - DNA, 330 bp, synthetic construct
  misc_feature 1..330: note = source = /note="Description of Artificial Sequence: Synthetic coding sequence"
  source 1..330: mol_type = other DNA
atggcactgtggatgcgactcctccctttgctggccctcctcgctctgtggggccccgacccagccgccgccttcgtgaatcagcatctgtgcggtagtcaccttgtggaggccttgtacctcgtgtgtggtgagcgcggcttcttctacacacccaagaccagacgtgaggcagaggatcttcaggtgggtcaggtcgagctgggtgggggcccgggtgctgggtctttgcaacccctggccctggagggttcactgcagaaacggggaattgtggagcagtgctgcacaagcatctgttccctgtaccagcttgaaaactactgcggc

SEQ ID NO: 14010 - DNA, 330 bp, synthetic construct
  misc_feature 1..330: note = source = /note="Description of Artificial Sequence: Synthetic coding sequence"
  source 1..330: mol_type = other DNA
atggcgctctggatgcggcttctgcccttgctggccttgctagcgctttgggggccggacccggccgcagcattcgtcaaccagcatctctgcggctcccatctggtcgaggctctttacctcgtctgcggggaacgtggctttttctacactcctaagacccgccgcgaggccgaagatttgcaggtgggccaagtcgagctgggcggaggccccggtgcgggatcattacagccgcttgcgctggaggggtcgctccaaaagcgtggtattgtggagcagtgctgcaccagcatctgctccctctaccagctagaaaactactgcgga

SEQ ID NO: 14011 - DNA, 330 bp, synthetic construct
  misc_feature 1..330: note = source = /note="Description of Artificial Sequence: Synthetic coding sequence"
  source 1..330: mol_type = other DNA
atggccttgtggatgcgcctcctccctttattagctctgctcgccctgtgggggccagatcccgcagctgctttcgtgaatcagcacctctgcgggtcccatctcgtggaagccctgtacctcgtgtgcggagaaagggggttcttttatacacccaaaactaggcgggaagccgaagatctccaggtaggacaggtcgaacttggaggaggaccaggagctgggtccctacagcctctagcccttgaaggatccctccagaaaagggggatagtggaacagtgttgtactagtatttgtagtctctatcagctcgaaaattactgcggg

SEQ ID NO: 14012 - DNA, 330 bp, synthetic construct
  misc_feature 1..330: note = source = /note="Description of Artificial Sequence: Synthetic coding sequence"
  source 1..330: mol_type = other DNA
atggcactctggatgaggttgctcccgctccttgctttgcttgccctgtggggcccagatccagctgcggcttttgtgaaccagcacctgtgtggttcccatttggttgaggctctttacttggtctgtggagagagggggtttttctacactccaaaaactcgacgagaggccgaagacctccaggtgggacaggtggaactgggcgggggccctggggccggatctctccagcctctggcgctagagggcagtctgcagaaacgcgggatcgtggagcagtgctgcacttcaatttgctcactgtatcagctggagaactactgtggc

SEQ ID NO: 14013 - DNA, 330 bp, synthetic construct
  misc_feature 1..330: note = source = /note="Description of Artificial Sequence: Synthetic coding sequence"
  source 1..330: mol_type = other DNA
atggcactttggatgcggctcttaccattgctggcgttgctggcattgtggggaccagaccccgcagctgctttcgtgaatcagcatctgtgtgggtcacatctggtcgaagctctgtacctcgtatgtggtgagcggggattcttttacacccccaaaaccagaagagaggccgaggacctacaggtgggtcaggtagaactggggggcgggcccggagcgggctcactccagcccctcgcgctcgaagggtcactgcagaagcggggaatcgtggagcagtgctgtacttctatatgttctctgtaccagctggaaaactattgtgga

SEQ ID NO: 14014 - DNA, 330 bp, synthetic construct
  misc_feature 1..330: note = source = /note="Description of Artificial Sequence: Synthetic coding sequence"
  source 1..330: mol_type = other DNA
atggctctatggatgaggctgctgccactgctggccctcttggcattgtggggcccagaccctgcagccgcgttcgtaaaccagcatctctgcggtagccacctggtggaggccctgtaccttgtatgcggtgaacgaggttttttttacactccaaagacacgacgcgaagccgaggacctgcaggttggccaggtggaactgggcgggggccccggcgctgggtcactgcagcctttggccctcgaaggcagcctgcagaagcgcgggattgtggagcagtgttgtactagcatctgctccctttaccagctagagaactattgcggg

SEQ ID NO: 14015 - DNA, 330 bp, synthetic construct
  misc_feature 1..330: note = source = /note="Description of Artificial Sequence: Synthetic coding sequence"
  source 1..330: mol_type = other DNA
atggccctttggatgcgcctgctgccgctgctcgcgctcctcgcactgtggggcccagacccggcggcagccttcgtcaaccaacatctttgcggaagccacctcgtggaagctctctacctggtctgcggggagcggggatttttctacaccccaaagaccaggagagaggccgaagatctgcaagtgggacaggtggaactcggcggtggccctggggccggatcgctgcagcccctggctttggaaggttcattgcagaaacgcggaatcgtggagcagtgctgtacttcgatctgttccctgtaccaactggagaattactgcgga

SEQ ID NO: 14016 - DNA, 330 bp, synthetic construct
  misc_feature 1..330: note = source = /note="Description of Artificial Sequence: Synthetic coding sequence"
  source 1..330: mol_type = other DNA
atggccctatggatgcgcttactgccactacttgccctgttagcattatggggccccgacccggccgcagcctttgtcaaccagcacctgtgtggctctcacctggtggaggcactgtatctagtgtgcggagaacgaggatttttttatacccccaagacgcggcgcgaggcagaagacctccaagttggccaggtggaacttggaggtggaccgggggctggcagtctgcagccgttggccctggagggtagtcttcagaagcgtggtattgtggagcagtgctgcactagtatatgttctctgtatcaactagagaactactgcggg

SEQ ID NO: 14017 - DNA, 330 bp, synthetic construct
  misc_feature 1..330: note = source = /note="Description of Artificial Sequence: Synthetic coding sequence"
  source 1..330: mol_type = other DNA
atggcactgtggatgcgactgctccccctcctggcattgttggccctatggggtccggacccagcggccgccttcgtgaaccagcacctgtgcgggagtcatctggttgaagctctttatctggtctgcggggagagaggatttttttacacacccaagacaagacgggaggcggaagatctccaagttggacaagtggagttgggagggggacccggggctggatcacttcagcccctcgcgctcgagggctctctgcagaagagaggaatcgtggagcaatgctgcactagcatctgctccctataccaactggagaactactgcggg

SEQ ID NO: 14018 - DNA, 330 bp, synthetic construct
  misc_feature 1..330: note = source = /note="Description of Artificial Sequence: Synthetic coding sequence"
  source 1..330: mol_type = other DNA
atggcattgtggatgcgcctgctgcccctcctggcactgctggccctttggggaccagatccggcagccgcctttgtgaaccaacacctctgcgggtcacatctcgtggaagcactttacctcgtgtgcggagaacgcggattcttctacacgcctaagactagacgcgaggcagaggaccttcaagtgggtcaggtggagctgggtggcggaccaggagcggggtctttgcagccacttgccctcgagggatcgctgcagaaaagaggaatcgttgagcagtgctgcacctccatctgttccctgtaccagctcgagaattactgcggt

SEQ ID NO: 14019 - DNA, 330 bp, synthetic construct
  misc_feature 1..330: note = source = /note="Description of Artificial Sequence: Synthetic coding sequence"
  source 1..330: mol_type = other DNA
atggcattatggatgagattattaccattattagctttattagcattatggggaccagatccagctgctgcttttgttaatcaacatctttgtggatcacatcttgttgaagcactttatttagtttgtggagaaagaggatttttttatactccaaaaactagacgagaagcagaagatcttcaagttggacaagttgaattaggaggaggtccaggagctggatcattgcaaccattagcacttgaaggtagtttgcaaaaaagaggaattgttgagcaatgttgtacctcaatttgttcactatatcagcttgaaaattattgtgga

SEQ ID NO: 14020 - DNA, 330 bp, synthetic construct
  misc_feature 1..330: note = source = /note="Description of Artificial Sequence: Synthetic coding sequence"
  source 1..330: mol_type = other DNA
atggctctctggatgagactgctgcctctcttggctctgcttgccttgtggggcccagaccctgccgccgcgttcgtcaaccaacatctttgtggtagccacctggtcgaggccctgtacttagtgtgcggagagaggggctttttctatacacctaaaacccgcagggaagctgaagaccttcaggtggggcaagtggagcttgggggcgggccgggtgcaggctcgttgcagcccctggcactcgaaggctcgctacagaaacgtggaatagtcgagcagtgttgtactagtatttgcagcctctaccagcttgagaactactgcggg

SEQ ID NO: 14021 - DNA, 330 bp, synthetic construct
  misc_feature 1..330: note = source = /note="Description of Artificial Sequence: Synthetic coding sequence"
  source 1..330: mol_type = other DNA
atggctctgtggatgcgactgttacctctgttagcattgctggccctgtggggccctgatcctgcagccgccttcgtcaatcagcatctctgtggctctcacttggtggaggcactgtatcttgtgtgcggcgagagaggatttttttacactcccaagactagaagagaggctgaagatctgcaagtgggccaagttgagctgggcggtgggcccggggctgggagtttacagccactggcactggaaggcagtctgcaaaaaagaggcattgttgagcagtgttgcacctctatttgcagtctataccaacttgagaattactgcggc

SEQ ID NO: 14022 - DNA, 330 bp, synthetic construct
  misc_feature 1..330: note = source = /note="Description of Artificial Sequence: Synthetic coding sequence"
  source 1..330: mol_type = other DNA
atggctctgtggatgcggcttttgcctcttctcgcgctgctcgccctgtggggaccagatcctgcagccgcgtttgtgaaccagcacctctgtggatcacatctcgttgaggccctttaccttgtgtgcggcgagcggggattcttttacactccgaaaacccgcagggaagcagaagatcttcaagtgggacaagttgagcttggaggaggccctggcgccggttccctccagccacttgcactggaaggatcgctgcagaagaggggaattgtcgaacaatgctgtacgtcgatctgcagcctgtaccaattggaaaactactgtggt

SEQ ID NO: 14023 - DNA, 330 bp, synthetic construct
  misc_feature 1..330: note = source = /note="Description of Artificial Sequence: Synthetic coding sequence"
  source 1..330: mol_type = other DNA
atggccctgtggatgagactgctgccattgctggcgctgctggcattgtggggcccagaccccgcagcagctttcgtgaatcagcatctgtgcgggagtcacttggtggaagccctgtatctcgtctgcggagaacgcggatttttttacacgcctaaaacaagaagggaggccgaggacctccaggtgggacaggtcgaattgggggggggcccgggtgccgggtcactccaaccgcttgcactcgaaggctcactgcagaagagaggcatcgtggagcagtgttgcaccagcatctgctccctgtatcagctggaaaactactgtgga

SEQ ID NO: 14024 - DNA, 330 bp, synthetic construct
  misc_feature 1..330: note = source = /note="Description of Artificial Sequence: Synthetic coding sequence"
  source 1..330: mol_type = other DNA
atggctctgtggatgcgcttgcttcccttgctcgcactgcttgctttgtggggcccagaccccgccgccgctttcgtaaatcagcacctgtgcggttcacacttggtagaggccctctacctggtgtgtggagagcgcggatttttctacacccctaagactagacgcgaagcggaagatctccaggtgggtcaggtcgaattgggcggtggtcccggagctggaagccttcagcctctggccttggagggatccctccagaaaaggggcattgtcgagcaatgctgcacctccatctgttcactctaccagctggagaactattgcggt

SEQ ID NO: 14025 - DNA, 330 bp, synthetic construct
  misc_feature 1..330: note = source = /note="Description of Artificial Sequence: Synthetic coding sequence"
  source 1..330: mol_type = other DNA
atggcactttggatgcggcttctcccacttttggcacttctggcactttggggcccagaccccgcagcagcctttgtgaatcagcatctctgcggctcacacttggtcgaggcgctgtacctggtgtgtggtgaaagaggattcttttacaccccaaaaactcggagagaggcagaagatcttcaagttggtcaagtcgaactgggtggaggccctggggccggatccctccaaccgcttgcacttgaaggatcactgcagaagcgaggaatcgtggaacagtgctgtacttcaatctgtagcctttaccagctggagaactactgtggg

SEQ ID NO: 14026 - DNA, 324 bp, synthetic construct
  misc_feature 1..324: note = source = /note="Description of Artificial Sequence: Synthetic coding sequence"
  source 1..324: mol_type = other DNA
atggcgctatggatgaggctcctgccactgctggccctcctggcactctggggaccagatccagccgccgcgtttgtgaaacagcacctgtgcgggtcacaccttgttgaagccctatacctcgtgtgcggggagcggggattcttctatactcccgaaaccgaggcagaggacttgcaggtggggcaggtggagctgggagggggccctggcgctggttccctgcaaccgctagctctggaaggatctctgcaaaagagagggattgtcgagcagtgttgcacttccatatgctcactttaccagcttgaaaactactgtaat

SEQ ID NO: 14027 - DNA, 324 bp, synthetic construct
  misc_feature 1..324: note = source = /note="Description of Artificial Sequence: Synthetic coding sequence"
  source 1..324: mol_type = other DNA
atggccctctggatgcgactactgccactcttggccctcctcgctctgtggggcccagatcctgcagcagcatttgtgaaacagcacctctgtgggagccacctagtcgaggctctgtacttagtctgcggagagcgtggttttttctacacccctgagacagaagcagaagacttgcaggtgggacaggtcgaactcggaggcgggcccggggccggatcactgcagcctttggcccttgaggggtctctgcagaaacgggggattgtcgagcaatgctgcacttcgatctgcagcctgtaccagctggagaattattgcaat

SEQ ID NO: 14028 - DNA, 324 bp, synthetic construct
  misc_feature 1..324: note = source = /note="Description of Artificial Sequence: Synthetic coding sequence"
  source 1..324: mol_type = other DNA
atggccttgtggatgcggctcctcccactcctggccctgctggctctctggggtccggatcccgcagcagcctttgtgaagcaacatctctgcggatcgcaccttgtcgaagcgttgtacttggtgtgcggcgaaagaggtttcttctatactcctgagacggaagctgaggacttgcaagtgggtcaggtcgaacttggcggaggccctggagctggatcactgcagccgctcgcgctggaaggcagccttcagaaacgggggattgtggagcagtgctgcacctcgatctgctctctttaccaactggagaactactgtaat

SEQ ID NO: 14029 - DNA, 324 bp, synthetic construct
  misc_feature 1..324: note = source = /note="Description of Artificial Sequence: Synthetic coding sequence"
  source 1..324: mol_type = other DNA
atggccctctggatgagactgctcccactcctggcattgcttgcgctgtgggggccggacccggctgctgcctttgtgaagcaacacctctgcgggtcccatctggtggaagcgctgtacctggtgtgcggggaacggggcttcttctacaccccggaaaccgaagccgaagatctgcaggttggacaagtggagctcggcggaggcccgggagccggaagcctgcagccgctcgccctggagggatcgcttcagaagcgcggcatcgttgagcaatgctgcacttccatctgctcactgtaccaattggagaactactgcaac

SEQ ID NO: 14030 - DNA, 324 bp, synthetic construct
  misc_feature 1..324: note = source = /note="Description of Artificial Sequence: Synthetic coding sequence"
  source 1..324: mol_type = other DNA
atggccttgtggatgcggttactccctttgttagctctacttgcgttgtgggggccggaccctgcggcggcgttcgtgaaacaacacctttgcggcagccatctggtggaagctctatacctcgtttgcggagaacgcggatttttctatactccggaaacagaggctgaagacctgcaggtaggtcaggtggaattgggcggaggaccaggagcaggatctctccaaccgctggccttagaaggatctttacagaagagagggattgtagaacaatgctgcacatcgatctgttctttatatcagttagaaaactattgtaac

SEQ ID NO: 14031 - DNA, 324 bp, synthetic construct
  misc_feature 1..324: note = source = /note="Description of Artificial Sequence: Synthetic coding sequence"
  source 1..324: mol_type = other DNA
atggctctctggatgcgcctactaccgctgctggcactcctggccctgtggggacctgatcctgcagcggcatttgtgaagcagcacctctgcgggagccacctggtggaggctctttatctggtgtgcggagaaaggggatttttttataccccagaaactgaggccgaggacctccaggtgggacaggtcgagctcggcggcgggccaggggcaggctccctgcagcctctcgccctggaaggctccctgcagaaaagagggatagttgagcagtgttgtacctctatttgcagtctgtaccaactggagaactattgtaac

SEQ ID NO: 14032 - DNA, 324 bp, synthetic construct
  misc_feature 1..324: note = source = /note="Description of Artificial Sequence: Synthetic coding sequence"
  source 1..324: mol_type = other DNA
atggcactttggatgagactgcttcctctgctggctcttcttgcgctgtgggggcctgaccctgcagcggcgtttgtgaagcagcatctctgtggtagccatctcgtggaagcattgtacctcgtctgtggagaacggggatttttctacaccccagagactgaggcggaagatcttcaggtgggccaagtcgagctggggggaggaccaggagcgggctctcttcagcctcttgcccttgagggatcgctgcagaagaggggaattgtggaacagtgttgcacgtcaatttgttccttgtaccaactggaaaactactgtaac

SEQ ID NO: 14033 - DNA, 324 bp, synthetic construct
  misc_feature 1..324: note = source = /note="Description of Artificial Sequence: Synthetic coding sequence"
  source 1..324: mol_type = other DNA
atggcactgtggatgaggttgctgccactgctcgccctcctggctttgtggggcccagacccagctgcagcctttgtcaaacaacacctgtgcggctcccacctcgtcgaggccttgtacttggtgtgtggtgaaagaggattcttttacacacctgaaactgaagctgaagaccttcaagtgggacaggtcgaactcggtggaggtcccggcgccggaagtttgcagcctttggcactggaaggatccctgcagaagaggggaattgtggaacagtgctgcacttctatttgtagtctgtaccagctcgagaattattgcaac

SEQ ID NO: 14034 - DNA, 324 bp, synthetic construct
  misc_feature 1..324: note = source = /note="Description of Artificial Sequence: Synthetic coding sequence"
  source 1..324: mol_type = other DNA
atggcgttatggatgcgattattaccgctactagcgctattagcgctatggggtccggatccggcggcggcgtttgtaaaacaacatctatgtggttcgcatctagtagaagcgttatatttagtatgtggtgaacgtggttttttttatacgccggaaacggaagcggaagatttacaagtaggtcaagtagaattaggtggtggtccgggtgcgggttcgttacaaccgctagcgttagaaggttcgttacaaaaacgtggtatagttgaacaatgttgtacgtcgatatgttcgttatatcaactagaaaattattgtaat

SEQ ID NO: 14035 - DNA, 324 bp, synthetic construct
  misc_feature 1..324: note = source = /note="Description of Artificial Sequence: Synthetic coding sequence"
  source 1..324: mol_type = other DNA
atggctctgtggatgaggctgttaccgttgctcgcattgctggcgctatgggggcctgatcccgcagccgccttcgtaaagcagcatttatgcggatctcatctggtggaagcgctctatctggtatgcggcgagagaggattcttttatactccagaaactgaggcagaagacttgcaggtgggccaagtggaactgggtggcggcccgggagccggctcccttcaacctctcgccctggaaggaagccttcagaagcgtggtattgttgagcagtgctgcacatcgatctgttctctgtaccaactagaaaactactgcaac

SEQ ID NO: 14036 - DNA, 324 bp, synthetic construct
  misc_feature 1..324: note = source = /note="Description of Artificial Sequence: Synthetic coding sequence"
  source 1..324: mol_type = other DNA
atggcactgtggatgcggctactgcctctgcttgctctcctggcgctctggggtcccgacccggccgcagcttttgtgaaacagcacttgtgcggttcgcaccttgtggaggctctctacctcgtttgtggagagcgggggttcttctacacaccagagactgaagcagaggaccttcaagtggggcaagtggagttaggcggcggaccaggcgctggttctctccagcccctcgcgcttgagggctctctgcagaagcgcggcatcgtcgagcaatgctgcacgagtatttgcagcctctaccaactggagaactattgcaat

SEQ ID NO: 14037 - DNA, 324 bp, synthetic construct
  misc_feature 1..324: note = source = /note="Description of Artificial Sequence: Synthetic coding sequence"
  source 1..324: mol_type = other DNA
atggcgctctggatgcgcctgctgcctcttctggctcttctagcgctctggggacccgatccagcagcagcctttgttaaacagcatctttgtggctcccacttggtggaagcgctatatctggtgtgcggggagcggggctttttttacactccagaaacagaagctgaggatctgcaggtgggacaagtggaacttggtggcgggcccggggccgggtcactgcaacccctcgcgctggaagggagcctgcagaagcgaggcatcgtggagcagtgctgtacgtcaatttgcagcctgtaccagcttgagaactactgcaac

SEQ ID NO: 14038 - DNA, 324 bp, synthetic construct
  misc_feature 1..324: note = source = /note="Description of Artificial Sequence: Synthetic coding sequence"
  source 1..324: mol_type = other DNA
atggcgctatggatgaggttactgcccttgcttgcgctactggcactttggggaccagatccagccgccgccttcgtcaagcagcatctctgtggatcacacttggtcgaggctctctacctggtgtgcggagagaggggattcttttacacacccgaaaccgaggccgaagatctgcaagtagggcaagtggagctggggggtggacctggagccgggagtctgcagcctctggccttagagggttcccttcagaagagggggattgtggaacagtgttgcacttctatatgctctctgtaccagttagagaattactgtaat

SEQ ID NO: 14039 - DNA, 324 bp, synthetic construct
  misc_feature 1..324: note = source = /note="Description of Artificial Sequence: Synthetic coding sequence"
  source 1..324: mol_type = other DNA
atggccttgtggatgaggctgctgccactgcttgccttgctggctctgtggggaccggaccctgccgcagcatttgtcaagcagcacctctgcggaagccacctggtcgaagccttgtatcttgtgtgcggagagaggggctttttttatacacccgagaccgaggctgaagacctgcaggttggtcaggtcgagctgggcgggggccccggggctgggtccctgcagccgctagccctggaaggctccctgcagaagaggggcattgtggagcagtgttgcacatccatctgttctctttaccagctagaaaattattgcaac

SEQ ID NO: 14040 - DNA, 324 bp, synthetic construct
  misc_feature 1..324: note = source = /note="Description of Artificial Sequence: Synthetic coding sequence"
  source 1..324: mol_type = other DNA
atggcactctggatgcgactgttgccattgcttgcgctgctcgccctctggggtcctgacccagctgccgcattcgtgaagcagcacctgtgtgggagccatttggtagaagcactctatctagtatgtggagagaggggtttcttctatacgcctgagaccgaggcggaagacctgcaggtgggacaagttgagcttgggggcggtcccggagccggatcccttcagcccctcgccctcgagggatccctgcagaagcgaggcatcgttgaacagtgttgtacatcaatatgcagtctctatcaactggaaaattactgtaat

SEQ ID NO: 14041 - DNA, 324 bp, synthetic construct
  misc_feature 1..324: note = source = /note="Description of Artificial Sequence: Synthetic coding sequence"
  source 1..324: mol_type = other DNA
atggccttgtggatgcgactcctgcccctcctggctctcttggccctctgggggcctgatccagccgctgcattcgtgaagcagcatttatgtggctctcacctggtcgaggcactttaccttgtttgcggcgagaggggctttttctacaccccggaaactgaagctgaggacctgcaggtgggccaagtggagctggggggtggaccaggagctggtagcctgcaacctctcgcgttggagggttcattgcagaaacgcggcattgtggaacagtgctgtacctctatttgcagcctctatcagctggagaattattgcaac

SEQ ID NO: 14042 - DNA, 324 bp, synthetic construct
  misc_feature 1..324: note = source = /note="Description of Artificial Sequence: Synthetic coding sequence"
  source 1..324: mol_type = other DNA
atggcattatggatgcgactgcttcctctgctcgccctccttgctctatggggacccgatcccgccgcagcattcgtcaagcagcatctgtgcggttctcacctagtcgaagccctatatctggtgtgtggagaacgcgggttcttctatacgcccgaaacagaggccgaggacctgcaagtgggtcaggtggaactgggcggcggtccaggtgcgggctcactccaaccgctcgccctcgaggggtcactgcagaagaggggcattgtggagcagtgttgtacctcgatctgtagcctgtaccagctcgaaaactactgtaat

SEQ ID NO: 14043 - DNA, 324 bp, synthetic construct
  misc_feature 1..324: note = source = /note="Description of Artificial Sequence: Synthetic coding sequence"
  source 1..324: mol_type = other DNA
atggccctctggatgcggctgctcccgctcttggcactgttggccttatggggtccagatccagccgccgcctttgtaaaacaacatctgtgcggatctcacctggttgaagctctttacctggtttgcggagagagaggcttcttttatacaccagagaccgaggcagaggatttacaagtgggacaggtggagctcggaggtggccctggagccggcagtctacagccacttgccttggaaggttcattacagaagagagggattgtggagcaatgttgtacaagcatttgcagcctgtaccagcttgaaaactactgcaac

SEQ ID NO: 14044 - DNA, 324 bp, synthetic construct
  misc_feature 1..324: note = source = /note="Description of Artificial Sequence: Synthetic coding sequence"
  source 1..324: mol_type = other DNA
atggcgctgtggatgcgcctgttgccgctgctagctcttttggcgttgtggggcccagatcctgctgcggctttcgttaagcagcacctgtgtgggtctcatttggttgaagcactgtacctggtatgtggagagcgggggtttttttacactccggagactgaggcggaagacctgcaggttggtcaggtcgagttgggcggcggccctggcgccggtagcctccaacctttggccctcgagggctcgctgcagaaacgcggtattgttgagcagtgctgcacctctatatgcagcctctatcagctggagaactactgcaac

SEQ ID NO: 14045 - DNA, 324 bp, synthetic construct
  misc_feature 1..324: note = source = /note="Description of Artificial Sequence: Synthetic coding sequence"
  source 1..324: mol_type = other DNA
atggcattgtggatgcgcttgctgccactccttgccttgcttgcactgtggggccctgatcccgcagcagcatttgtgaaacaacatctttgtggaagccatctcgtggaggccttgtacctcgtgtgtggagaacggggatttttctacactccagaaactgaagcggaagatctccaagtgggacaagtggagctgggtggcggtcccggagcgggttcgcttcagcctcttgcattggagggatcccttcaaaaaaggggaattgtggagcagtgttgtacctcaatttgctccctgtaccagttggagaactattgtaat

SEQ ID NO: 14046 - DNA, 324 bp, synthetic construct
  misc_feature 1..324: note = source = /note="Description of Artificial Sequence: Synthetic coding sequence"
  source 1..324: mol_type = other DNA
atggccctgtggatgcgcttattgccgctcctcgccctcctagctctgtggggtccagaccccgcggctgccttcgtgaaacagcacctatgcggctcccacctcgtggaggcactgtatttagtgtgtggggaaaggggatttttctataccccggagaccgaggcagaggacctccaggttggacaggtagaactcggcggcggtcccggcgccggtagtcttcagcctttggcattggaaggatccctccagaaacgcggtatagttgagcagtgttgcaccagcatatgtagcctatatcagctcgaaaactattgcaac

SEQ ID NO: 14047 - DNA, 324 bp, synthetic construct
  misc_feature 1..324: note = source = /note="Description of Artificial Sequence: Synthetic coding sequence"
  source 1..324: mol_type = other DNA
atggctctctggatgagactgctccctttgctcgccctgctggccttgtggggccccgatcctgccgcagcgttcgtgaagcagcacctgtgcggttcccatctcgtggaagcactttatctggtctgcggagagcgaggtttcttttacactcccgaaactgaagctgaggaccttcaagtcggacaagttgagctgggaggagggcccggcgcgggctcgcttcagccactggcactggagggttccttgcagaagcggggcatcgttgagcaatgttgtacctcaatctgcagcctctaccaactggaaaactactgcaac

SEQ ID NO: 14048 - DNA, 324 bp, synthetic construct
  misc_feature 1..324: note = source = /note="Description of Artificial Sequence: Synthetic coding sequence"
  source 1..324: mol_type = other DNA
atggcattgtggatgaggctgctgccactgctggctttgctcgccctgtggggcccggatcctgctgccgcattcgtcaaacaacacctgtgtggatcccatcttgtcgaagctctctacctggtgtgtggggagagagggttcttctatactccggagacggaagccgaggacctgcaagtcggccaagtggagttgggaggagggccgggagctggatctctccaaccgctggccctcgaaggttcgctgcagaagaggggcatcgtggaacagtgttgcacctcaatctgctccctgtaccagctggaaaactactgcaac

SEQ ID NO: 14049 - DNA, 324 bp, synthetic construct
  misc_feature 1..324: note = source = /note="Description of Artificial Sequence: Synthetic coding sequence"
  source 1..324: mol_type = other DNA
atggcactttggatgagacttctgcctctgttggcactgcttgcactgtggggaccagatcctgccgctgcatttgtcaagcaacacctctgcggctcccatctggtggaagcactttatctggtttgcggagaacgcggctttttctacacccctgaaactgaggcagaggaccttcaggtgggacaggtggagttggggggaggtccaggagcaggatccctgcaacctctggcactcgagggatcgctgcaaaaacgaggtatcgtggaacagtgttgtacttcgatctgttcgctgtatcagcttgagaattactgcaat

SEQ ID NO: 14050 - DNA, 324 bp, synthetic construct
  misc_feature 1..324: note = source = /note="Description of Artificial Sequence: Synthetic coding sequence"
  source 1..324: mol_type = other DNA
atggcactctggatgcgactcctgcctctgctggcgctgcttgcactctggggacccgaccccgctgcagcattcgtgaaacagcatctgtgtggttctcaccttgtggaagccctgtacctggtgtgtggcgagcgcggattcttttacactcccgagacggaagccgaagatctgcaggtgggtcaagtggaattgggaggcggaccaggtgcaggcagccttcaacctcttgcactggaaggttcacttcaaaagagaggtatcgttgagcagtgttgcactagcatctgctccctgtaccagctggagaattactgtaac

SEQ ID NO: 14051 - DNA, 324 bp, synthetic construct
  misc_feature 1..324: note = source = /note="Description of Artificial Sequence: Synthetic coding sequence"
  source 1..324: mol_type = other DNA
atggccctgtggatgagactcctgcctctgctggcgctgctggctctctggggcccggatcctgcggccgccttcgtcaagcagcacctgtgcggatcccatctcgtggaagcgctgtacctggtgtgcggggaacgcgggttcttttacacccctgaaactgaagcagaggaccttcaggtcggccaggtggagctcgggggcggaccaggagcagggtcgcttcagccccttgcgctggaaggatcgctccaaaaaagaggaatcgtggaacagtgctgtacttccatctgctccctctaccagctggaaaactactgtaac

SEQ ID NO: 14052 - DNA, 324 bp, synthetic construct
  misc_feature 1..324: note = source = /note="Description of Artificial Sequence: Synthetic coding sequence"
  source 1..324: mol_type = other DNA
atggccctgtggatgagactgttgccattactagccttgctagccctatggggacccgatcctgcagccgcatttgtgaaacagcacctctgcgggtcacatctagtggaagccttgtacttggtgtgcggagaacgcgggtttttttatacacctgaaactgaggctgaagacttgcaagtgggacaggttgaactcggaggagggcctggggccgggtccctacagcccttagctctggaggggtccctccagaaaagaggaatcgtcgaacagtgctgtacatctatctgttctctctaccagctggaaaactactgcaat

SEQ ID NO: 14053 - DNA, 324 bp, synthetic construct
  misc_feature 1..324: note = source = /note="Description of Artificial Sequence: Synthetic coding sequence"
  source 1..324: mol_type = other DNA
atggctctttggatgcgtctgttgcccctgctggctctgcttgcgctgtgggggccggatccagcagccgcctttgtgaaacaacatctctgcgggtcacaccttgtggaagccctttacttggtgtgtggtgaaagaggattcttttacaccccagagactgaagcggaggacctccaagttggacaggtggagctgggcggtggacctggagcaggatcgctccaacccttggcactggagggctcactgcaaaagcgcggaatcgtggaacagtgctgtacctctatttgtagcctctaccaacttgaaaactactgtaac

SEQ ID NO: 14054 - DNA, 324 bp, synthetic construct
  misc_feature 1..324: note = source = /note="Description of Artificial Sequence: Synthetic coding sequence"
  source 1..324: mol_type = other DNA
atggctctgtggatgcggttgctgcctttgttggcactcctcgcactatggggtccagaccctgctgctgccttcgtcaagcagcatctttgcggctctcaccttgtcgaggctctctacttggtatgtggtgaacggggtttcttctacaccccagagacggaggccgaggacttgcaagtcggccaagttgaacttggcggcggccccggagcaggatctctacagccactggccttggagggttcgttgcaaaaaagggggatcgtggagcaatgctgcacgtcaatatgttctctgtaccagctggaaaactactgcaac

SEQ ID NO: 14055 - DNA, 324 bp, synthetic construct
  misc_feature 1..324: note = source = /note="Description of Artificial Sequence: Synthetic coding sequence"
  source 1..324: mol_type = other DNA
atggcgttgtggatgagattgcttcctttactcgctcttctcgctctttgggggccagacccggctgccgcttttgtcaagcaacatttgtgtggatcgcatctagttgaagcactctacttggtttgtggagagaggggatttttttatacgccggaaaccgaggcagaggatttgcaggttggacaagtggagctgggtggtgggccaggagcgggatcattacaaccgttggcgcttgaaggatctttgcagaagcggggaattgttgaacaatgttgtacaagtatctgctctttgtatcaacttgagaactattgtaat

SEQ ID NO: 14056 - DNA, 324 bp, synthetic construct
  misc_feature 1..324: note = source = /note="Description of Artificial Sequence: Synthetic coding sequence"
  source 1..324: mol_type = other DNA
atggcactctggatgcggctgcttccgctgctggccctgctggctttatggggacccgaccctgccgctgctttcgtaaagcaacacctttgtggttcgcatctggtagaggcactgtacctagtctgcggggaacgaggttttttctacactcctgagaccgaggccgaggacctccaagtgggccaagttgaacttggtggtgggcctggggccgggtcacttcaaccactggccctggagggatccctgcagaagcgtggtatcgttgaacagtgctgcacatcaatctgttccctgtaccagcttgagaattactgtaac

SEQ ID NO: 14057 - DNA, 324 bp, synthetic construct
  misc_feature 1..324: note = source = /note="Description of Artificial Sequence: Synthetic coding sequence"
  source 1..324: mol_type = other DNA
atggcgctgtggatgagactgctccctttgcttgcgcttcttgccctgtggggaccagacccggcagcggctttcgtgaagcagcacctgtgcggctcacacttggtggaagccctgtacctggtgtgcggagaacggggatttttctacactccagaaacggaggctgaggatttgcaagtcggacaggtcgagctggggggaggacctggcgctggatccctgcaaccgctggctctggaaggctccctgcagaagcgaggtatcgtggaacagtgctgcacctcgatctgctccctgtaccagcttgaaaactactgcaat

SEQ ID NO: 14058 - DNA, 324 bp, synthetic construct
  misc_feature 1..324: note = source = /note="Description of Artificial Sequence: Synthetic coding sequence"
  source 1..324: mol_type = other DNA
atggcactgtggatgcggctgcttccgctcctcgcacttcttgcgctttggggtcctgaccctgcggctgcctttgtgaagcagcatctttgtgggtcgcaccttgtggaggccctctatcttgtctgcggagagagaggtttcttctacactccagagacggaagccgaggatcttcaagtggggcaagtcgagcttggaggcgggcctggggcaggctcacttcagccattggcactggaaggatcgcttcagaaacgaggaatcgtcgaacaatgttgcaccagcatttgctccctctatcagctggaaaactactgtaac

SEQ ID NO: 14059 - DNA, 324 bp, synthetic construct
  misc_feature 1..324: note = source = /note="Description of Artificial Sequence: Synthetic coding sequence"
  source 1..324: mol_type = other DNA
atggcactgtggatgcgtctgctcccactgctggcgttgcttgcactctggggacctgaccctgcagcagcctttgtgaagcagcacttgtgtggatcacaccttgtggaagcgctctacctggtctgcggcgagcgcggtttcttttacacccccgaaactgaagcggaagatttgcaagtgggacaagtggaacttggaggcggaccgggtgcaggaagcctgcagcccctggcactggaaggatcgctgcaaaagaggggcatcgtcgagcaatgttgtacttcaatttgcagcctttaccaactggagaattactgtaat

SEQ ID NO: 14060 - DNA, 324 bp, synthetic construct
  misc_feature 1..324: note = source = /note="Description of Artificial Sequence: Synthetic coding sequence"
  source 1..324: mol_type = other DNA
atggcgctttggatgaggctgctacccctactcgccctcctcgctctgtggggtcctgaccctgctgctgcttttgttaaacaacacttatgcgggtcacacctcgtagaagctttatatttggtatgtggcgaacgaggttttttttacacaccagagacggaagctgaagaccttcaggtgggacaagttgagttgggtgggggaccaggtgcaggctctctgcaacccttggccctggagggatctttgcagaaaaggggcattgtggaacagtgctgcacatctatttgttcgttgtaccagctcgagaattattgtaac

SEQ ID NO: 14061 - DNA, 324 bp, synthetic construct
  misc_feature 1..324: note = source = /note="Description of Artificial Sequence: Synthetic coding sequence"
  source 1..324: mol_type = other DNA
atggccttatggatgcggctgctcccattgctagccctcctggccctgtggggcccagatcctgccgcagccttcgtaaaacagcacctttgcggctctcatctggttgaagctctgtacttagtttgtggagagcgcgggtttttttacaccccagagactgaagcagaggacctacaggtggggcaggtggagctcggggggggtcctggtgctggttcactccagcctcttgctttagaggggtctctccaaaaaaggggaatcgttgagcagtgttgcacgagtatttgtagtctgtatcagttggagaattactgcaac

SEQ ID NO: 14062 - DNA, 324 bp, synthetic construct
  misc_feature 1..324: note = source = /note="Description of Artificial Sequence: Synthetic coding sequence"
  source 1..324: mol_type = other DNA
atggccctgtggatgcgtctgcttcctttactcgctctccttgcgctttgggggccagatccggcagctgcatttgtgaaacagcatctttgcgggtcacacttagtggaggccctttacctcgtgtgcggagagagagggttcttctatacgcccgaaactgaggcggaggatctacaggtgggtcaagttgagctgggaggcgggcctggcgccggatccttacaacctctggctctggagggcagcctgcagaaacgagggatcgtggaacagtgttgcacttccatctgttccctttatcagctggagaactattgtaac

SEQ ID NO: 14063 - DNA, 324 bp, synthetic construct
  misc_feature 1..324: note = source = /note="Description of Artificial Sequence: Synthetic coding sequence"
  source 1..324: mol_type = other DNA
atggccctttggatgaggctgttacctcttctcgccctcctggcactctgggggccggaccccgccgccgcctttgttaaacagcacctgtgcggtagccatttggtggaggctctctacctcgtttgcggagagcggggtttcttctatacgccggaaacggaggccgaagacctgcaggtggggcaggtcgagctgggtggaggcccgggcgcgggatctctccagcccctggcactagaagggtctctacaaaagaggggaatcgtagagcagtgctgtacctctatatgctcattgtaccagttggagaactactgcaac

SEQ ID NO: 14064 - DNA, 324 bp, synthetic construct
  misc_feature 1..324: note = source = /note="Description of Artificial Sequence: Synthetic coding sequence"
  source 1..324: mol_type = other DNA
atggccctttggatgaggctgttacctctgttggctcttctcgcgctgtggggtccagaccctgcagcggcctttgtcaagcaacatttatgtggctctcatttggtggaagccctgtacctggtttgtggagagaggggcttcttctatactcccgagacagaggctgaggaccttcaagttggccaagtggagcttggcggcggaccgggcgctgggtctctacagccactggcgttagaggggtccctccagaagcgggggattgtcgaacagtgttgcacttcaatttgtagcctataccaactcgagaattactgcaac

SEQ ID NO: 14065 - DNA, 324 bp, synthetic construct
  misc_feature 1..324: note = source = /note="Description of Artificial Sequence: Synthetic coding sequence"
  source 1..324: mol_type = other DNA
atggccttgtggatgagactactgcctctgctggctctgctggctctatggggccccgatcctgctgccgccttcgtcaagcagcacctgtgtggcagtcatctggtggaagctctgtatttagtgtgcggcgaacgggggttcttctacactcccgagaccgaggcagaagatctgcaagttgggcaggttgagctgggcgggggcccaggcgctggatctctgcaacctcttgctctggagggctccctgcagaagagagggatagtggaacaatgctgcaccagcatctgcagcctgtaccagctggaaaactactgcaac

SEQ ID NO: 14066 - DNA, 324 bp, synthetic construct
  misc_feature 1..324: note = source = /note="Description of Artificial Sequence: Synthetic coding sequence"
  source 1..324: mol_type = other DNA
atggcgctgtggatgcgcttgctgccactgctcgcgctgctcgccctgtggggtccggatccggctgccgctttcgtaaagcagcacctgtgcggtagtcatttggtggaagctctctacctggtgtgtggggaaagaggattcttctatactccggaaaccgaggcggaggatctccaagtcggccaggtggaacttggtggaggccctggggctggctcgctccaacccctggcattggaaggatccctccaaaaacggggaattgtggagcagtgctgcacgtcgatctgctcattgtaccagctggagaactactgcaat

SEQ ID NO: 14067 - DNA, 324 bp, synthetic construct
  misc_feature 1..324: note = source = /note="Description of Artificial Sequence: Synthetic coding sequence"
  source 1..324: mol_type = other DNA
atggcactttggatgaggcttctgccacttctggcactcctggccctgtggggtcctgatcccgctgcagcattcgtgaagcaacatctgtgcggcagccaccttgttgaagccttgtaccttgtgtgcggagaacgcggttttttctacactcccgaaaccgaagccgaggatcttcaggtcggtcaagtggagcttggtggcggccccggagctgggtcgctccaaccactcgcactcgaaggatcccttcagaaacgtggaattgtggagcaatgctgcacctcaatttgttccctttaccagcttgaaaactactgtaac

SEQ ID NO: 14068 - DNA, 324 bp, synthetic construct
  misc_feature 1..324: note = source = /note="Description of Artificial Sequence: Synthetic coding sequence"
  source 1..324: mol_type = other DNA
atggcgctttggatgcgcctgctgccgcttctggccctgctcgcactctggggcccggacccagcggccgcgtttgtaaagcagcacctgtgcggatcccacttggtcgaagctctgtaccttgtctgcggcgaacggggcttcttttacacccctgaaaccgaagcggaggatcttcaggtgggacaggtggaactggggggaggaccaggtgccggttcgttgcagccgctcgccctcgaggggtccctccaaaagagaggaatcgtggaacagtgctgtaccagcatctgttcattgtatcaactggagaattactgcaat

SEQ ID NO: 14069 - DNA, 324 bp, synthetic construct
  misc_feature 1..324: note = source = /note="Description of Artificial Sequence: Synthetic coding sequence"
  source 1..324: mol_type = other DNA
atggccctgtggatgcgcctgctgccccttttagccctgctggcactgtggggccccgacccagctgccgctttcgtgaaacagcacctctgcggctcccacctcgttgaggctctttatctggtttgcggtgaaaggggatttttctacactccagagacggaagccgaagaccttcaggtgggccaggtggagctgggaggcggcccaggggcagggtctctgcagcctctagcactagaggggagcctccaaaaacgcggaatcgtcgagcagtgttgcacgagtatttgctcactctatcaactcgagaactactgtaac

SEQ ID NO: 14070 - DNA, 324 bp, synthetic construct
  misc_feature 1..324: note = source = /note="Description of Artificial Sequence: Synthetic coding sequence"
  source 1..324: mol_type = other DNA
atggctttatggatgagattattaccattacttgctttattagctctttggggaccagacccagctgctgcatttgtcaaacaacatttatgtggatctcatttagttgaagcattatatttagtttgtggagaaagaggttttttttatacaccagaaacagaagcagaggaccttcaagttggtcaagttgaacttggaggtggtccaggtgcaggatcattacaacctcttgcattagaaggatctttacaaaaacgtggaatagtagaacaatgttgtacttctatttgttcactttatcaacttgaaaattattgtaac

SEQ ID NO: 14071 - DNA, 324 bp, synthetic construct
  misc_feature 1..324: note = source = /note="Description of Artificial Sequence: Synthetic coding sequence"
  source 1..324: mol_type = other DNA
atggctctctggatgaggctcctccccttgctggcactattagctctgtggggacccgatccagccgctgctttcgtcaagcagcacctgtgcgggtctcacctcgtagaggcactctacctggtgtgcggagagcgcgggttcttctacacaccagaaactgaggccgaagacctccaggtagggcaggtggaacttggagggggacccggagcaggatcgctccagcctcttgctctagaagggtccctccaaaaacggggaattgtagaacagtgttgtacttctatctgctccctataccagcttgaaaactattgtaac

SEQ ID NO: 14072 - DNA, 324 bp, synthetic construct
  misc_feature 1..324: note = source = /note="Description of Artificial Sequence: Synthetic coding sequence"
  source 1..324: mol_type = other DNA
atggctctgtggatgcggttgcttcccctacttgcactgttggcgttgtgggggcccgaccccgcagcggcttttgtcaaacagcacctgtgtggatcacaccttgtagaggccctttatttggtctgtggtgagagagggtttttctatacaccagaaacagaggcggaggacctgcaggtgggccaggtggaattaggcgggggacccggggcaggctccctccaaccattagcccttgagggcagtctgcagaagcgcggaatagtcgaacagtgttgtacgagcatatgcagcttataccaactggagaactactgcaat

SEQ ID NO: 14073 - DNA, 324 bp, synthetic construct
  misc_feature 1..324: note = source = /note="Description of Artificial Sequence: Synthetic coding sequence"
  source 1..324: mol_type = other DNA
atggccttgtggatgcgccttcttcctctgctggcgctcctggccctttggggcccagatccagccgcagcttttgtcaagcaacacctgtgtgggtcccatctcgtggaagcactgtacctcgtctgtggtgaacggggtttcttctacactcctgaaaccgaagcagaggacttgcaggtcggtcaggtggaactcggaggaggcccaggggcaggatccctccaaccacttgctcttgaaggtagccttcaaaaacgcggcattgtggaacagtgctgtacctccatttgttccctgtaccagttggaaaactattgcaac

SEQ ID NO: 14074 - DNA, 324 bp, synthetic construct
  misc_feature 1..324: note = source = /note="Description of Artificial Sequence: Synthetic coding sequence"
  source 1..324: mol_type = other DNA
atggcactatggatgagactattgcctttattggcgcttctcgctctatggggtccggaccccgctgccgctttcgtaaagcagcacttatgtggctcacacctcgtggaagcactctatctcgtctgcggcgaacgcggcttcttctatacacccgaaaccgaggccgaggacctgcaggtcggtcaggtggagctgggcggcggtcctggcgctggttctctccaacctctggccttggaagggtctctccagaagcgcggcattgttgaacaatgctgtacatcaatttgctccctctaccaactggaaaactattgcaac

SEQ ID NO: 14075 - DNA, 324 bp, synthetic construct
  misc_feature 1..324: note = source = /note="Description of Artificial Sequence: Synthetic coding sequence"
  source 1..324: mol_type = other DNA
atggccctctggatgaggctcctgcctctgctggcacttctggcactttggggccctgacccggcagctgcatttgtcaagcaacacctgtgtggttctcatctcgtggaggcattgtatctggtgtgtggagaaagaggattcttttacacccctgagactgaagccgaagatctgcaagtgggacaggtcgagctcggcgggggtccgggcgcgggatcgcttcaaccattggccctcgaaggtagcctccagaaacggggaattgtggaacagtgttgcaccagtatctgttccttgtaccaacttgagaattactgcaac

SEQ ID NO: 14076 - DNA, 324 bp, synthetic construct
  misc_feature 1..324: note = source = /note="Description of Artificial Sequence: Synthetic coding sequence"
  source 1..324: mol_type = other DNA
atggcactttggatgcgccttctgcccttattggcattattggccctctggggcccggatcctgcagctgcgtttgtaaaacaacacctgtgcggctcccaccttgtcgaagccttgtatctggtgtgcggagagagggggtttttctacaccccagaaacagaggcagaggaccttcaagttgggcaggtcgaattaggagggggacccggggcaggatcattgcagccactcgctttggaaggatctctccagaaaagaggaatcgtcgagcaatgctgcaccagcatctgcagtctgtatcagttggaaaactattgtaat

SEQ ID NO: 14077 - DNA, 324 bp, synthetic construct
  misc_feature 1..324: note = source = /note="Description of Artificial Sequence: Synthetic coding sequence"
  source 1..324: mol_type = other DNA
atggccctgtggatgaggctgctcccgctgctggcgttgctggcgctgtggggaccagaccccgctgccgctttcgtgaagcagcacctgtgcggatctcatctggtggaggcactctatctggtctgcggggaacggggttttttctacactcctgaaaccgaggcagaggatttgcaagtcggacaagttgagcttggcggcggaccgggcgccggatccctccaaccattggcactcgaaggatctctgcagaaacgcggaatagtcgaacagtgttgcacctcaatctgcagcctgtaccagctcgagaattactgcaat

SEQ ID NO: 14078 - DNA, 324 bp, synthetic construct
  misc_feature 1..324: note = source = /note="Description of Artificial Sequence: Synthetic coding sequence"
  source 1..324: mol_type = other DNA
atggctctgtggatgagacttcttcctttactggccctactggccctttggggcccggacccagctgccgcattcgtcaaacagcacttatgtggctctcacttggttgaagcgctgtacctggtttgcggagagcgagggtttttttatacccctgagacggaagccgaggatctccaggtgggccaggtggagcttgggggaggacccggagctggctctctgcagccacttgctctggagggctcattgcagaagcgcggtattgttgagcagtgctgtacgtctatttgttccctgtatcagctggagaactattgcaat

SEQ ID NO: 14079 - DNA, 324 bp, synthetic construct
  misc_feature 1..324: note = source = /note="Description of Artificial Sequence: Synthetic coding sequence"
  source 1..324: mol_type = other DNA
atggcgttgtggatgaggctgctcccgttgctcgccctgctcgctctgtggggaccggacccggccgcagcctttgtcaagcagcacctgtgcggaagccatctcgtggaagccctctaccttgtgtgcggcgagcgagggtttttctacaccccagagactgaagccgaggatctgcaggttggacaagtggagttgggcggaggcccaggtgccggatcgctccagccgctggcactcgagggatccctgcaaaagcggggcatcgtggagcaatgctgtacctcgatctgcagcctgtaccaattggagaactactgtaac

SEQ ID NO: 14080 - DNA, 324 bp, synthetic construct
  misc_feature 1..324: note = source = /note="Description of Artificial Sequence: Synthetic coding sequence"
  source 1..324: mol_type = other DNA
atggccttgtggatgagactgctgcctcttttagctttgctggccctctggggtccggacccagcagctgcattcgttaaacagcatctgtgtggatctcatttggtcgaggccctgtatctggtgtgcggcgaacgtggctttttttacacccctgaaacagaggctgaagacctccaggtggggcaagtggaactggggggcggtccaggcgcaggctccttacaaccactcgccctcgagggaagcctgcagaagcgcgggatagtggaacagtgttgcacctctatttgttcgctgtaccagctagagaattattgtaac

SEQ ID NO: 14081 - DNA, 324 bp, synthetic construct
  misc_feature 1..324: note = source = /note="Description of Artificial Sequence: Synthetic coding sequence"
  source 1..324: mol_type = other DNA
atggcgctgtggatgaggttactccctctcctggcgttgttggccctgtggggacccgatcctgcagccgcttttgtcaagcaacacttgtgcggctcacacttagttgaggcactgtatcttgtgtgtggtgagcgaggttttttttatacacctgagacggaagctgaagatctccaggttgggcaggtagagttgggcggaggtccaggcgctggtagcctccagcctctagctttggagggttctcttcagaaacgcggcattgtcgagcagtgctgcacatcaatttgctccctgtatcaattggagaactattgtaat

SEQ ID NO: 14082 - DNA, 324 bp, synthetic construct
  misc_feature 1..324: note = source = /note="Description of Artificial Sequence: Synthetic coding sequence"
  source 1..324: mol_type = other DNA
atggccctctggatgagattgctccctcttctcgctctgctggccctgtggggacctgaccctgctgccgcttttgtgaaacaacatctgtgtgggtcccacctcgtggaggcactgtaccttgtctgtggagagagggggtttttctacactcccgagaccgaggccgaagatctgcaggtgggacaggtggagcttggtggagggcctggggcggggagtctgcagcctctggccctggaaggatcactgcagaagcgaggcattgtggagcagtgctgtacaagtatctgttcactttaccagctggaaaactattgcaac

SEQ ID NO: 14083 - DNA, 324 bp, synthetic construct
  misc_feature 1..324: note = source = /note="Description of Artificial Sequence: Synthetic coding sequence"
  source 1..324: mol_type = other DNA
atggcactctggatgcgtctcctgcccctgctggctctactggccctctggggcccagatcccgctgccgcattcgttaagcagcatctctgtggctctcatttggtcgaggcactttacctcgtctgcggcgagcgtggctttttctacacgcccgaaacggaggccgaggatttgcaagtgggccaggtcgagcttggtggtggtccaggcgccggttctctccagcctctggcgctggagggtagtttgcagaagcgtgggatcgtcgagcaatgctgcacctctatctgcagcctctaccaactcgagaattattgcaac

SEQ ID NO: 14084 - DNA, 324 bp, synthetic construct
  misc_feature 1..324: note = source = /note="Description of Artificial Sequence: Synthetic coding sequence"
  source 1..324: mol_type = other DNA
atggcgctgtggatgaggttgctgcccctcctggccttgctggctctgtggggacccgatcctgccgccgctttcgtaaagcagcatttgtgtgggtctcacctggttgaagcactgtatctggtatgcggagaacggggctttttttacactccagagacggaagctgaggacttgcaggtcggtcaggtcgaacttggcggtggtccgggtgccggctccttgcagcccttggccctggaaggttcactgcagaaacgaggcatcgtggagcagtgttgcacttcaatctgctccttgtatcagctggagaattattgcaat

SEQ ID NO: 14085 - DNA, 324 bp, synthetic construct
  misc_feature 1..324: note = source = /note="Description of Artificial Sequence: Synthetic coding sequence"
  source 1..324: mol_type = other DNA
atggccctttggatgcggctccttcccttgctggcacttcttgcattgtggggaccggaccccgcagcagcatttgtgaagcagcacctgtgcggatcccaccttgtggaagctctttaccttgtgtgcggagaacggggattcttttacacgccagaaactgaagcagaggatctccaagtgggccaggtggaactggggggaggtcccggagcaggttcactgcaacctctcgcactggaagggtcacttcagaagagaggaattgtggaacaatgttgtacctctatctgctcgctgtaccaactggagaattactgtaac

SEQ ID NO: 14086 - DNA, 324 bp, synthetic construct
  misc_feature 1..324: note = source = /note="Description of Artificial Sequence: Synthetic coding sequence"
  source 1..324: mol_type = other DNA
atggctctgtggatgcgcttgctgccattgctggcacttctcgcactctggggtcccgatccagctgctgcgttcgtcaagcagcacttgtgcggaagccacctcgtagaagccctttatcttgtgtgtggcgagaggggattcttctacacaccagagaccgaggctgaggatcttcaggtcggtcaggtcgaactgggcggcggcccaggagcaggtagcttgcaacccctcgcattggaaggatccctgcagaaaaggggtatagtggaacagtgttgtacctccatctgttccctgtatcaactcgagaattattgcaac

SEQ ID NO: 14087 - DNA, 324 bp, synthetic construct
  misc_feature 1..324: note = source = /note="Description of Artificial Sequence: Synthetic coding sequence"
  source 1..324: mol_type = other DNA
atggcactgtggatgcgcttgctgcctctgctcgcacttctggcactgtggggacccgacccagcggcagcattcgtcaagcagcatctgtgtggatcgcatctcgtggaagctctctacctcgtctgcggggaacggggtttcttctacaccccagaaactgaggctgaggacctgcaagtggggcaggtggaactgggaggtggcccgggcgccgggtccctccaaccgttggccctggagggatcgctccaaaagaggggaatcgttgagcagtgttgcacgtccatctgctccttgtaccagctcgagaactactgtaac

SEQ ID NO: 14088 - DNA, 324 bp, synthetic construct
  misc_feature 1..324: note = source = /note="Description of Artificial Sequence: Synthetic coding sequence"
  source 1..324: mol_type = other DNA
atggcgttgtggatgcggttgctgccattactcgcactgctcgccctgtgggggcctgatcccgctgcagcttttgtgaaacagcatctgtgtgggagccacttagtggaggcattgtacttagtgtgtggggagagaggtttcttttatactcccgagacggaagccgaggatctgcaggtggggcaggtcgagttaggagggggacccggggccggaagcctacagccattggcccttgagggcagcttacaaaagaggggcatcgtcgagcagtgttgtacctccatttgttccctctaccagctagagaattattgcaac

SEQ ID NO: 14089 - DNA, 324 bp, synthetic construct
  misc_feature 1..324: note = source = /note="Description of Artificial Sequence: Synthetic coding sequence"
  source 1..324: mol_type = other DNA
atggccctgtggatgcggttgctcccgctgctcgctctgttggcgctctggggaccggaccctgccgcggctttcgtgaagcagcatctgtgtggctcgcacctggtggaagcactgtacctggtgtgcggagaaagagggttcttttacaccccagagactgaagccgaggatctgcaagtcggccaggtcgagctcgggggtggtcccggcgcaggatcgcttcagccgctcgccctggagggatcactgcagaaacgcggaatcgtggaacaatgttgcaccagcatctgctccctctaccaacttgaaaactactgcaat

SEQ ID NO: 14090 - DNA, 324 bp, synthetic construct
  misc_feature 1..324: note = source = /note="Description of Artificial Sequence: Synthetic coding sequence"
  source 1..324: mol_type = other DNA
atggcactttggatgaggctccttccccttctggcgctgctcgccttgtggggcccggacccggctgccgcttttgtcaaacagcacctgtgcggctcccatctggtagaagcactttacttggtctgcggtgagcgcgggttcttctacactcctgaaaccgaggcggaagatttgcaagtgggacaagtggaactgggaggcggcccaggggcgggaagtctccagcccctcgccctcgagggaagcctgcagaagcggggaatcgtggaacagtgctgcaccagcatctgctcactctaccagctggagaactactgtaac

SEQ ID NO: 14091 - DNA, 324 bp, synthetic construct
  misc_feature 1..324: note = source = /note="Description of Artificial Sequence: Synthetic coding sequence"
  source 1..324: mol_type = other DNA
atggcactgtggatgagattgctccccctgttggccctgttggcgctttggggcccggaccccgcagccgcatttgtgaagcaacacctctgcggatcgcatcttgtcgaagccctgtacctcgtgtgtggggagcggggattcttctacacgcccgaaactgaggccgaggacttgcaggttggccaagtggagcttggagggggaccgggcgcgggctcgctgcagccgttggctctggagggatcactgcagaaacgcggaatcgtggagcagtgttgcactagcatttgctcgctctatcaactggaaaactactgtaac

SEQ ID NO: 14092 - DNA, 324 bp, synthetic construct
  misc_feature 1..324: note = source = /note="Description of Artificial Sequence: Synthetic coding sequence"
  source 1..324: mol_type = other DNA
atggcgttgtggatgaggttgctgccattgctcgcacttctggcattgtgggggccggatccggccgctgccttcgtgaaacagcacctttgcggttcacatttagtagaggccctatatcttgtgtgtggtgaaagagggttcttctacaccccagagactgaagccgaggacctccaagttggtcaggttgaactcggcggcggccccggtgccggaagcctgcaacccctagccctggagggtagcctgcagaagagaggcattgtggagcagtgttgcacttccatctgcagcctctaccaattggagaattactgtaac

SEQ ID NO: 14093 - DNA, 324 bp, synthetic construct
  misc_feature 1..324: note = source = /note="Description of Artificial Sequence: Synthetic coding sequence"
  source 1..324: mol_type = other DNA
atggctctctggatgagactgctgcccctgctggccctgctcgcactttggggcccggacccagccgccgcatttgtcaagcagcatctgtgcggttcacatctggtggaagccctgtacctggtctgcggtgagcgcggatttttctacaccccagagactgaagccgaagatctccaggtgggccaagtagagctgggaggcgggcctggcgcgggtagccttcagcctcttgctctggaagggtccttgcagaagcgggggatagtcgagcagtgttgcacctccatttgcagtctctatcagctggaaaattactgtaac

SEQ ID NO: 14094 - DNA, 324 bp, synthetic construct
  misc_feature 1..324: note = source = /note="Description of Artificial Sequence: Synthetic coding sequence"
  source 1..324: mol_type = other DNA
atggccctgtggatgcgtctgctcccacttctcgccttgcttgctctgtggggaccggacccggctgcagcgttcgtgaagcaacacctgtgcgggtcccatctggtagaagcactctacctcgtctgcggggaacgcggattcttttacacccctgaaactgaggcggaggatctccaggtgggacaggttgagctgggcggtggacccggggcgggttccctccagcccttggctctcgaaggatcgcttcagaaacggggcatcgtggaacagtgctgcacgtctatctgttcactgtaccaattggagaactattgtaat

SEQ ID NO: 14095 - DNA, 324 bp, synthetic construct
  misc_feature 1..324: note = source = /note="Description of Artificial Sequence: Synthetic coding sequence"
  source 1..324: mol_type = other DNA
atggccttgtggatgcgccttttgcctcttctggcgctgctggcattgtggggccccgaccctgctgccgcttttgtgaagcagcacctctgcggtagccatcttgtcgaagcactctacctggtatgtggagaacgtggtttcttttacaccccggaaactgaggcagaggatttgcaagtggggcaggtggaactcggcggaggccctggagcgggttccctccaaccacttgcactcgagggatcgcttcaaaaacggggtatcgtggagcagtgttgtacctctatttgttcactctatcagttggaaaactactgcaat

SEQ ID NO: 14096 - DNA, 324 bp, synthetic construct
  misc_feature 1..324: note = source = /note="Description of Artificial Sequence: Synthetic coding sequence"
  source 1..324: mol_type = other DNA
atggcgttgtggatgaggcttcttccactcctggcactgctggccctgtggggtccagaccctgccgcagcgtttgtcaagcaacacctctgtggttcacatctcgtcgaagcactttaccttgtgtgtggagaacgggggtttttctatactccagaaaccgaagcagaggacctgcaagtgggtcaggtggaactgggtggaggtccaggtgccggatcccttcaaccgctggcgctggaaggatcgctgcagaaacgcggaattgtcgaacaatgctgtacctcaatttgttctctctaccaacttgagaactactgtaat

SEQ ID NO: 14097 - DNA, 324 bp, synthetic construct
  misc_feature 1..324: note = source = /note="Description of Artificial Sequence: Synthetic coding sequence"
  source 1..324: mol_type = other DNA
atggcactgtggatgcgcctgctgccgctcctggcgttgctggctctgtggggacccgatccggccgcggcttttgtgaaacaacacctgtgcggatcccatttggtggaagccctgtacctggtctgtggtgagagaggcttcttctacacgcccgaaaccgaagctgaagatctgcaagtcggtcaggtggaacttggaggcggaccaggagcgggaagcctgcaaccactggccctcgaagggtcgttgcagaagcggggtatcgtggagcaatgctgcacctcaatttgtagcctctaccagctcgagaactattgtaac

SEQ ID NO: 14098 - DNA, 324 bp, synthetic construct; identical to SEQ ID NO: 14080
  misc_feature 1..324: note = source = /note="Description of Artificial Sequence: Synthetic coding sequence"
  source 1..324: mol_type = other DNA

SEQ ID NO: 14099 - DNA, 324 bp, synthetic construct
  misc_feature 1..324: note = source = /note="Description of Artificial Sequence: Synthetic coding sequence"
  source 1..324: mol_type = other DNA
atggccctttggatgcgactgctgcctctgctggctcttcttgcactttggggccctgatcctgctgcagcgtttgtgaagcagcatctgtgcggatcccacctcgtcgaagcactctacttggtgtgtggagaaagagggttcttttacacgcccgaaaccgaggccgaagatttgcaggtcggccaggtggaactgggaggtggaccgggagcaggttcgctgcaacctctcgcactcgagggctcactgcagaagagaggcattgtggaacagtgttgtacttcgatttgttcgctgtaccaactggagaactactgtaat

SEQ ID NO: 14100 - DNA, 324 bp, synthetic construct
  misc_feature 1..324: note = source = /note="Description of Artificial Sequence: Synthetic coding sequence"
  source 1..324: mol_type = other DNA
atggcactctggatgcggcttctcccgctgctggcactcctcgcactctggggaccggatccggcagcagcgtttgtgaaacaacatctgtgcggctcgcacctggtcgaagccctgtacctggtctgcggcgaacgcggcttcttttacactccagaaaccgaagcggaggacctgcaggtgggacaagtggagctcggcggtgggcctggagcagggtccctgcaacctctcgccctggaaggaagcctgcagaagcggggaatcgtggagcagtgttgtacttccatctgtagcttgtaccaactggaaaactattgtaac

SEQ ID NO: 14101 - DNA, 324 bp, synthetic construct
  misc_feature 1..324: note = source = /note="Description of Artificial Sequence: Synthetic coding sequence"
  source 1..324: mol_type = other DNA
atggctctgtggatgcgcctgttgcctctcctggcactcctcgccttgtggggacccgatcccgccgccgccttcgttaagcaacacctctgcggtagccatttggttgaggccctctacctcgtgtgtggagagcgggggttcttttatacccccgagacagaggcagaagatctgcaagtgggccaagtggaactcggcggcggaccaggagccgggtccctgcagccacttgcccttgagggttccctccagaaacggggtattgtggagcagtgttgcacatccatttgttctctctaccagctggagaactactgcaat

SEQ ID NO: 14102 - DNA, 324 bp, synthetic construct
  misc_feature 1..324: note = source = /note="Description of Artificial Sequence: Synthetic coding sequence"
  source 1..324: mol_type = other DNA
atggctctgtggatgcgactgctgccacttctggccctgctggcgctgtggggaccggacccggctgccgctttcgttaagcagcatttgtgtggttcgcacctcgtggaggccctttacctggtgtgcggcgagcgcggattcttctatacccccgaaacggaggccgaggatctccaagtcggccaggtcgaactgggtggcggccctggtgccgggtccctgcagccactcgccttggaaggatcactccagaagagaggaattgtggagcagtgctgcacttcgatttgttcactctaccaacttgagaactactgcaac

SEQ ID NO: 14103 - DNA, 324 bp, synthetic construct
  misc_feature 1..324: note = source = /note="Description of Artificial Sequence: Synthetic coding sequence"
  source 1..324: mol_type = other DNA
atggctctctggatgcgcctgctcccactgctggcgctacttgcgctgtggggaccagacccagccgccgcatttgttaagcaacacctttgtggctcgcacttggtggaagctctgtatctggtctgcggggagcgcggattcttttacacccctgagaccgaggcggaggatctgcaggtgggccaggtagagctgggaggcggaccaggcgccggctcgctgcagccgctggctctcgaaggttccctgcagaagcgcgggattgttgaacagtgttgtacctccatctgcagcctttaccaactggagaattactgtaat

SEQ ID NO: 14104 - DNA, 324 bp, synthetic construct
  misc_feature 1..324: note = source = /note="Description of Artificial Sequence: Synthetic coding sequence"
  source 1..324: mol_type = other DNA
atggccctgtggatgcgcttgctcccgctgctcgcgctgctggcgctgtggggacccgacccggcggctgccttcgtcaagcagcatttgtgcggctcgcacctggtcgaggccctgtacttggtgtgcggagagcgcggctttttctacactccagaaacggaagcagaagatctccaagtggggcaagtggagctgggtggcgggccgggcgctggatcactccagcctctggctctcgagggctcactgcagaagcgcggaatcgtcgagcagtgctgcaccagcatttgcagtctgtatcaactcgaaaactactgtaat

SEQ ID NO: 14105 - DNA, 324 bp, synthetic construct
  misc_feature 1..324: note = source = /note="Description of Artificial Sequence: Synthetic coding sequence"
  source 1..324: mol_type = other DNA
atggctctatggatgcggttactgcctctcctggccctgctcgccctctgggggccagatcccgccgccgccttcgtaaagcagcacctctgcggttctcacttagttgaagccctgtaccttgtgtgtggcgaaagggggtttttctacacccctgaaactgaggctgaggatttacaagtaggccaggtcgaacttggtgggggtcctggggctgggtctttgcagcccttagcactggaaggatccctgcaaaaaagggggatcgtcgaacagtgctgcacctcaatttgttcattgtatcaactggagaattattgtaac

SEQ ID NO: 14106 - DNA, 324 bp, synthetic construct
  misc_feature 1..324: note = source = /note="Description of Artificial Sequence: Synthetic coding sequence"
  source 1..324: mol_type = other DNA
atggccctttggatgcggcttctgccacttcttgcactgctcgccctttgggggcctgacccggcagccgcatttgtgaaacaacacctttgcggctcgcatcttgtcgaagcactgtaccttgtgtgcggcgaacgtggcttcttttacacccctgaaaccgaagcagaggatcttcaagtgggacaagtggagctgggaggaggtcctggtgcagggtcgcttcaacctctcgcactcgaaggctcactgcagaagcgagggattgtggaacaatgttgtacttcaatttgttctctctaccagttggaaaactactgtaac

SEQ ID NO: 14107 - DNA, 324 bp, synthetic construct
  misc_feature 1..324: note = source = /note="Description of Artificial Sequence: Synthetic coding sequence"
  source 1..324: mol_type = other DNA
atggcactttggatgaggcttctgcccttgttggccctcctggcactctggggtccggatcctgccgcagcatttgtgaagcagcacctttgcggcagccatctcgtggaggcactttacttggtgtgcggcgaaagaggtttcttttacactccagagacggaagctgaggaccttcaagttggacaagtcgagctgggtggcggtccaggtgcaggctcgctccaacctcttgcgctggaaggatctctgcaaaaacgcgggattgtggaacagtgctgtacctctatttgttcactttatcagctggagaattactgtaac

SEQ ID NO: 14108 - DNA, 324 bp, synthetic construct
  misc_feature 1..324: note = source = /note="Description of Artificial Sequence: Synthetic coding sequence"
  source 1..324: mol_type = other DNA
atggcgttgtggatgcgtctcctcccgctcctcgccctgctggcgttgtggggccccgatcccgcagcagcctttgtcaagcagcatctatgcggcagtcacttggtcgaagctctgtacctcgtgtgtggagagcgaggttttttctatacccctgaaaccgaggctgaggatctccaggtagggcaagttgagttaggtggtggacccggagccggatctttacagcctctagcacttgaaggcagtctacagaagagaggcattgttgaacagtgttgcacgtctatctgctctctttaccagctcgaaaactactgcaac

SEQ ID NO: 14109 - DNA, 324 bp, synthetic construct
  misc_feature 1..324: note = source = /note="Description of Artificial Sequence: Synthetic coding sequence"
  source 1..324: mol_type = other DNA
atggctctgtggatgcgcttgcttcctttgctggctcttctggcattatggggcccggatcccgccgcggcgttcgttaagcaacatctctgtggcagtcacttagtcgaagctctgtatctcgtctgcggtgagcgcgggtttttctacacgccggagactgaggcagaggacctgcaggtgggacaggtggaactcggcggggggccaggcgccgggtctctgcaacctctggccctggagggctccctgcagaagagaggtatcgtcgagcagtgttgtacaagtatttgctcactgtatcagctggagaattattgcaac

SEQ ID NO: 14110 - DNA, 324 bp, synthetic construct
  misc_feature 1..324: note = source = /note="Description of Artificial Sequence: Synthetic coding sequence"
  source 1..324: mol_type = other DNA
atggctctctggatgagattgttacctctcctggccttactcgcactgtggggtccggatccggctgctgcttttgttaaacagcatctttgcgggagtcacctggtcgaagctctgtaccttgtgtgtggagagagaggattcttttacacaccggaaacggaagccgaggatctccaggttggtcaggtcgagctgggaggcggccccggagctgggagccttcagccgttggcattggagggctcactgcagaaaagaggtatcgtggagcagtgttgcacgagtatctgttcactgtaccagctggaaaactattgtaac

SEQ ID NO: 14111 - DNA, 324 bp, synthetic construct
  misc_feature 1..324: note = source = /note="Description of Artificial Sequence: Synthetic coding sequence"
  source 1..324: mol_type = other DNA
atggcactctggatgaggttgctccctttgctagcactgctggcgctgtggggtccagaccctgcagctgctttcgtgaaacagcacttatgtggctcccatcttgtggaagctttgtatctggtttgtggagagcgtggattcttctatactccagaaactgaggcggaagatttgcaggtcggtcaggttgagctgggaggcgggccaggagcgggttcgttgcagcccttagctttggaaggaagcttgcagaagcggggcatagtggaacagtgttgtacctcgatctgttcgttatatcaactggaaaactattgtaac

SEQ ID NO: 14112 - DNA, 324 bp, synthetic construct
  misc_feature 1..324: note = source = /note="Description of Artificial Sequence: Synthetic coding sequence"
  source 1..324: mol_type = other DNA
atggcactgtggatgagattgctccccctgttggcactcctggcgctgtggggacccgatccggcagccgcttttgtgaaacaacacctgtgcggcagccatctggtggaagctctttacctcgtctgtggtgaacgcggctttttctacactccggaaacggaagcagaagatctccaagtgggccaagtcgagctcggaggaggtcctggagcagggtcgcttcagcctctggcacttgaggggagcctccagaagagaggtattgtggaacaatgttgtacctcgatctgttcactgtaccaactcgaaaactactgcaat

SEQ ID NO: 14113 - DNA, 324 bp, synthetic construct
  misc_feature 1..324: note = source = /note="Description of Artificial Sequence: Synthetic coding sequence"
  source 1..324: mol_type = other DNA
atggcgttgtggatgcggctgttgccacttctggcgctgcttgcgctttggggccctgaccctgccgctgccttcgtaaatcagcacctgtgcggttcacatcttgtggaggctctgtacttggtgtgtggcgaaagaggatttttctataccaagccgactgaagcagaagatctgcaagtcggtcaagtcgaattgggaggcggaccgggggccggatccctgcagcccctggcactcgaaggaagcctgcagaagcgcggcattgtggagcagtgctgcacttcgatctgttcactctaccagctggagaactactgtaat

SEQ ID NO: 14114 - DNA, 324 bp, synthetic construct
  misc_feature 1..324: note = source = /note="Description of Artificial Sequence: Synthetic coding sequence"
  source 1..324: mol_type = other DNA
atggcactgtggatgcgcctcctgccactcctcgccctgctggcgctctggggaccggaccccgcggctgcttttgtgaatcagcacctctgcggaagccacctggtggaggccctgtacctcgtttgcggggagagagggtttttctacactaagccaaccgaagccgaggatctgcaggtgggccaggtggagctgggaggtggccccggcgcggggtcactccagccgctggccctggagggatcccttcagaagagaggtatcgtcgaacagtgctgcacctccatctgttccctgtaccaactggaaaactactgcaac

SEQ ID NO: 14115 - DNA, 324 bp, synthetic construct
  misc_feature 1..324: note = source = /note="Description of Artificial Sequence: Synthetic coding sequence"
  source 1..324: mol_type = other DNA
atggccttgtggatgcgtctgctcccactcctggcacttctggccctctggggaccagatccggcagcggcgtttgtgaaccaacatctgtgcgggagccacctggttgaagccctgtatttggtctgtggtgagaggggctttttctacactaaacctacggaagcagaggatctccaggtcggtcaagtggaacttggtggaggacccggcgcaggatcactccaacctcttgcgctcgagggaagcctccagaagcgaggtatcgtcgaacaatgctgtacctcaatttgttcactctaccaactggaaaactactgtaac

SEQ ID NO: 14116 - DNA, 324 bp, synthetic construct
  misc_feature 1..324: note = source = /note="Description of Artificial Sequence: Synthetic coding sequence"
  source 1..324: mol_type = other DNA
atggcactgtggatgcgccttctccctctgctcgcactgctcgcattgtgggggccggacccggccgcagcttttgtcaatcagcacctctgtggatcacatctggtcgaagctctttacctggtgtgtggtgaacgcgggttcttctataccaagccaactgaggcggaagatctccaagttggacaagtcgaacttggtggcggtcccggtgctggatccctgcagccactggcactggagggatcccttcaaaaacgtggaattgtggagcagtgttgcacctcgatctgttcgctctaccagctggaaaactactgtaac

SEQ ID NO: 14117 - DNA, 324 bp, synthetic construct
  misc_feature 1..324: note = source = /note="Description of Artificial Sequence: Synthetic coding sequence"
  source 1..324: mol_type = other DNA
atggccctctggatgcgcctcctccctctgctagcattgctcgcgctgtggggtcccgatcccgcagccgcctttgtaaaccaacacctctgtggatcccatctggtggaggctctttacttagtgtgtggcgaaaggggcttcttctacacaaaaccaacggaggctgaagatctccaagtcggacaggtcgagctcgggggtggccctggggctggttccctgcagccactggctttggaggggagccttcagaaacggggaatcgtggaacagtgctgcacttctatctgctcactttatcagctggaaaactattgtaat

SEQ ID NO: 14118 - DNA, 324 bp, synthetic construct
  misc_feature 1..324: note = source = /note="Description of Artificial Sequence: Synthetic coding sequence"
  source 1..324: mol_type = other DNA
atggctctgtggatgcggctcctccccttgctcgccctccttgcactgtggggccctgaccctgctgcggcctttgtgaatcagcacttgtgtggtagccaccttgtagaggcactgtacttggtctgcggtgaaaggggctttttctatactaaaccaacagaggcagaggacctgcaagtggggcaggttgagttgggggggggtccaggcgccggatcattgcagccacttgctttagagggctcactccagaaaagggggatcgttgagcaatgctgcacaagcatatgctccctgtaccaactggagaattactgtaac

SEQ ID NO: 14119 - DNA, 324 bp, synthetic construct
  misc_feature 1..324: note = source = /note="Description of Artificial Sequence: Synthetic coding sequence"
  source 1..324: mol_type = other DNA
atggccttgtggatgcgactgctccctcttctggctcttctcgcgctctggggtccggatccagctgcagctttcgtgaaccagcatctctgcggcagccacctggttgaggcgctgtacctagtatgcggagagagggggtttttctacaccaagccaactgaggctgaagatttgcaggtcggccaggtagaactaggcggggggccaggagctggatccctgcagccattggcgctggaagggagtttgcagaagcggggtattgtggagcagtgttgtacaagcatatgttcactttaccagctggaaaactattgtaat

SEQ ID NO: 14120 - DNA, 324 bp, synthetic construct
  misc_feature 1..324: note = source = /note="Description of Artificial Sequence: Synthetic coding sequence"
  source 1..324: mol_type = other DNA
atggccctctggatgcggctgttgccgctcctcgcactactcgctttgtgggggcccgacccagcagctgccttcgtgaatcagcacttatgcggatcacacctggtggaggcgctctaccttgtctgcggcgaacggggttttttctacacaaaacccaccgaagccgaggatcttcaagttggtcaggtggagctcggcggcgggcccggtgctggatctctacagcctctcgctctagagggatccctgcagaaacgtggcatcgtggaacagtgctgcaccagtatttgttccctttatcagctcgagaactactgtaac

SEQ ID NO: 14121 - DNA, 324 bp, synthetic construct
  misc_feature 1..324: note = source = /note="Description of Artificial Sequence: Synthetic coding sequence"
  source 1..324: mol_type = other DNA
atggcactgtggatgcggcttcttccgcttctcgcgctcctggcgctgtggggccctgatccggccgccgcgttcgtcaaccaacatttgtgtggctcccacctcgtggaggcactctatctggtctgtggggaacgcggattcttttacactaagccaactgaggccgaggaccttcaagttgggcaggtggagctgggaggaggtccgggagcaggatcactccagccactcgcactggaaggatccttgcagaagcgcggcatcgtggagcagtgctgcactagcatttgctcgctctaccaactcgaaaactactgcaat

SEQ ID NO: 14122 - DNA, 324 bp, synthetic construct
  misc_feature 1..324: note = source = /note="Description of Artificial Sequence: Synthetic coding sequence"
  source 1..324: mol_type = other DNA
atggctttgtggatgcggttacttccactgctggcgttacttgcgctgtggggtccagaccctgctgctgcattcgtgaatcagcacttgtgcgggtcccacttagtcgaggccctttacctagtgtgtggagaaagaggcttcttttataccaagcccactgaagcggaggacttgcaggtcggccaggtggagctgggcggtggccccggcgcaggatctctgcagcccctggcacttgagggctctcttcagaagagggggatcgtggagcagtgttgtactagtatctgcagcctctatcaactcgaaaattactgcaat

SEQ ID NO: 14123 - DNA, 324 bp, synthetic construct
  misc_feature 1..324: note = source = /note="Description of Artificial Sequence: Synthetic coding sequence"
  source 1..324: mol_type = other DNA
atggctctttggatgagactgctgccactcctggctttgctggctttgtggggccccgatcctgccgccgccttcgtgaaccagcacctgtgtggctcccatttggtggaggccttgtatctggtctgcggagagagagggtttttttatacgaaacctacagaggcagaggatctgcaggtggggcaggtcgagctgggtggcggtcctggagctggctccctgcagcccctggccttggaaggttctctgcagaaaaggggtatcgtcgagcagtgctgcactagcatatgctccctctatcaacttgagaattattgcaat

SEQ ID NO: 14124 - DNA, 324 bp, synthetic construct
  misc_feature 1..324: note = source = /note="Description of Artificial Sequence: Synthetic coding sequence"
  source 1..324: mol_type = other DNA
atggcattgtggatgcgattgctgccgttgctagcccttcttgccttgtggggccctgaccctgctgccgcctttgtcaaccagcatttgtgtgggtcccatctggtcgaggccctgtatctggtgtgtggtgagagggggttcttctatactaaacccacggaggcagaggacttgcaggtggggcaggtcgaactcgggggaggacccggcgccggaagcttacagccacttgctcttgaaggaagcttacagaaaagagggatcgtggaacagtgctgcacaagtatatgctcactatatcagctagagaactactgcaac

SEQ ID NO: 14125 - DNA, 324 bp, synthetic construct
  misc_feature 1..324: note = source = /note="Description of Artificial Sequence: Synthetic coding sequence"
  source 1..324: mol_type = other DNA
atggcactgtggatgcgcctgttgcccctgctggcgctcctggcactttggggcccagacccggccgcagcttttgtcaaccaacatctttgtggatctcacctggtggaggctttgtaccttgtctgtggagaaagggggtttttctacacgaaacctaccgaagccgaggatctgcaagtgggacaagtggaactgggagggggacctggcgctgggtcgttgcagccgcttgccctcgagggttccctccagaagagaggaattgtggaacaatgttgcactagcatctgtagcttgtaccagctggaaaactactgcaat

SEQ ID NO: 14126 - DNA, 324 bp, synthetic construct
  misc_feature 1..324: note = source = /note="Description of Artificial Sequence: Synthetic coding sequence"
  source 1..324: mol_type = other DNA
atggcactttggatgcggctgcttcctcttctggcactgttggccctgtggggacctgatccagccgcagcgtttgtgaaccaacatctttgtggtagccatctggtggaagcactgtacctggtttgcggcgaaagaggttttttctacactaagccaaccgaagcagaagatcttcaagtcgggcaagtcgagctgggaggagggcccggagctggctccttgcagcctcttgcactcgaaggcagtctccaaaagaggggcattgtcgagcaatgttgtacctccatctgcagcctttaccagctcgagaattactgcaat

SEQ ID NO: 14127 - DNA, 324 bp, synthetic construct
  misc_feature 1..324: note = source = /note="Description of Artificial Sequence: Synthetic coding sequence"
  source 1..324: mol_type = other DNA
atggcactctggatgcgactgctgccactcctggcattgctcgcgctctggggccctgacccagccgccgcgtttgtgaaccaacatctctgtggatctcacctcgtggaggcactgtacctcgtgtgcggagagcggggtttcttttacaccaagcccacggaggcagaggatcttcaagtcggccaggtggaacttggcggtggacctggggcgggtagcctgcaaccgttggcacttgaaggatcattgcagaagcgaggtattgtggaacaatgttgtacttccatttgttccctttaccagctggagaattactgtaac

SEQ ID NO: 14128 - DNA, 324 bp, synthetic construct
  misc_feature 1..324: note = source = /note="Description of Artificial Sequence: Synthetic coding sequence"
  source 1..324: mol_type = other DNA
atggctttgtggatgaggctgctgcccctgctggccttgctggcactgtggggccctgatcccgcagctgctttcgttaaccagcacctgtgtggcagccatctggtggaagccttgtacctggtatgcggcgagcgaggttttttctacacaaaacctaccgaggctgaggacttgcaggtaggacaggttgaacttgggggtgggcccggggcagggagtctgcaacccctcgctctggaggggtcactccaaaagagaggcatcgttgagcaatgctgtacatccatctgcagtctttatcagctggagaattattgtaac

SEQ ID NO: 14129 - DNA, 324 bp, synthetic construct
  misc_feature 1..324: note = source = /note="Description of Artificial Sequence: Synthetic coding sequence"
  source 1..324: mol_type = other DNA
atggccttatggatgcggcttttgccattgctcgcactgttggccctatggggtcctgacccagcagcagcctttgttaaccagcatctctgcggttcccacctcgtggaggcactgtatcttgtgtgtggagagcgagggtttttttacactaagcccacagaggcagaggacttgcaggtggggcaagtcgaactcggcggcgggccaggagccggatctcttcaacccctggctcttgaggggtccttgcagaagaggggcatcgtggagcagtgttgcacctccatctgtagcctgtatcagctagagaactattgcaac

SEQ ID NO: 14130 - DNA, 324 bp, synthetic construct
  misc_feature 1..324: note = source = /note="Description of Artificial Sequence: Synthetic coding sequence"
  source 1..324: mol_type = other DNA
atggctctatggatgaggctgcttccgttactcgccctcctggccctgtggggccccgaccccgctgcggccttcgtcaatcagcatctctgcggaagccatctagttgaggcactgtacctggtgtgcggcgagcgaggattcttctatacaaagccgacggaggccgaagacttacaagtgggacaggtggagctgggggggggacccggagccggctcactgcagcccttggctctagaagggtccctccagaagcgaggtatcgtggaacagtgctgcacaagcatatgcagtttgtaccaattggagaattattgcaat

SEQ ID NO: 14131 - DNA, 324 bp, synthetic construct
  misc_feature 1..324: note = source = /note="Description of Artificial Sequence: Synthetic coding sequence"
  source 1..324: mol_type = other DNA
atggccctgtggatgcgcctcctcccattgcttgcccttctggccctctggggacctgacccggcggctgcgttcgtgaatcaacacctttgtggttcacatttggtggaggcactctaccttgtgtgcggagagcgaggcttcttttacaccaaacccactgaagccgaagatctgcaggtcgggcaggtggagcttgggggcggaccaggagcagggtcgctgcagcctcttgcattggaaggttccctgcagaagcgggggattgtagagcaatgttgcacgtcgatctgctctttgtaccagctggaaaactactgcaac

SEQ ID NO: 14132 - DNA, 324 bp, synthetic construct
  misc_feature 1..324: note = source = /note="Description of Artificial Sequence: Synthetic coding sequence"
  source 1..324: mol_type = other DNA
atggccttgtggatgcgactactgcccctattggccttgctggcgttgtggggacctgatccagccgctgctttcgtcaaccagcatctctgtggctcccatctggttgaagctctgtacctggtgtgcggagaaagaggctttttctatacgaagccaaccgaggcagaggacctgcaagttgggcaggtcgagctcgggggggggcctggagccggctcactgcagcctctggccctcgagggcagcctccagaaacgtggtatcgtggaacagtgttgcacttctatttgttcactgtatcagctcgagaactactgcaac

SEQ ID NO: 14133 - DNA, 324 bp, synthetic construct
  misc_feature 1..324: note = source = /note="Description of Artificial Sequence: Synthetic coding sequence"
  source 1..324: mol_type = other DNA
atggccctctggatgagactgttgccattgttggcgctcttagctctgtgggggccggatcctgcagcagcgttcgtaaatcagcatctgtgtggtagccaccttgtggaggccttgtatttagtgtgcggtgagaggggttttttctatacaaagcccactgaggcagaggatctgcaggtcggacaggtcgaactgggcgggggccctggcgccggttcccttcagccgctggcgctggaggggtcactgcagaagcgtggcatcgtggaacagtgttgtacatccatttgctccctataccagctagagaactattgtaac

SEQ ID NO: 14134 - DNA, 324 bp, synthetic construct
  misc_feature 1..324: note = source = /note="Description of Artificial Sequence: Synthetic coding sequence"
  source 1..324: mol_type = other DNA
atggcgctgtggatgcgcctgcttccactcctggctttgctggcattgtggggaccggatccggcagccgcatttgtgaaccagcacctgtgcgggtcgcatcttgtcgaagcactctacctcgtgtgtggcgaacgcggattcttctacactaagcctacggaggcggaggaccttcaggtcggacaagtggaactcggcggcggaccaggtgccggctccctccaaccgcttgccctggagggctcactgcaaaagcgtggaatcgtggaacaatgttgcaccagcatctgctcgctttatcagttggaaaactactgcaac

SEQ ID NO: 14135 - DNA, 324 bp, synthetic construct
  misc_feature 1..324: note = source = /note="Description of Artificial Sequence: Synthetic coding sequence"
  source 1..324: mol_type = other DNA
atggccctttggatgcggcttctgccattgctcgctctgctggcactctggggaccagacccggcagcggcctttgtgaatcaacacctgtgtggatcccatttggttgaggcactgtaccttgtgtgcggcgaacgtggcttcttctacaccaagcctaccgaagcagaggatcttcaggtcggacaggtggagctcggcggaggacccggtgctggttccctgcaaccccttgcacttgaaggttccttgcaaaaacgtggcattgtcgagcaatgttgcacgtcaatctgttcgttgtaccaactggaaaactactgtaac

SEQ ID NO: 14136 - DNA, 324 bp, synthetic construct
  misc_feature 1..324: note = source = /note="Description of Artificial Sequence: Synthetic coding sequence"
  source 1..324: mol_type = other DNA
atggccctttggatgagactgctcccgctgttggctctgctggcgttgtggggaccggatccggccgcggcgttcgttaaccaacatctgtgcggaagccacctcgtcgaggcgctttacctcgtgtgcggcgaaagggggttcttttacacgaagcctactgaagccgaggaccttcaagtgggccaggtcgaactgggaggaggacccggtgccggttcgttgcagcccctcgctctggagggctcccttcagaaacgggggatcgtggagcagtgttgtacctcaatctgctcgctctatcaattggaaaactactgcaac

SEQ ID NO: 14137 - DNA, 324 bp, synthetic construct
  misc_feature 1..324: note = source = /note="Description of Artificial Sequence: Synthetic coding sequence"
  source 1..324: mol_type = other DNA
atggccctgtggatgcgcctcttacctcttctcgctcttttggcactctgggggccggaccctgccgcagcctttgttaatcagcatctgtgcggctcccatctggtagaagcactctatctagtctgtggcgaaagggggttcttttacacaaagccaaccgaagcggaggatttgcaggtcggccaggtggagttgggaggagggccaggagcgggtagcctacagcccctcgctctggagggatcgctgcaaaagcggggcatcgtcgaacagtgctgcacaagcatttgttcgctgtaccagctcgagaactactgcaat

SEQ ID NO: 14138 - DNA, 324 bp, synthetic construct
  misc_feature 1..324: note = source = /note="Description of Artificial Sequence: Synthetic coding sequence"
  source 1..324: mol_type = other DNA
atggctctttggatgcgactgctgccactgcttgcattgctggcactgtggggcccagaccccgcggcggcatttgtgaaccagcatctgtgtggcagccacctcgtggaagcgctttacctggtgtgtggcgagcgcggtttcttttacactaagccaactgaagccgaagatcttcaggtcgggcaagtggaactgggtggaggtccgggggcaggttcgcttcagccccttgccctcgagggatcgctccagaagagaggaattgtcgaacagtgttgtacttccatatgcagcctgtaccaactggaaaactattgtaac

SEQ ID NO: 14139 - DNA, 324 bp, synthetic construct
  misc_feature 1..324: note = source = /note="Description of Artificial Sequence: Synthetic coding sequence"
  source 1..324: mol_type = other DNA
atggccctttggatgcgcttgctcccactgcttgcccttctcgcactgtggggtcctgacccagcagcagcattcgtgaaccagcacctttgtggcagccatctggtggaggcactgtacctcgtgtgcggcgaacggggattcttttacactaaacccaccgaggcagaagatctgcaagtaggccaagtcgaactgggtggaggccccggcgcgggtagcctgcagccgctggcacttgaaggttcactccagaagagaggtattgtcgaacagtgttgcacctccatctgttccttgtatcaactggagaattactgtaat

SEQ ID NO: 14140 - DNA, 324 bp, synthetic construct
  misc_feature 1..324: note = source = /note="Description of Artificial Sequence: Synthetic coding sequence"
  source 1..324: mol_type = other DNA
atggccctgtggatgagacttctccctctcctggctttgttggccctgtggggaccagatccagccgcagcatttgtaaaccagcacctgtgtggcagccatcttgtggaggctttgtacttggtgtgtggtgagaggggttttttttacactaaacccacagaggccgaagatttgcaggtaggacaagttgaactcggtggaggccctggcgccggcagccttcaaccccttgccctggagggctctctgcaaaaacgcggaatagtggagcaatgttgtacaagcatttgcagtctgtatcagctcgaaaattactgcaat

SEQ ID NO: 14141 - DNA, 324 bp, synthetic construct
  misc_feature 1..324: note = source = /note="Description of Artificial Sequence: Synthetic coding sequence"
  source 1..324: mol_type = other DNA
atggccttgtggatgcgcttgttgcctctgctcgctttgctcgcactttggggacccgaccctgcggctgccttcgtcaaccaacacttatgtggatcccacctggtagaagcactctacctcgtctgtggtgaacgtgggttcttctataccaagcctactgaggccgaggatcttcaggtcgggcaggttgaactaggcggcggccccggcgccggttcattgcagccccttgccctggagggttctttacaaaaacgaggtattgtggagcaatgttgcactagtatctgttcactataccaactggagaattactgcaac

SEQ ID NO: 14142 - DNA, 324 bp, synthetic construct
  misc_feature 1..324: note = source = /note="Description of Artificial Sequence: Synthetic coding sequence"
  source 1..324: mol_type = other DNA
atggctttatggatgcgtctgctaccgttgttggctcttttagctctttggggtccggatcctgctgcagcctttgtgaaccagcatctgtgcggctctcatctggttgaggcattgtaccttgtgtgtggtgaaaggggatttttctacacaaaacctacagaagcggaagatctccaagtgggccaagtcgaactcggcggaggcccgggtgcgggctctttgcagccgctagctcttgaaggatccttgcagaagagggggatcgtcgaacagtgttgtacatcaatctgttctttgtatcagctagagaactactgcaat

SEQ ID NO: 14143 - DNA, 324 bp, synthetic construct
  misc_feature 1..324: note = source = /note="Description of Artificial Sequence: Synthetic coding sequence"
  source 1..324: mol_type = other DNA
atggccctttggatgaggcttcttcctcttcttgcactgcttgcactgtggggaccagatccagcagcagcctttgtgaaccagcacctctgtgggagccacctggtggaagcactctacctggtctgcggtgaacgcggatttttctataccaaacccaccgaagccgaagatcttcaggtcggacaagtggagcttggtggcggtccaggagccggatcactgcagccactggccctcgaaggatcgcttcagaagagaggtattgtggaacaatgctgtacctccatttgtagcctctaccaattggagaactactgcaat

SEQ ID NO: 14144 - DNA, 324 bp, synthetic construct
  misc_feature 1..324: note = source = /note="Description of Artificial Sequence: Synthetic coding sequence"
  source 1..324: mol_type = other DNA
atggccctgtggatgcgtctgctcccgttgctcgcacttcttgcactgtggggtccggatccagcagccgcctttgtgaatcagcatctgtgtggatcgcatctcgtggaggcgctctacctggtgtgcggagagcggggattcttctacaccaagcccaccgaggccgaggacctgcaggtgggtcaggtggaactgggcggaggcccgggtgcaggatccctgcagcctctggctctcgagggttctctgcaaaaacgcggcatcgttgaacaatgctgtaccagcatctgttcactgtaccagctggagaactattgcaac

SEQ ID NO: 14145 - DNA, 324 bp, synthetic construct
  misc_feature 1..324: note = source = /note="Description of Artificial Sequence: Synthetic coding sequence"
  source 1..324: mol_type = other DNA
atggctttgtggatgcgactcttgcccttgcttgcactgttagcactttgggggccagatcccgcagccgcctttgtgaatcagcatctgtgtggatcacatctggtagaggcactgtatcttgtgtgtggagaacgtggatttttttatacaaaaccaacggaagctgaggatttgcaggttggacaagttgaattgggaggaggacccggagctggatcactacaacctttagcactagaggggtcactacaaaagcgagggatagttgagcaatgttgtacttcaatatgctcactctaccaattagagaactattgcaac

SEQ ID NO: 14146 - DNA, 324 bp, synthetic construct
  misc_feature 1..324: note = source = /note="Description of Artificial Sequence: Synthetic coding sequence"
  source 1..324: mol_type = other DNA
atggcactctggatgcggttgttgccgctgctggcgttactagctctgtggggacccgaccccgccgcagcttttgtgaaccagcacctgtgtggctcacacttggtcgaagcactctacctcgtctgtggagaacgcggattcttctatacgaagcccaccgaggctgaagatctgcaggtgggccaagtggaacttggggggggaccaggggcagggagcctgcagcccctggctctcgaaggctccctgcagaagcgggggatagtggaacaatgctgcactagcatctgctctctttaccaactggagaattactgcaac

SEQ ID NO: 14147 - DNA, 324 bp, synthetic construct
  misc_feature 1..324: note = source = /note="Description of Artificial Sequence: Synthetic coding sequence"
  source 1..324: mol_type = other DNA
atggctctgtggatgcgccttttgccccttctggccctgctggctctgtggggtcctgaccccgcagcagcatttgtgaatcagcatctctgcggctcgcaccttgtcgaagccctctatctggtttgcggtgagcggggatttttctacaccaagccaactgaggccgaagatctgcaggtgggacaggtggagctgggcggcggccctggcgccggctcactccagcctctggcactcgagggaagtttacaaaaaagaggtatcgttgagcaatgctgtacctctatctgcagtctttatcagctagagaactattgcaac

SEQ ID NO: 14148 - DNA, 324 bp, synthetic construct
  misc_feature 1..324: note = source = /note="Description of Artificial Sequence: Synthetic coding sequence"
  source 1..324: mol_type = other DNA
atggctctctggatgaggctgctaccacttctggcactgctcgccctgtggggacccgacccggcagctgcattcgttaaccagcacctatgtggatcccacctggttgaagcactgtatttggtctgtggagaacggggcttcttctatacaaagcccactgaggccgaagacctccaagtagggcaggtagaactgggcggtggcccgggggctggttccctacaacctttggctctcgagggcagtttgcaaaagcgcggcattgttgagcagtgttgtaccagcatttgcagcctgtaccagctggagaattattgcaat

SEQ ID NO: 14149 - DNA, 324 bp, synthetic construct
  misc_feature 1..324: note = source = /note="Description of Artificial Sequence: Synthetic coding sequence"
  source 1..324: mol_type = other DNA
atggcactctggatgaggctcttgccattgctcgctctgcttgctttatggggtcctgatccggccgcagccttcgtcaaccagcacctgtgcgggagtcacctggtggaagcactgtaccttgtctgtggcgagcgtggattcttctacacaaagccaactgaagccgaagatctgcaagtagggcaggtggagcttggcggaggccccggggcaggaagcctgcagccgctcgcccttgaaggcagcttacaaaaaagaggaatcgtggaacaatgctgtacctcaatatgctctctctaccagcttgagaattattgcaac

SEQ ID NO: 14150 - DNA, 324 bp, synthetic construct
  misc_feature 1..324: note = source = /note="Description of Artificial Sequence: Synthetic coding sequence"
  source 1..324: mol_type = other DNA
atggcattgtggatgcgtcttctacctttgctggccttattagccttgtgggggcccgatcctgctgcggcttttgttaaccaacacctatgcggctcccacttggtggaagccttatacttggtgtgcggtgaacgtggatttttctatactaaacctacagaagccgaagatttgcaagtgggtcaagttgagcttggcggtgggccaggtgccggttcattacaaccattggccttagagggctccctacagaaacgtgggattgtagaacagtgttgtacgagcatctgtagtttatatcagctagagaactattgcaat

SEQ ID NO: 14151 - DNA, 324 bp, synthetic construct
  misc_feature 1..324: note = source = /note="Description of Artificial Sequence: Synthetic coding sequence"
  source 1..324: mol_type = other DNA
atggcgttgtggatgcgcctcttgccgctgctcgccctgctcgccctctggggcccggatccggccgcagccttcgtgaaccagcacctgtgcggatcgcacctggtggaggccctgtacctcgtgtgcggcgagcgggggttcttttacactaagccaaccgaggctgaagatctgcaggtcggacaagtggaactcggtggaggcccgggcgccggaagcctgcaaccgctggctctggagggatcgctgcagaagcgcggaatcgtcgagcagtgctgtaccagcatctgctcactgtaccagctggagaactactgcaac

SEQ ID NO: 14152 - DNA, 324 bp, synthetic construct
  misc_feature 1..324: note = source = /note="Description of Artificial Sequence: Synthetic coding sequence"
  source 1..324: mol_type = other DNA
atggcgctgtggatgcgcctgctgccgctgctggccctgctcgccctgtggggccctgaccctgctgcggctttcgtgaaccaacatctgtgcggatcccacctggtggaggcgttgtacctcgtgtgcggagaaaggggatttttctacactaagccgaccgaggccgaggacctgcaagtgggacaggtggaactgggcggcgggcctggagccggctctctgcagccgctggctcttgaaggatccctccagaagagaggaatcgtcgaacagtgctgcacctcgatctgctcgctctaccagcttgagaattactgcaat

SEQ ID NO: 14153 - DNA, 324 bp, synthetic construct
  misc_feature 1..324: note = source = /note="Description of Artificial Sequence: Synthetic coding sequence"
  source 1..324: mol_type = other DNA
atggccttatggatgcgactgctgcccttgctggctctgctggcactctggggtcccgatcccgcagcggctttcgtcaaccaacacctttgcggatctcatcttgtggaagctctgtacttggtgtgtggcgaacgcggttttttctataccaagcccactgaggcggaggatctgcaggtcgggcaggtggaactgggaggtggaccaggtgccggaagcctgcagcccctggcattggaaggctcattgcagaagaggggcatcgtagagcagtgttgcacttccatatgctccctctatcaattggagaattactgcaat

SEQ ID NO: 14154 - DNA, 324 bp, synthetic construct
  misc_feature 1..324: note = source = /note="Description of Artificial Sequence: Synthetic coding sequence"
  source 1..324: mol_type = other DNA
atggcgttgtggatgagactgctgccgcttctcgctctgctggcactttggggacccgatcctgccgcggcttttgttaaccagcatctgtgtggatcccacctggtagaagccctttaccttgtctgtggtgagaggggatttttctacactaaacctacggaggcagaggaccttcaggtgggtcaggtggaactcggaggaggcccaggggccggttcactgcaaccactggcactggaaggatcacttcaaaagagagggattgtggaacaatgctgtaccagcatttgcagcctttatcaacttgaaaactactgcaat

SEQ ID NO: 14155 - DNA, 324 bp, synthetic construct
  misc_feature 1..324: note = source = /note="Description of Artificial Sequence: Synthetic coding sequence"
  source 1..324: mol_type = other DNA
atggccctgtggatgagacttcttcctctgctggcattgctggccctgtggggtcctgacccagcagcagcctttgttaaccagcacctttgtggatcacatttggtggaggcactttacctcgtgtgcggcgaaagaggtttcttttacaccaagccaactgaagcagaggaccttcaggtgggtcaagttgaactcggcggtggtcccggagccggatcccttcagccacttgcgctggagggcagcctccaaaaaagaggtattgtggaacaatgttgtacctcaatctgttcgctttaccaacttgaaaactactgtaac

SEQ ID NO: 14156 - DNA, 324 bp, synthetic construct
  misc_feature 1..324: note = source = /note="Description of Artificial Sequence: Synthetic coding sequence"
  source 1..324: mol_type = other DNA
atggctctgtggatgcgcttgctcccgctgctggcacttctggcactgtggggaccagacccagcggcggccttcgtcaaccagcacctgtgcggctcgcacctcgtcgaagcactgtacctcgtgtgtggagaaagaggattcttctacaccaaaccgactgaggccgaggacttgcaggttgggcaggtggaacttggtggaggacccggtgctggatcactgcagccgttggccctcgagggtagcctgcaaaaacggggcatcgtggagcagtgctgcacctccatttgcagcctgtaccagctggagaactactgtaac

SEQ ID NO: 14157 - DNA, 324 bp, synthetic construct
  misc_feature 1..324: note = source = /note="Description of Artificial Sequence: Synthetic coding sequence"
  source 1..324: mol_type = other DNA
atggccttatggatgcgcttactgcccctgctggcactcctcgctctatggggccccgaccctgccgcagcgttcgtgaaccagcacctgtgcggctcacatcttgttgaagccctgtatctggtgtgtggcgaacgaggttttttctacaccaagcctacagaggccgaagacctacaagtagggcaggtagagcttggcggcggtccaggggccgggtctctacaacctctcgcactcgagggttcgcttcagaagagagggatcgtcgagcagtgttgcacatcgatctgcagtctgtatcagcttgagaattattgtaat

SEQ ID NO: 14158 - DNA, 324 bp, synthetic construct
  misc_feature 1..324: note = source = /note="Description of Artificial Sequence: Synthetic coding sequence"
  source 1..324: mol_type = other DNA
atggcgctgtggatgcgactgctgccactcctcgcactgctggctctctggggaccagaccccgctgctgcgtttgtgaaccaacacctttgcggaagccacctcgtggaggccctctacctggtgtgcggtgagagaggattcttctataccaaaccgaccgaggcagaggacttgcaagtgggtcaggtggaattggggggaggccctggagcgggatcactgcagcctttggcactggaaggctcccttcaaaagcgggggatcgtggagcaatgttgcacgtcaatctgctccctgtaccaactcgagaactactgcaat

SEQ ID NO: 14159 - DNA, 324 bp, synthetic construct
  misc_feature 1..324: note = source = /note="Description of Artificial Sequence: Synthetic coding sequence"
  source 1..324: mol_type = other DNA
atggctctctggatgaggctgctgccactgcttgcactcttggcactctggggaccggacccagccgccgcattcgtaaatcagcacctctgcggaagccatcttgtcgaagccctgtacctggtgtgcggcgagcgcgggtttttctataccaagccgactgaagcggaagatcttcaagttggccaagtggaactgggaggtggccctggagccggttccctccagcccctggcgttggagggatctctgcagaagaggggaattgtcgagcagtgctgcactagcatctgtagcctttaccagttggagaactactgtaac

SEQ ID NO: 14160 - DNA, 324 bp, synthetic construct
  misc_feature 1..324: note = source = /note="Description of Artificial Sequence: Synthetic coding sequence"
  source 1..324: mol_type = other DNA
atggctttgtggatgcgcctccttccactattagcactgttggccctttggggtccagaccccgctgccgcattcgtaaaccaacatctgtgcggctctcaccttgtagaggcactgtatttagtgtgtggggaacgtggtttcttctataccaaaccgaccgaggcagaagatctgcaggtgggccaagtggagctcggaggaggacccggagctggtagcctccagccgctggcattggagggtagtctccaaaagagggggattgtcgaacagtgctgtacttcgatatgttctctgtatcagctggaaaattactgtaac

SEQ ID NO: 14161 - DNA, 324 bp, synthetic construct
  misc_feature 1..324: note = source = /note="Description of Artificial Sequence: Synthetic coding sequence"
  source 1..324: mol_type = other DNA
atggccctttggatgcggctgctcccgcttttggctttgttagctctttggggccctgatcccgctgccgcattcgttaatcaacacctgtgcggatcacacttggttgaagcattgtacttggtgtgtggagaaaggggttttttttatacaaagccaaccgaggctgaagacctgcaggtgggtcaggttgaattgggcggtgggccaggagcaggaagtctccagcccctggcgttggaagggagcctgcagaagagaggcatcgtggaacagtgttgcacttcaatctgttccttgtaccaactggagaactattgtaac

SEQ ID NO: 14162 - DNA, 324 bp, synthetic construct
  misc_feature 1..324: note = source = /note="Description of Artificial Sequence: Synthetic coding sequence"
  source 1..324: mol_type = other DNA
atggcactttggatgcgtttgctccctctgctggcgctgctggcactctggggtccagaccccgccgcagcctttgtgaatcagcacctttgcggttcgcatcttgtggaagcactctacctggtctgtggtgaacgtggatttttctacactaagccaaccgaagcagaagatttgcaagtgggacaggtagagctgggcggagggccaggagcaggttcacttcaacctctcgcgttggagggatcacttcagaaacggggaattgtcgaacaatgttgtacctccatctgtagcttgtaccaactcgagaactattgcaac

SEQ ID NO: 14163 - DNA, 324 bp, synthetic construct
  misc_feature 1..324: note = source = /note="Description of Artificial Sequence: Synthetic coding sequence"
  source 1..324: mol_type = other DNA
atggctctttggatgcgactactaccattactcgctttgttagctctttggggtccagaccccgcagccgcgttcgtgaaccagcacttgtgcggatcgcacctcgtggaagcgctgtatctcgtgtgcggtgaacgaggatttttctacacaaagccgacagaggccgaagacctccaggtaggtcaggttgagctgggcggcggccctggcgcaggaagcctccagcccctggctttggaaggatccctgcaaaagcgcggaatcgtggaacagtgctgtacctcaatatgttcgctgtaccagcttgaaaattactgtaat

SEQ ID NO: 14164 - DNA, 324 bp, synthetic construct
  misc_feature 1..324: note = source = /note="Description of Artificial Sequence: Synthetic coding sequence"
  source 1..324: mol_type = other DNA
atggctctgtggatgaggcttctgcccctgctcgccctgcttgccttgtgggggccagaccccgccgctgcgtttgtgaatcagcacctgtgtggtagtcacctggtggaagccctctacctggtttgcggcgagcggggatttttttacacaaaaccaacagaggctgaggaccttcaagttggccaggtggagctaggcggagggcccggagcaggttctctacagcctctggcccttgaaggcagcctgcaaaaaagaggcattgttgagcagtgctgcacgtccatctgtagtttgtaccagttagaaaactactgtaat

SEQ ID NO: 14165 - DNA, 324 bp, synthetic construct
  misc_feature 1..324: note = source = /note="Description of Artificial Sequence: Synthetic coding sequence"
  source 1..324: mol_type = other DNA
atggcgctatggatgcgtttattaccgctattagcgctactagcgctatggggtccggatccggcggcggcgtttgtaaatcaacatttatgtggttcgcatttagttgaagcgctatatctagtttgtggtgaacgtggttttttttatacgaaaccgacggaagcggaagatttacaagtaggtcaagtagaattaggtggtggtccgggtgcgggttcgttacaaccgttagcgctagaaggttcgctacaaaaacgaggtatagtagaacaatgttgtacgtcgatatgttcgctatatcaattagaaaattattgtaat

SEQ ID NO: 14166 - DNA, 324 bp, synthetic construct
  misc_feature 1..324: note = source = /note="Description of Artificial Sequence: Synthetic coding sequence"
  source 1..324: mol_type = other DNA
atggccctttggatgaggttactccccctgctggcactcctggcactttgggggcctgatcctgctgcagcctttgtaaatcagcacttgtgtgggtcacacttagtagaggcactgtacctcgtgtgcggagaacgggggttcttctacacaaaaccaactgaagctgaagatctccaggttggacaggtggaacttggagggggacccggagccgggagtcttcaaccgctggctcttgaagggagtctacaaaaaagaggaatcgtggaacagtgttgtactagtatctgctcactttatcagctagagaattactgtaac

SEQ ID NO: 14167 - DNA, 324 bp, synthetic construct
  misc_feature 1..324: note = source = /note="Description of Artificial Sequence: Synthetic coding sequence"
  source 1..324: mol_type = other DNA
atggccttgtggatgcgtctgttacccttgttggcccttttggcactgtggggaccagatcctgctgccgcattcgtgaatcaacacctatgcggctcacatctcgtggaggccctatatctcgtgtgcggcgaacgcggattcttttacacaaaaccaactgaggcagaagatctgcaagttgggcaggtggagctcggaggcggaccaggcgcagggtctctccaaccactagctttagaaggctccctgcagaagcggggcatcgtggagcagtgttgtacctcaatctgttccctgtatcagcttgaaaattactgtaat

SEQ ID NO: 14168 - DNA, 324 bp, synthetic construct
  misc_feature 1..324: note = source = /note="Description of Artificial Sequence: Synthetic coding sequence"
  source 1..324: mol_type = other DNA
atggccctatggatgcgcctcttgccactacttgctttgctggctctgtgggggcccgatcctgctgctgcgttcgtgaatcagcatctctgcggctcccacctggtggaagccctgtatcttgtgtgtggtgagcggggcttcttttataccaaaccaacggaggcagaagatctgcaggtggggcaggtggaactgggaggaggccccggcgctgggtctctgcagccattggctctcgaaggctccctacagaaaagaggaatcgtggagcagtgttgtacctctatctgctccctttaccagctcgagaattactgcaac

SEQ ID NO: 14169 - DNA, 324 bp, synthetic construct
  misc_feature 1..324: note = source = /note="Description of Artificial Sequence: Synthetic coding sequence"
  source 1..324: mol_type = other DNA
atggccctgtggatgaggctgctgccattgttggcactgctcgccctgtggggcccggatcctgccgctgcattcgtcaatcagcacctctgcggcagccacctcgtcgaagctctctacttggtgtgcggagagcgcggattcttctacaccaagccaaccgaagcggaggacctgcaagtgggacaggtcgagctgggcggcggaccgggcgccgggtcactgcaaccgctggcactggagggttcgctgcagaagcggggcattgtggaacagtgctgcacctccatctgctcgctttaccagctcgagaactactgtaat

SEQ ID NO: 14170 - DNA, 324 bp, synthetic construct
  misc_feature 1..324: note = source = /note="Description of Artificial Sequence: Synthetic coding sequence"
  source 1..324: mol_type = other DNA
atggccctctggatgcgactgctaccgctgctggctctcctcgcactctgggggcccgaccctgcagctgcttttgtcaaccagcatctttgtggatcacacctagtggaagccttgtacctggtatgtggggagcggggattcttttatactaagcccacagaggccgaggatctccaggtaggtcaagttgaactgggaggcggcccaggcgccggctcactgcagccactcgctctggaaggtagtctgcagaaaaggggaatcgtcgaacagtgctgtacaagcatctgctccctctaccaacttgaaaactattgtaat

SEQ ID NO: 14171 - DNA, 324 bp, synthetic construct; identical to SEQ ID NO: 14122
  misc_feature 1..324: note = source = /note="Description of Artificial Sequence: Synthetic coding sequence"
  source 1..324: mol_type = other DNA

SEQ ID NO: 14172 - DNA, 324 bp, synthetic construct
  misc_feature 1..324: note = source = /note="Description of Artificial Sequence: Synthetic coding sequence"
  source 1..324: mol_type = other DNA
atggctctgtggatgaggctcctcccactgctggctttgcttgcactctgggggccagaccctgcagcggcattcgtgaatcagcatctttgtgggtcacatttggtggaggcactctacctcgtgtgtggcgaacggggatttttctacaccaaaccaacggaagcagaggacctgcaagtgggccaagtggaacttggaggaggacctggcgcgggatccctccaacccctggccctggagggctcactccaaaagcgtggtattgtggaacagtgctgtacttcgatctgctccctttaccagcttgagaactactgtaac

SEQ ID NO: 14173 - DNA, 324 bp, synthetic construct
  misc_feature 1..324: note = source = /note="Description of Artificial Sequence: Synthetic coding sequence"
  source 1..324: mol_type = other DNA
atggcgctttggatgcggctgctgccgctgttggcgctcctggccttgtggggaccagaccctgcagctgcctttgtgaaccagcacctttgcggaagccatctggtcgaggctctgtacctcgtttgcggagaaaggggattcttctacactaagcccaccgaagcagaagatctgcaggtgggacaggtcgaactgggaggaggaccgggagcaggctccctgcagccgctggccctggagggaagtctccaaaaaagagggatcgtcgaacaatgttgcacttccatctgttccctgtaccaactggaaaactactgcaat

SEQ ID NO: 14174 - DNA, 324 bp, synthetic construct
  misc_feature 1..324: note = source = /note="Description of Artificial Sequence: Synthetic coding sequence"
  source 1..324: mol_type = other DNA
atggctctgtggatgcggctgttgccacttctggcactcctcgccctctggggtcccgaccccgccgctgcctttgtaaaccagcacctatgtggaagtcatctggtcgaagctttataccttgtgtgtggcgaacgggggttcttttacaccaagcctacagaagctgaagatctacaggtaggtcaggtggaattgggcggcgggcccggcgccgggtctcttcagccactggccttggagggcagcctccagaaacgcgggatcgtagagcagtgttgtacaagcatatgcagtctgtaccagcttgaaaattactgcaac

SEQ ID NO: 14175 - DNA, 324 bp, synthetic construct
  misc_feature 1..324: note = source = /note="Description of Artificial Sequence: Synthetic coding sequence"
  source 1..324: mol_type = other DNA
atggcgctgtggatgcgactgttgccattgctggctctactcgccttgtggggaccggatccggccgccgcgttcgttaaccagcatttatgcggcagccacctggtcgaggccctatacctcgtctgcggtgaacgagggttcttctacaccaaacccactgaggccgaggacctccaggttggccaggtggaactcggcggagggcctggggccggctccctgcagcccctcgccctggagggctcgctacagaagcgtggtatcgtcgagcagtgttgcacttcaatatgttccctttaccagctggagaattattgcaat

SEQ ID NO: 14176 - DNA, 324 bp, synthetic construct
  misc_feature 1..324: note = source = /note="Description of Artificial Sequence: Synthetic coding sequence"
  source 1..324: mol_type = other DNA
atggcactgtggatgaggctccttccattgctagctcttctggccctgtggggcccagacccagccgccgcatttgtgaaccaacacctgtgcggttcccatctggtggaagcgctttaccttgtgtgcggcgagcggggttttttttataccaaacccaccgaggctgaagatttgcaggtggggcaagtggagctggggggtggcccaggagccggatctctccaaccactggctctcgagggcagtcttcagaagcggggaatcgtggaacaatgctgcacatccatctgcagcttataccagctcgagaactattgtaat

SEQ ID NO: 14177 - DNA, 324 bp, synthetic construct
  misc_feature 1..324: note = source = /note="Description of Artificial Sequence: Synthetic coding sequence"
  source 1..324: mol_type = other DNA
atggctctgtggatgcgactcctccctcttctcgccctcttggcactctggggcccagaccctgcagcggccttcgtcaaccagcatctttgcggatcccaccttgtcgaggctctgtacctcgtgtgtggggaacgggggttcttttacaccaagccaactgaagccgaagatctgcaagttggtcaggtggaactcggtggcggcccaggagcaggaagcctgcaacccctggctcttgagggatctttgcaaaaacgcgggatcgtggagcagtgttgtacctcgatttgctccctttaccagctggaaaactactgtaat

SEQ ID NO: 14178 - DNA, 324 bp, synthetic construct
  misc_feature 1..324: note = source = /note="Description of Artificial Sequence: Synthetic coding sequence"
  source 1..324: mol_type = other DNA
atggcattatggatgagattgttacctttacttgcacttttagctttatggggacctgatccagcagccgcttttgttaaccaacacttatgtggttctcatcttgttgaggctttgtatcttgtttgtggagaaagaggatttttttatacaaaaccaactgaagctgaggaccttcaagttggacaagttgaacttggaggagggcctggagctggatcattacaaccacttgcattggaaggatccttacagaaaagaggaattgtggaacaatgttgcacatcaatttgttcattgtaccaacttgaaaattattgtaat

SEQ ID NO: 14179 - DNA, 324 bp, synthetic construct
  misc_feature 1..324: note = source = /note="Description of Artificial Sequence: Synthetic coding sequence"
  source 1..324: mol_type = other DNA
atggccctgtggatgcggttacttccactactcgccctcctggcactctggggcccagaccccgccgcggccttcgtcaaccagcacctatgtggaagtcacctggtagaggcactgtacctagtgtgcggcgagcggggttttttctacaccaagcccaccgaagctgaggacctccaggtcggccaggtcgagctgggagggggccccggcgccggatctttgcagccgctggcacttgagggctcactgcaaaagcgtgggatcgtcgagcagtgctgcacttcgatctgttcactgtaccagcttgaaaattactgtaac

SEQ ID NO: 14180 - DNA, 324 bp, synthetic construct
  misc_feature 1..324: note = source = /note="Description of Artificial Sequence: Synthetic coding sequence"
  source 1..324: mol_type = other DNA
atggctctgtggatgcggctgctgccactgttggccctgctggcactatggggtcctgacccggctgccgcattcgtcaaccaacatctgtgcggtagccatctagttgaggctctttacctggtgtgtggggaacgtgggtttttctacactaagccgaccgaggcggaggacctgcaggtgggtcaggtggagttgggtggtggtccaggagcagggtccctgcagccgttggctctggagggttccctgcaaaaacgcggtattgtcgaacagtgttgtactagcatttgtagcctgtatcagctggaaaattactgtaat

SEQ ID NO: 14181 - DNA, 324 bp, synthetic construct
  misc_feature 1..324: note = source = /note="Description of Artificial Sequence: Synthetic coding sequence"
  source 1..324: mol_type = other DNA
atggcattgtggatgagactgctccctcttctagcactgctggcactgtgggggcccgacccagcagctgcattcgtcaaccagcacctgtgcggcagccacctggttgaggccctgtacctggtttgtggcgagcgtggttttttctatactaaacctaccgaggctgaggatttacaggtgggccaggtagagcttggcggaggaccaggggcaggatctctgcagcccctggctctggagggcagtctgcagaaacgaggcatagtggagcagtgctgcacttctatttgtagcctgtatcagctggaaaactactgcaat

SEQ ID NO: 14182 - DNA, 324 bp, synthetic construct
  misc_feature 1..324: note = source = /note="Description of Artificial Sequence: Synthetic coding sequence"
  source 1..324: mol_type = other DNA
atggcgctgtggatgcgcctgctgccgctgttggccctgctcgccctgtgggggccggacccagctgccgccttcgtgaaccaacatctttgcggatcgcacctggtcgaggcactctacctcgtgtgtggagagcggggatttttctacactaaaccgaccgaagcagaagatctgcaggtcggccaagtggaactgggaggagggcctggagcgggttccttgcagcccctggctcttgagggcagcctccaaaagagaggcatcgtggagcagtgctgcacctcaatctgctcgctctaccagctcgaaaactactgtaat

SEQ ID NO: 14183 - DNA, 324 bp, synthetic construct
  misc_feature 1..324: note = source = /note="Description of Artificial Sequence: Synthetic coding sequence"
  source 1..324: mol_type = other DNA
atggctctgtggatgcgcttgctccccttgctggccctgttggcactatggggtccggatccggcagcagcattcgttaaccaacacctgtgtgggtcacatctggtggaggctctgtacttggtgtgcggagagaggggatttttttacaccaaaccaacagaggccgaagacctccaggtgggacaggtcgagctcggcgggggcccaggagccggatccctgcaacctctggcgctggaaggctctcttcagaaacgcgggatcgtggagcagtgttgcacctccatctgttctttataccagttagaaaactactgcaac

SEQ ID NO: 14184 - DNA, 324 bp, synthetic construct
  misc_feature 1..324: note = source = /note="Description of Artificial Sequence: Synthetic coding sequence"
  source 1..324: mol_type = other DNA
atggcactttggatgaggctacttcccctcctcgcactccttgcactgtggggaccggatccagcagcagcatttgtgaatcagcatctctgtgggtcccatctggtggaggcattatatctcgtgtgcggagaacgtggatttttttacacgaaaccaacagaggcggaggatctacaggtagggcaggtcgaactggggggaggacctggagccgggtcacttcagcctctcgcactagaggggtcacttcagaagcggggaattgttgaacagtgctgcacatcaatctgcagtctttatcagttggaaaactactgtaat

SEQ ID NO: 14185 - DNA, 324 bp, synthetic construct
  misc_feature 1..324: note = source = /note="Description of Artificial Sequence: Synthetic coding sequence"
  source 1..324: mol_type = other DNA
atggcgctttggatgagactgctccctctccttgcgctgctcgcactgtgggggccagatcctgccgcagcattcgtcaaccagcatctgtgtggatcgcatttggtcgaagccctgtaccttgtgtgtggggagcggggttttttctacactaagccgacggaagcagaagatctgcaagtgggacaggtcgagctcggaggaggtcccggtgccggctccctgcaacccctcgcacttgagggaagcctgcaaaagcgcggtatagtcgagcagtgctgtacctccatttgcagcctctaccaactggagaattactgtaac

SEQ ID NO: 14186 - DNA, 324 bp, synthetic construct
  misc_feature 1..324: note = source = /note="Description of Artificial Sequence: Synthetic coding sequence"
  source 1..324: mol_type = other DNA
atggccctatggatgaggttgttaccgcttctggctctcttggctctgtggggccccgacccagcagctgctttcgtcaatcaacacttatgtggctctcacttggtcgaagctctgtacctggtctgtggcgagcgtgggttcttctacaccaagccgacggaagcagaggacctccaagtcggtcaagtcgagctgggagggggtccaggagctggttcactgcaacctcttgctctcgagggatctttgcagaagcgtggtatcgtcgaacaatgctgcaccagtatctgtagtctgtatcaactcgagaattactgcaac

SEQ ID NO: 14187 - DNA, 324 bp, synthetic construct
  misc_feature 1..324: note = source = /note="Description of Artificial Sequence: Synthetic coding sequence"
  source 1..324: mol_type = other DNA
atggccctgtggatgagattgctccctctgttggccctcctggctttgtggggaccagatccggccgctgcctttgtgaatcagcatctctgcggttcacatctggtcgaggccttgtaccttgtgtgcggagaacggggcttcttctacactaaacctacggaagccgaggacctgcaagtgggtcaggtggagctcggcgggggacctggtgcgggatcgctgcagccgctggcactggagggatcgctccagaagcgcggcatcgtggaacaatgttgcaccagcatttgctcgttgtaccaactggagaactactgcaac

SEQ ID NO: 14188 - DNA, 324 bp, synthetic construct
  misc_feature 1..324: note = source = /note="Description of Artificial Sequence: Synthetic coding sequence"
  source 1..324: mol_type = other DNA
atggctctttggatgcggctacttccactgcttgcccttctagctctgtgggggccggaccccgcagccgcattcgtgaatcagcatctctgtggcagccacctggtggaagccctttacctggtgtgcggcgaacggggcttcttctacacaaagcctaccgaggcagaagaccttcaggtgggccaggtagaactgggaggcggccctggcgctgggtctctccaacccctggctctggaaggttcactccagaagaggggtatcgtggaacagtgctgcacaagtatctgttctttgtatcaattggagaattactgcaac

SEQ ID NO: 14189 - DNA, 324 bp, synthetic construct
  misc_feature 1..324: note = source = /note="Description of Artificial Sequence: Synthetic coding sequence"
  source 1..324: mol_type = other DNA
atggcgctttggatgagactcctcccgctgctggcgctcctggcgctctggggaccagaccccgcagcggcattcgtcaatcaacatctctgcggctcacaccttgtggaggcgctctatcttgtgtgcggagaaagaggttttttctacactaagccaaccgaagccgaagatctgcaggtgggacaggtggagctgggtggaggaccgggtgccggctcactgcagccgctggcattggagggatccttgcaaaaacgcggaatcgtcgagcaatgctgtacctcgatctgctccctctaccagctggaaaactactgcaac

SEQ ID NO: 14190 - DNA, 324 bp, synthetic construct
  misc_feature 1..324: note = source = /note="Description of Artificial Sequence: Synthetic coding sequence"
  source 1..324: mol_type = other DNA
atggccctgtggatgcgcctgctcccgctgctggcactcctggccctgtgggggcccgacccggcggctgcattcgtcaatcagcatctgtgcgggtcacacctggtggaagccttgtacctggtctgcggcgagcggggattcttctatactaaaccaactgaggcggaggatctgcaggttggacaggtggagctgggaggcggaccgggagccggctcgctgcaacccctggctcttgagggttcccttcaaaaacgcggaatcgtggaacagtgctgtacctccatctgctcactttaccaacttgaaaattactgcaac

SEQ ID NO: 14191 - DNA, 324 bp, synthetic construct
  misc_feature 1..324: note = source = /note="Description of Artificial Sequence: Synthetic coding sequence"
  source 1..324: mol_type = other DNA
atggccctgtggatgaggctcctaccactgctggctctcctggctctgtggggaccagatcccgccgcggcttttgtgaatcagcatctgtgcgggagccacttggtggaggcactgtaccttgtctgcggagagagaggatttttttacacgaagcctacggaagcagaagacttgcaggtggggcaagttgagctgggcgggggccctggggccggctctctccagccactcgcgctggaggggagtctgcagaaaagaggcatagtggaacagtgctgcacctcaatttgtagcctgtatcagctagagaactattgtaac

SEQ ID NO: 14192 - DNA, 324 bp, synthetic construct
  misc_feature 1..324: note = source = /note="Description of Artificial Sequence: Synthetic coding sequence"
  source 1..324: mol_type = other DNA
atggcgttatggatgaggctgcttcccctgctcgcactgcttgcactctgggggcctgatccggcggctgcttttgtcaatcagcacctgtgcggatcacatctggtggaggcactctacttagtttgcggcgagaggggattcttttatacgaagccaaccgaggctgaagatctgcaggtgggccaggtcgagctgggtgggggaccgggtgccggatctctccagcctctggctctggaaggctccctgcagaagcgcggtatcgtggaacagtgctgcactagcatatgctctctgtatcagctggaaaactattgcaac

SEQ ID NO: 14193 - DNA, 324 bp, synthetic construct
  misc_feature 1..324: note = source = /note="Description of Artificial Sequence: Synthetic coding sequence"
  source 1..324: mol_type = other DNA
atggccctttggatgaggctgctcccactgttggcccttcttgccctgtggggcccagaccccgctgccgccttcgtgaatcagcatctgtgtgggtcccacttagtcgaggccctgtacttggtatgcggagaacgcggatttttttacacgaaacccacggaggccgaggaccttcaggtaggccaggtagagctgggaggtgggcctggagccgggagtttgcaaccacttgccctggaaggatctctacaaaagagaggtattgttgagcagtgctgtacctctatttgctctttataccaactggaaaattactgtaac

SEQ ID NO: 14194 - DNA, 324 bp, synthetic construct
  misc_feature 1..324: note = source = /note="Description of Artificial Sequence: Synthetic coding sequence"
  source 1..324: mol_type = other DNA
atggctttgtggatgcgtctcctgcctctgctcgctttgctggcattgtggggcccagatcccgccgctgcctttgtgaatcagcatctgtgcggcagtcatttggtcgaagccctttacttggtatgtggcgaacgcggctttttctacaccaagcccaccgaggccgaggacctgcaggtgggtcaggtggaactgggaggtggccctggcgctggttcacttcagccactggctctggaaggttcccttcagaaacgtggtattgtggagcagtgctgcacatctatttgttccctgtatcagctggaaaactactgcaac

SEQ ID NO: 14195 - DNA, 324 bp, synthetic construct
  misc_feature 1..324: note = source = /note="Description of Artificial Sequence: Synthetic coding sequence"
  source 1..324: mol_type = other DNA
atggcgctgtggatgaggcttctgccgctcctggccctgctggcgctgtgggggccggatccagctgccgctttcgtcaaccagcatttgtgcggttcacacctggtggaagccctttacctggtttgcggagagcgggggtttttctacactaagcctaccgaagccgaagatttgcaggtgggacaggtggagctggggggaggaccaggggcaggatccctgcagccactcgctctggaaggttccctccagaagagaggaatcgtcgaacagtgctgtactagcatttgctccctgtaccagctggagaactattgcaat

SEQ ID NO: 14196 - DNA, 324 bp, synthetic construct
  misc_feature 1..324: note = source = /note="Description of Artificial Sequence: Synthetic coding sequence"
  source 1..324: mol_type = other DNA
atggcactgtggatgagattgctgcctctactcgcactgctggccttgtggggacccgatccggcggccgctttcgttaaccagcacctttgtggctcacatctggtggaggcgctctatctggtttgcggcgagcggggattcttctatacaaaacccactgaagccgaagaccttcaggttggccaggtggagttaggcggagggccaggcgcgggaagcctccaacccttggccctggaaggcagcctgcagaaaagagggatcgtcgagcaatgctgcacctccatttgctccctttatcagcttgagaattattgcaac

SEQ ID NO: 14197 - DNA, 324 bp, synthetic construct
  misc_feature 1..324: note = source = /note="Description of Artificial Sequence: Synthetic coding sequence"
  source 1..324: mol_type = other DNA
atggctctctggatgcggttgcttcctctgcttgctctgttggcactgtggggccccgatcccgcggcggcctttgtcaaccagcatctctgtgggtcccatctcgtggaggcactctatctcgtgtgcggtgagcgcggttttttctacactaagccaacagaagctgaagacctccaggtgggacaggtggagttggggggtggcccgggggctggcagcctgcagccactggctctcgagggatctctgcagaagcggggtatcgtcgagcaatgttgcactagcatctgttctctgtaccagctggagaactattgcaac

SEQ ID NO: 14198 - DNA, 324 bp, synthetic construct
  misc_feature 1..324: note = source = /note="Description of Artificial Sequence: Synthetic coding sequence"
  source 1..324: mol_type = other DNA
atggcgctctggatgcggcttctgccgctccttgcactgctggcgttgtggggtcctgatccagcagcagcatttgtcaaccagcatctgtgcgggtcccatctggttgaagcattgtacctcgtgtgcggagagagagggtttttctacactaaacctaccgaggccgaagatctgcaggtggggcaagtggagcttggaggtggaccgggcgcaggttctctgcaaccactcgcacttgaaggatcccttcagaaaagaggaattgtcgagcaatgttgtacttcaatttgtagcttgtaccagcttgaaaactactgtaac

SEQ ID NO: 14199 - DNA, 324 bp, synthetic construct
  misc_feature 1..324: note = source = /note="Description of Artificial Sequence: Synthetic coding sequence"
  source 1..324: mol_type = other DNA
atggcactttggatgcggttgcttcctctgctcgcccttctggccctgtggggcccagatcccgccgcagcctttgtcaatcaacatctgtgtggttcgcatcttgtggaggctctttacctcgtgtgtggggaacgcgggttcttctatactaagcccactgaagcagaagatcttcaagtgggacaggtggaattgggcggcggaccaggtgccggatcgcttcaacctctggcactggaagggtcccttcagaagagaggcatcgtggagcaatgttgcacgtcgatctgttcactttaccaactggagaattactgtaac

SEQ ID NO: 14200 - DNA, 324 bp, synthetic construct
  misc_feature 1..324: note = source = /note="Description of Artificial Sequence: Synthetic coding sequence"
  source 1..324: mol_type = other DNA
atggccttgtggatgagacttttgccgctgctggctttattggccctctggggaccggaccctgcagcagcgttcgtcaatcaacatctatgcggtagccatctcgtagaagccctgtacttagtttgtggcgaaagagggtttttctacactgataagactgaggccgaggatctgcaagtgggccaagtcgaactcggagggggcccaggtgccgggtcactgcagccacttgcccttgagggcagtttgcagaaaagaggaatagtcgagcaatgctgtacatccatttgtagcttgtaccagctcgaaaactattgcaat

SEQ ID NO: 14201 - DNA, 324 bp, synthetic construct
  misc_feature 1..324: note = source = /note="Description of Artificial Sequence: Synthetic coding sequence"
  source 1..324: mol_type = other DNA
atggcactctggatgcgcctgcttccccttctagcgcttttggcactctggggtcccgacccagcggccgcctttgtcaatcagcacctatgcggatcccacctggtggaggcattatacttggtgtgtggagaacgcggattcttctacaccgacaagacggaagccgaagacctgcaggtggggcaggtggaacttggtggcggccccggtgccggtagcctacagcccttggcgctcgaaggctctttgcagaagcgcggcatcgtggaacagtgctgcacctccatctgctccttatatcagctggagaactactgcaat

SEQ ID NO: 14202 - DNA, 324 bp, synthetic construct
  misc_feature 1..324: note = source = /note="Description of Artificial Sequence: Synthetic coding sequence"
  source 1..324: mol_type = other DNA
atggcactgtggatgagacttttaccactgttagccttactggctctgtggggcccggatccagccgcagcatttgtcaaccaacacttgtgcggttcccacctcgttgaggcactgtatctggtgtgcggagagagaggcttcttctacacggataagactgaggccgaagacctccaggtggggcaggtggaactggggggggggcctggggcgggatcccttcagccccttgcacttgagggcagcctacaaaagcggggcatcgtggagcagtgttgcacctccatatgctctctctaccaactggaaaattattgtaat

SEQ ID NO: 14203 - DNA, 324 bp, synthetic construct
  misc_feature 1..324: note = source = /note="Description of Artificial Sequence: Synthetic coding sequence"
  source 1..324: mol_type = other DNA
atggctctctggatgagactgttgcccctcctggccctgctggccctgtggggccccgatcctgctgccgccttcgtgaatcaacacctgtgcggaagccaccttgtcgaggcactctatctggtgtgtggagagagaggattcttttacactgacaagaccgaggccgaggacctgcaggtgggccaggtggaactgggaggcggaccaggagcaggatccctccagccacttgcacttgaaggttccctgcagaagcgcggcatcgttgaacaatgctgcacttcaatctgctccctctatcagctggagaactactgcaac

SEQ ID NO: 14204 - DNA, 324 bp, synthetic construct
  misc_feature 1..324: note = source = /note="Description of Artificial Sequence: Synthetic coding sequence"
  source 1..324: mol_type = other DNA
atggccctttggatgcgcttacttcctttgctggcgctgctggccctttggggccctgatccagcggctgcgtttgtgaaccagcatttgtgcggttcacacctggtagaggccctgtaccttgtttgcggtgagcgaggcttcttctacaccgataagactgaggccgaggacctgcaggttggccaagttgagctcggaggcggccccggagcgggctccctccaaccattagctctagagggttcactgcagaaacgggggatcgtagagcagtgttgcacctcgatctgctcactgtatcagctcgagaactattgcaac

SEQ ID NO: 14205 - DNA, 324 bp, synthetic construct
  misc_feature 1..324: note = source = /note="Description of Artificial Sequence: Synthetic coding sequence"
  source 1..324: mol_type = other DNA
atggccctctggatgcgactcctacctttgctcgcactactggctctttggggacccgaccctgcggccgcattcgttaatcagcacctttgtgggtctcacctcgtggaagccctctacctggtgtgcggagaaagggggtttttttatactgataaaactgaagctgaagatttgcaggtggggcaagtcgagttaggagggggaccgggggctggatctttgcagccccttgcactggaaggaagtctccagaaaaggggaattgtggagcagtgttgcacatctatatgttccctctatcagctcgagaactattgtaat

SEQ ID NO: 14206 - DNA, 324 bp, synthetic construct
  misc_feature 1..324: note = source = /note="Description of Artificial Sequence: Synthetic coding sequence"
  source 1..324: mol_type = other DNA
atggccctttggatgcggctcctgccgctgttggccctcctcgccctctggggcccagacccggcagccgcctttgtgaaccagcacctctgtgggtcgcatctcgtggaagcactgtacctcgtctgcggtgagcgcggcttcttctacactgacaagactgaagcggaggatctccaagtgggccaagttgagttgggaggtggaccaggagccggatcactgcagccactggcattggaaggttcgctccagaagaggggaatcgtggagcagtgctgtacttcgatctgctccctgtaccaacttgagaattactgcaac

SEQ ID NO: 14207 - DNA, 324 bp, synthetic construct
  misc_feature 1..324: note = source = /note="Description of Artificial Sequence: Synthetic coding sequence"
  source 1..324: mol_type = other DNA
atggccttatggatgaggctacttccactgctggccttgttggctctctggggtcctgatcctgctgccgctttcgttaaccaacacctgtgcgggagtcacctagtggaggccctgtaccttgtgtgcggcgaacgaggctttttctacactgacaagacggaagcagaggacctgcaggtgggacaagtggagcttggcggtggaccaggggccggatccctgcagcccctcgccctggaagggagcctgcagaagagaggtatcgttgagcagtgttgcacgtctatttgctccctgtaccagttggaaaactactgtaac

SEQ ID NO: 14208 - DNA, 324 bp, synthetic construct
  misc_feature 1..324: note = source = /note="Description of Artificial Sequence: Synthetic coding sequence"
  source 1..324: mol_type = other DNA
atggcactctggatgcgacttctgcctcttctagcactgctggccctctggggaccagatccagctgctgctttcgttaaccaacacctgtgcgggtctcacctggttgaggcactgtacctcgtgtgcggcgagcgtggtttcttctacaccgataagacggaagccgaggacttgcaggtaggacaggtcgaattaggaggtggcccaggagcaggatcattacagccactggccctggagggatccctgcagaagaggggcatagtcgagcagtgttgcacaagcatttgctccttgtaccaactagaaaattattgcaat

SEQ ID NO: 14209 - DNA, 324 bp, synthetic construct
  misc_feature 1..324: note = source = /note="Description of Artificial Sequence: Synthetic coding sequence"
  source 1..324: mol_type = other DNA
atggctctgtggatgcggctgctgccactgttggcattgctggctctctggggacctgatccggcggctgccttcgtcaaccagcatctctgtgggagccacctggtggaggcactgtatcttgtgtgtggagaacggggtttcttctacaccgataagactgaagccgaggatctgcaggtgggacaagtggagctgggaggaggccctggagctggatcgctccagccgcttgccctggaaggctcgctccagaagcgggggatcgtcgagcaatgctgtaccagcatttgctcattgtaccagctcgaaaactactgcaac

SEQ ID NO: 14210 - DNA, 324 bp, synthetic construct
  misc_feature 1..324: note = source = /note="Description of Artificial Sequence: Synthetic coding sequence"
  source 1..324: mol_type = other DNA
atggcactttggatgcggctccttcccctcttggcactgctggccctgtgggggccagacccagccgccgcctttgttaaccagcatctgtgcggctcacacttggttgaggccctgtacttggtgtgtggggagagaggattcttttacaccgataagacagaagctgaagaccttcaagtcgggcaggtcgaactgggaggtggtcccggagctggctccttgcaaccgctcgccctcgagggatcactgcaaaaaaggggtatcgtggagcagtgttgcaccagcatttgcagtctgtaccagctcgagaattattgcaac

SEQ ID NO: 14211 - DNA, 324 bp, synthetic construct
  misc_feature 1..324: note = source = /note="Description of Artificial Sequence: Synthetic coding sequence"
  source 1..324: mol_type = other DNA
atggcgctgtggatgaggttgctgcctctgctggcactgctggccctgtggggaccggatccggccgctgcatttgttaaccagcatctgtgcggatcgcacttggtggaagccctctacctggtgtgcggagaacggggattcttctacactgacaagaccgaggctgaggacctgcaggttggacaggtggagttgggaggagggccaggggcgggcagcctgcaaccgctggcgctggaaggatcgctccagaagcgcggaatcgtggaacaatgctgcacctcgatctgctcattgtaccaacttgagaactactgtaat

SEQ ID NO: 14212 - DNA, 324 bp, synthetic construct
  misc_feature 1..324: note = source = /note="Description of Artificial Sequence: Synthetic coding sequence"
  source 1..324: mol_type = other DNA
atggccctttggatgaggcttctaccattgcttgctcttctagcactgtggggaccagatccggccgcagcgttcgttaatcaacatctttgtggatcccatttagtagaagcgttatacctcgtatgcggcgaacgaggtttcttttacactgataagacagaagcggaagacctccaagttggacaagtggaactcggcggaggtccgggcgctggatctctccaaccccttgctctcgaagggagtttgcagaaacgaggaattgttgagcaatgttgcacttcaatttgtagtctttaccaactcgagaactattgcaac

SEQ ID NO: 14213 - DNA, 324 bp, synthetic construct
  misc_feature 1..324: note = source = /note="Description of Artificial Sequence: Synthetic coding sequence"
  source 1..324: mol_type = other DNA
atggctctgtggatgagattgttaccactgctggcgctactcgccctgtggggccccgatcccgctgctgccttcgtgaatcagcacctgtgtggctcccacctcgtagaggctttgtatctcgtgtgcggggagcggggcttcttctatacagacaagactgaggccgaggatctgcaggtcgggcaagttgaactgggaggcggacctggtgccgggtccctacagccattagccttagaaggctctctgcagaaaagggggatcgtggagcagtgctgcacatcgatctgctcactgtatcagctggaaaactactgtaat

SEQ ID NO: 14214 - DNA, 324 bp, synthetic construct
  misc_feature 1..324: note = source = /note="Description of Artificial Sequence: Synthetic coding sequence"
  source 1..324: mol_type = other DNA
atggctctctggatgaggctcctgcccctgttggcacttctggccctttggggtccagaccccgccgccgctttcgtgaaccagcacctttgcggaagtcacctcgtagaggcactgtacttagtgtgtggggagaggggctttttttataccgacaagaccgaagcggaggacctgcaggttggccaggtggagttgggcgggggcccgggagctggaagtttgcagcccttagctctcgaaggttcgctgcagaagaggggcattgtcgagcagtgctgcacatcgatttgttcgctttatcagctggaaaattattgcaat

SEQ ID NO: 14215 - DNA, 324 bp, synthetic construct
  misc_feature 1..324: note = source = /note="Description of Artificial Sequence: Synthetic coding sequence"
  source 1..324: mol_type = other DNA
atggctctgtggatgcgcctgctgccactgttagccctgctagccctgtggggcccggatccggccgccgcgtttgtcaatcagcacctctgtggctcccacctggtggaggcgctctatctagtttgtggtgaaaggggttttttctatactgacaagacggaggcggaggaccttcaggtcggtcaagtggagctgggcgggggtcctggtgcaggcagcctgcaaccgctcgcgttggagggttccctgcaaaaacgtggcatcgtggagcagtgttgcactagcatatgctctttgtaccagttggaaaactactgtaat

SEQ ID NO: 14216 - DNA, 324 bp, synthetic construct
  misc_feature 1..324: note = source = /note="Description of Artificial Sequence: Synthetic coding sequence"
  source 1..324: mol_type = other DNA
atggcactttggatgcggctgcttcctcttctggccctcctggctctttggggacctgatccggcagcagcatttgtgaatcagcatctttgtgggagccatcttgtcgaggccctttacctggtgtgcggtgaaagaggctttttctacactgacaagacggaggccgaggatcttcaagtcggacaggtggagctcggaggaggtcctggagcaggaagcctgcagccactggctttggagggttctcttcaaaagagaggaatagtggaacaatgctgtacttccatttgttcgctctaccaactcgaaaactactgcaat

SEQ ID NO: 14217 - DNA, 324 bp, synthetic construct
  misc_feature 1..324: note = source = /note="Description of Artificial Sequence: Synthetic coding sequence"
  source 1..324: mol_type = other DNA
atggctctttggatgaggcttcttcccctgttggctcttctcgctttgtggggccctgatcccgcagcagcattcgtgaaccaacatttgtgtggatcacatctcgtggaggccttgtatctggtttgcggtgaacgcggtttcttttacaccgacaagactgaagccgaggatcttcaagttggacaggtcgaacttggaggcggccctggggcgggttcccttcaaccacttgcactggaaggtagccttcagaaaaggggcattgtggagcagtgttgtacctcgatctgttcgctgtaccagctggagaactactgcaat

SEQ ID NO: 14218 - DNA, 324 bp, synthetic construct
  misc_feature 1..324: note = source = /note="Description of Artificial Sequence: Synthetic coding sequence"
  source 1..324: mol_type = other DNA
atggctctgtggatgaggttgcttccactgcttgcccttctggctctttggggaccggatccagcagcggcatttgtgaatcagcacctttgtggttctcatctcgtggaagccctgtacctggtgtgcggtgagagaggcttcttttacaccgacaagaccgaggccgaggatctgcaagtcggccaggtggaactgggtgggggacccggagcagggtcgttgcagcctcttgcacttgaaggtagcctccaaaaacgaggtatcgtcgaacagtgttgcacctcgatttgcagcctctaccaattggaaaactactgtaac

SEQ ID NO: 14219 - DNA, 324 bp, synthetic construct
  misc_feature 1..324: note = source = /note="Description of Artificial Sequence: Synthetic coding sequence"
  source 1..324: mol_type = other DNA
atggcactgtggatgcggcttctgcccctgctggctctgttggccctctggggccccgaccccgctgctgcttttgtcaaccaacatctttgcggatcccacctggtagaggcactttacctggtttgcggtgagcgcggctttttctacacagacaaaaccgaagctgaggatttgcaggtgggacaggtcgagcttggtggagggcctggtgctggaagtctgcaacctcttgctctggaaggatcacttcagaagcggggaatagtggagcagtgctgcactagcatatgctctctatatcagttagagaactattgcaac

SEQ ID NO: 14220 - DNA, 324 bp, synthetic construct
  misc_feature 1..324: note = source = /note="Description of Artificial Sequence: Synthetic coding sequence"
  source 1..324: mol_type = other DNA
atggccctttggatgcgactgctgcctctgcttgcacttctggctctgtggggtccagacccggcagcagcgtttgtgaatcagcatctttgcggttcgcacctggtcgaggcgctttaccttgtgtgtggagaacgtggtttcttttacacggataaaaccgaggcagaggacctgcaggtgggacaggtggagctgggtggtggccctggggcgggatcgcttcaacccctggcgctggaggggtcgcttcagaagagaggtattgtggaacaatgttgtacttccatttgttcactctaccaactggaaaactactgcaac

SEQ ID NO: 14221 - DNA, 324 bp, synthetic construct
  misc_feature 1..324: note = source = /note="Description of Artificial Sequence: Synthetic coding sequence"
  source 1..324: mol_type = other DNA
atggccctgtggatgcggctgctcccactgcttgcactgctggcgctttggggccctgacccggctgccgcctttgtcaaccagcatctgtgcggatcccacctggtcgaggcgctctatctggtgtgcggtgaacggggtttcttctacactgacaagaccgaagcggaggacctgcaggtggggcaggtcgaactcggtgggggaccgggagcaggctcgctgcagccgctcgccttggaagggtcgttgcaaaagcgcgggatcgtggaacagtgctgcacctcgatctgttcgttgtaccagctcgagaattactgcaac

SEQ ID NO: 14222 - DNA, 324 bp, synthetic construct
  misc_feature 1..324: note = source = /note="Description of Artificial Sequence: Synthetic coding sequence"
  source 1..324: mol_type = other DNA
atggcactgtggatgaggctccttcccctgttggctctgctggcgctgtggggccccgacccagctgctgctttcgtaaatcagcacctttgtggttcccatttggtcgaggctctgtacctcgtctgcggcgagcgcggattcttctacactgacaaaacagaagccgaggacctccaggtgggtcaagtagagctcggtggcggtccaggcgcaggctctctccaacccctggctctggaaggtagtctgcagaagagaggtattgtcgagcagtgctgcacgagcatctgttccttgtaccagctggagaattactgcaat

SEQ ID NO: 14223 - DNA, 324 bp, synthetic construct
  misc_feature 1..324: note = source = /note="Description of Artificial Sequence: Synthetic coding sequence"
  source 1..324: mol_type = other DNA
atggcactgtggatgcggctgctccctctgctggccttgctggccctttggggacctgatcctgctgccgcttttgtgaatcagcacctctgtggctcccatttggtcgaggccctgtacctggtgtgtggtgaacggggattcttctacacagataagacagaagccgaagatctgcaggtggggcaggtagagctgggcggcggccctggcgcagggtccctgcagcccctggccctggagggctcactccagaagagaggcatcgtggaacaatgttgcactagcatctgcagtctttaccagcttgagaactattgcaat

SEQ ID NO: 14224 - DNA, 324 bp, synthetic construct
  misc_feature 1..324: note = source = /note="Description of Artificial Sequence: Synthetic coding sequence"
  source 1..324: mol_type = other DNA
atggccctctggatgagactcctacccctgctcgccctgctcgccctgtggggccctgatccagccgccgctttcgttaatcagcatctgtgcgggtctcatctcgtcgaagcgctatatctagtttgcggagaacgtggctttttctatacagataagaccgaggccgaggatcttcaggtgggtcaggttgagctcggagggggccccggagcgggctcattgcagcccctggcgctggagggctccttacagaagcggggaatagtggaacagtgttgtacttctatctgtagcctttaccagctagagaattattgtaac

SEQ ID NO: 14225 - DNA, 324 bp, synthetic construct
  misc_feature 1..324: note = source = /note="Description of Artificial Sequence: Synthetic coding sequence"
  source 1..324: mol_type = other DNA
atggcgctgtggatgcgactgcttcccctgctcgcactcttggcactttggggacctgatcccgcagcggcattcgtgaatcagcacttgtgtggctcacatctggtcgaggcactgtaccttgtgtgtggagaacgcggattcttttacaccgataagaccgaagcagaggacttgcaagtgggacaggtggaactcggagggggcccaggagcaggttcgcttcagcctctcgcccttgaaggatcccttcagaagagaggtattgtcgaacagtgttgcacttccatctgttcactctaccaactggagaattactgcaac

SEQ ID NO: 14226 - DNA, 324 bp, synthetic construct
  misc_feature 1..324: note = source = /note="Description of Artificial Sequence: Synthetic coding sequence"
  source 1..324: mol_type = other DNA
atggccctctggatgcggcttctgcccctgttggcgcttctcgctctgtggggccctgatcctgccgcagctttcgtcaaccagcacctttgcgggtcacatctggtcgaagctctttacctggtctgcggcgaacgaggattcttttacactgataagaccgaagccgaggacctccaagtgggtcaagttgaactgggaggtggcccgggcgcgggatcgctgcagccgctcgcgctcgagggatcactgcaaaagaggggaattgttgagcagtgctgtacctcgatctgttccctctaccagctggagaattactgcaac

SEQ ID NO: 14227 - DNA, 324 bp, synthetic construct
  misc_feature 1..324: note = source = /note="Description of Artificial Sequence: Synthetic coding sequence"
  source 1..324: mol_type = other DNA
atggccctgtggatgcggctgctgcctcttctcgctttactcgccctttggggaccggaccctgctgcggctttcgtaaatcagcacttatgcggaagccacctggtggaggctctgtatctggtgtgtggagaaagaggattcttttacacagacaagacagaagccgaggatctgcaggtgggccaggtggagctgggcgggggacccggagccggatccctccagccactggcgctggagggcagcctccaaaaacggggaatagtcgaacagtgttgcacctccatttgttcactttaccagcttgaaaattactgtaac

SEQ ID NO: 14228 - DNA, 324 bp, synthetic construct
  misc_feature 1..324: note = source = /note="Description of Artificial Sequence: Synthetic coding sequence"
  source 1..324: mol_type = other DNA
atggctctgtggatgagactattgcccctgctggcactattagctctgtggggccctgacccagcagccgctttcgtgaaccaacacctgtgtgggagtcatttggtggaagcattgtacctggtctgcggcgagcggggtttcttttataccgataaaactgaggccgaagacctgcaggtgggacaggtggagttgggcggaggacctggagctggcagcctgcaacccctggcacttgaagggtctctccagaagcggggtattgtagagcagtgttgtaccagcatttgctcattgtatcaactcgagaactactgtaat

SEQ ID NO: 14229 - DNA, 324 bp, synthetic construct
  misc_feature 1..324: note = source = /note="Description of Artificial Sequence: Synthetic coding sequence"
  source 1..324: mol_type = other DNA
atggcactttggatgcggctgctgcccctgcttgcgctgctggcactctggggacctgatccagcagcagcatttgtgaaccaacacctttgtggttcgcatctcgtggaggcactgtacttggtttgtggagaacggggcttcttttacacggataaaactgaggcagaggacctgcaggtggggcaggtggagcttggaggagggcctggggcaggcagccttcaaccactggctctcgaaggctccctgcaaaagaggggtattgtcgaacaatgctgtaccagcatttgtagcttgtaccagcttgaaaactattgtaac

SEQ ID NO: 14230 - DNA, 324 bp, synthetic construct
  misc_feature 1..324: note = source = /note="Description of Artificial Sequence: Synthetic coding sequence"
  source 1..324: mol_type = other DNA
atggccttgtggatgaggctgctgcctcttctggcgctgctggcactttgggggcccgacccggccgcagcttttgtgaatcaacatttgtgtggctcacaccttgtggaggccctttaccttgtctgtggggaaagggggtttttctacactgataaaacggaagcggaagatctccaagtggggcaagttgaactgggtggcgggcctggagcaggaagcctccagcctcttgcactcgagggatcgctccagaagcgcggcattgtggagcagtgctgtacctcaatttgttcgctttaccaactggagaattactgtaat

SEQ ID NO: 14231 - DNA, 324 bp, synthetic construct
  misc_feature 1..324: note = source = /note="Description of Artificial Sequence: Synthetic coding sequence"
  source 1..324: mol_type = other DNA
atggccctttggatgagactgctgccattgttggccctcttggcactctggggacctgatccagccgcggctttcgtcaatcagcatctctgtgggtcacacctcgtcgaggcgctgtacctcgtgtgtggagagcgcggattcttttacaccgacaaaaccgaggccgaagatctgcaagtggggcaagtggaactcgggggcggaccgggtgcaggctccctgcaacctttggcactggaaggttctctccagaagagaggcatcgtggaacagtgctgcacttcgatctgttccctgtaccagctggagaactattgtaac

SEQ ID NO: 14232 - DNA, 324 bp, synthetic construct
  misc_feature 1..324: note = source = /note="Description of Artificial Sequence: Synthetic coding sequence"
  source 1..324: mol_type = other DNA
atggcactctggatgaggctgttgccactgctcgctttgctagcgctgtgggggccggacccagcggctgcatttgttaaccagcatctgtgtggaagtcatctggtggaagctctttaccttgtctgcggcgagcggggatttttttataccgataagacagaggctgaagatctgcaagtaggacaggttgagctgggtgggggtcctggggccggatctctgcagcctcttgctctcgaaggatctctgcagaaaagggggattgtggagcaatgctgtacatctatttgtagcctgtaccagctagaaaattactgcaac

SEQ ID NO: 14233 - DNA, 324 bp, synthetic construct
  misc_feature 1..324: note = source = /note="Description of Artificial Sequence: Synthetic coding sequence"
  source 1..324: mol_type = other DNA
atggctttgtggatgcggttgttgccactgttggccttattggccttgtggggacccgatccagccgcagcattcgtaaatcagcatttatgtggttctcatctagtagaagctttgtatttagtctgcggggaaagggggtttttctacactgataagaccgaggcagaagacttgcaagttggccaggtcgagcttggaggtggcccaggtgcaggcagccttcagccgcttgctctggagggatcattacagaaacgaggaatagtggagcaatgctgtacttcaatatgttctttgtatcagctcgaaaactattgtaac

SEQ ID NO: 14234 - DNA, 324 bp, synthetic construct
  misc_feature 1..324: note = source = /note="Description of Artificial Sequence: Synthetic coding sequence"
  source 1..324: mol_type = other DNA
atggcactttggatgcgactgctgccactgctggccttgctagccctgtggggaccagacccggctgctgccttcgtcaaccagcacctgtgcgggtcccacttggttgaagcgctctatctggtgtgcggagaaagggggtttttctacactgacaagactgaagccgaggacttacaagttggccaggtggagttgggcggcgggccgggcgccggcagcctacagcctcttgctctcgaaggcagtctacagaaacgcggcatcgtggaacaatgttgcacatccatatgctctctgtaccagctcgagaactactgcaac

SEQ ID NO: 14235 - DNA, 324 bp, synthetic construct
  misc_feature 1..324: note = source = /note="Description of Artificial Sequence: Synthetic coding sequence"
  source 1..324: mol_type = other DNA
atggccctatggatgcgcctgctgcctttacttgccctccttgctttgtggggaccggaccccgccgcagctttcgtgaatcaacatctctgtggctctcatctggtcgaagctctctatctggtttgcggggagagaggcttcttttataccgataagactgaagctgaagacttgcaagtagggcaggtagagttgggaggagggcccggcgccgggtctctacagccactcgcactagaggggtccctgcagaaaagaggaattgtcgagcaatgttgtacctcgatttgttcactttaccagctggaaaactactgcaac

SEQ ID NO: 14236 - DNA, 324 bp, synthetic construct
  misc_feature 1..324: note = source = /note="Description of Artificial Sequence: Synthetic coding sequence"
  source 1..324: mol_type = other DNA
atggcgctctggatgcggctgctcccattgctggctcttttggcgttgtggggccctgatccggcagccgcctttgtgaatcagcatctctgcggaagccacctggtggaggcgctgtacctggtgtgcggagaaagaggattcttttacactgacaagaccgaagccgaagatttgcaagtggggcaagtggaacttgggggcggaccgggcgcgggcagcctgcagccattggctctggagggcagcttgcagaagcggggtatcgtggagcagtgttgtacttcgatttgctcgctctatcagctggagaactactgcaac

SEQ ID NO: 14237 - DNA, 324 bp, synthetic construct
  misc_feature 1..324: note = source = /note="Description of Artificial Sequence: Synthetic coding sequence"
  source 1..324: mol_type = other DNA
atggcactgtggatgcggctgttgccgttgctcgcattgttggcgctgtggggacctgacccagccgccgcatttgtcaatcagcacttgtgtggatcgcaccttgtcgaagcactgtacctggtgtgcggtgaacgaggttttttctacaccgataaaactgaagcagaagatctccaggtgggacaagtggagctgggaggaggtcctggagcgggaagcctgcagccactcgccctcgaaggctccctgcagaagagaggtatcgtggaacaatgttgtacttccatttgttccctgtaccaactcgagaactactgtaac

SEQ ID NO: 14238 - DNA, 324 bp, synthetic construct
  misc_feature 1..324: note = source = /note="Description of Artificial Sequence: Synthetic coding sequence"
  source 1..324: mol_type = other DNA
atggccctctggatgaggctgctcccacttttggctctgttggccctgtggggccccgaccccgccgcagccttcgtcaatcaacacctttgcggatctcatctagtagaagcactgtatctggtgtgcggagaaagaggcttcttctatacggataagactgaagctgaggatctgcaagtcggtcaggtagagctgggcggagggcccggtgctggcagcttacagccactcgccctggagggttcactccagaagagaggaattgtggagcagtgttgcactagcatatgctcattgtaccagctcgagaactactgcaac

SEQ ID NO: 14239 - DNA, 324 bp, synthetic construct
  misc_feature 1..324: note = source = /note="Description of Artificial Sequence: Synthetic coding sequence"
  source 1..324: mol_type = other DNA
atggctctgtggatgcgtctgctccctctgctggcactcctggctctctggggccccgaccctgccgctgccttcgtgaatcagcatctgtgcggaagccacctggtcgaagcactctacctggtctgcggtgagagaggcttcttctacacagacaaaactgaagccgaggacttgcaggtgggacaggtagaactcggtggaggccctggcgctggctcccttcagcccctcgctcttgaaggtagtttgcagaagagaggcatcgttgagcagtgctgcacatcaatctgcagcttgtaccagctggaaaattattgtaac

SEQ ID NO: 14240 - DNA, 324 bp, synthetic construct
  misc_feature 1..324: note = source = /note="Description of Artificial Sequence: Synthetic coding sequence"
  source 1..324: mol_type = other DNA
atggctctgtggatgcgtctcttgccgttactggcgctcctcgccttgtggggtcccgaccctgcggccgcgttcgtgaaccagcatctgtgcgggagccaccttgttgaggcgctttacctggtctgcggcgagcgcggtttcttctatactgacaagaccgaggccgaggacttgcaggtcggtcaagtggagctgggtggaggtcccggcgccggttctctccagcctttggcgcttgagggcagcctccagaagcgcggtattgttgaacaatgctgcacgtctatctgcagtctgtaccagctggagaactattgtaac

SEQ ID NO: 14241 - DNA, 324 bp, synthetic construct
  misc_feature 1..324: note = source = /note="Description of Artificial Sequence: Synthetic coding sequence"
  source 1..324: mol_type = other DNA
atggccctgtggatgaggctgttacctctgctggccttgctggcgctgtggggcccagatccagcggcggctttcgttaatcagcatctgtgcgggtcacacctagtggaagccttatacctggtgtgcggagaacgaggatttttttataccgataaaactgaagctgaggatctccaggtcggacaagtggagctcggtggagggccaggagctgggtctctgcaaccactcgccctggaaggcagtttgcagaagagggggatcgtcgagcagtgttgcacatccatttgctcgctctaccaattggaaaattattgcaat

SEQ ID NO: 14242 - DNA, 324 bp, synthetic construct
  misc_feature 1..324: note = source = /note="Description of Artificial Sequence: Synthetic coding sequence"
  source 1..324: mol_type = other DNA
atggccttgtggatgaggctgcttccacttcttgcgctgttggcactctggggtccagatccagccgccgcatttgtcaatcagcatctgtgtggatcacatcttgtggaggcactctacctcgtgtgtggcgagcggggcttcttttacaccgataagaccgaagctgaagatttgcaggtcggtcaagtggagctgggtggagggccgggagcagggtcgcttcaaccactggcactggaaggttccctgcagaagcggggaatagtggaacaatgttgtacttcaatttgttcgctgtaccagcttgagaattactgcaat

SEQ ID NO: 14243 - DNA, 324 bp, synthetic construct
  misc_feature 1..324: note = source = /note="Description of Artificial Sequence: Synthetic coding sequence"
  source 1..324: mol_type = other DNA
atggcactgtggatgcgcctgctgcccctgttagcactcctggctctctggggacccgatcctgccgccgcatttgtcaatcagcacctgtgcggcagccacttggtggaagcactttaccttgtgtgcggtgaacgcggattcttttacacggacaaaactgaggccgaggaccttcaggtcggccaagttgaactgggtggcggaccgggcgctggatccctgcagccccttgccctcgaagggtcccttcagaaacggggaatcgttgagcagtgctgtacatctatttgctccctgtatcagctggagaactattgtaac

SEQ ID NO: 14244 - DNA, 324 bp, synthetic construct
  misc_feature 1..324: note = source = /note="Description of Artificial Sequence: Synthetic coding sequence"
  source 1..324: mol_type = other DNA
atggccctttggatgcgtctattgccattacttgcacttcttgccctttggggcccagaccctgcggcagcatttgtgaaccaacacctgtgcggctcccatttggttgaggcattgtatcttgtgtgtggtgagcgaggctttttttatactgacaaaactgaagctgaggacttacaggtcggacaggttgaacttggaggtggcccaggagctggttcactgcaacctttggccctggaaggctctttacagaaacggggaatcgttgaacagtgctgcacatccatttgctctctgtatcaattagaaaattattgcaac

SEQ ID NO: 14245 - DNA, 324 bp, synthetic construct
  misc_feature 1..324: note = source = /note="Description of Artificial Sequence: Synthetic coding sequence"
  source 1..324: mol_type = other DNA
atggccctgtggatgaggctgcttccattattagcgctgctggccctttggggacccgaccctgccgcagcatttgtaaatcaacacctctgtgggtcgcacctagtggaagccctgtacctggtatgcggtgaaaggggctttttctacacagacaaaacggaagccgaagacctgcaggtcggccaggtcgagctgggaggtggtcccggcgcaggctctctccagcctctggcgctggagggctccctgcagaaaagaggaatagttgaacagtgttgtacctctatttgttcattgtatcagctggagaattactgtaat

SEQ ID NO: 14246 - DNA, 324 bp, synthetic construct
  misc_feature 1..324: note = source = /note="Description of Artificial Sequence: Synthetic coding sequence"
  source 1..324: mol_type = other DNA
atggccctttggatgcggctcttaccactgctcgctttgctggcgctctggggccctgaccccgctgcagcattcgtcaaccagcatctgtgtgggtcccatcttgtggaggctctgtacctagtgtgcggcgaacgggggttcttctatacagataaaacggaggccgaggacctgcaagtcgggcaggtggagctcggcgggggccctggagccggcagcctccagcctctggctctggagggatctctgcagaagcgggggattgtcgagcaatgttgcaccagcatatgttctttgtaccagctggagaactattgcaac

SEQ ID NO: 14247 - DNA, 324 bp, synthetic construct
  misc_feature 1..324: note = source = /note="Description of Artificial Sequence: Synthetic coding sequence"
  source 1..324: mol_type = other DNA
atggctctctggatgaggttgctgccactgctggctctgcttgcgctttggggccccgaccccgctgctgccttcgtgaatcagcacctatgcggatcccacctggttgaagcgctctacctggtctgtggtgagcgtgggttcttctacacagataaaaccgaggccgaggacctccaggtaggccaggtggagctgggtgggggccctggcgccggcagcctgcagccgctggcattggagggttcgttacagaaacgcggcattgtggagcaatgctgtacctccatttgcagtctatatcagttagagaactactgtaac

SEQ ID NO: 14248 - DNA, 324 bp, synthetic construct; identical to SEQ ID NO: 14247
  misc_feature 1..324: note = source = /note="Description of Artificial Sequence: Synthetic coding sequence"
  source 1..324: mol_type = other DNA

SEQ ID NO: 14249 - DNA, 324 bp, synthetic construct
  misc_feature 1..324: note = source = /note="Description of Artificial Sequence: Synthetic coding sequence"
  source 1..324: mol_type = other DNA
atggcactgtggatgcgactgctcccgctgcttgccttgctggcgctttggggcccagaccctgcagcagccttcgtgaaccagcatttgtgtgggtcccacctggtggaagccctttaccttgtttgcggtgaacgcgggtttttctacactgataagacggaggcagaggacctgcaagtcggacaagtggagctgggtggcggacccggtgcgggatccttgcagcctctggcactggaaggatccctgcagaaacgcggcatagtggaacagtgttgcacctctatctgtagcctctaccaactcgaaaactattgtaac

SEQ ID NO: 14250 - DNA, 324 bp, synthetic construct
  misc_feature 1..324: note = source = /note="Description of Artificial Sequence: Synthetic coding sequence"
  source 1..324: mol_type = other DNA
atggctctgtggatgcggcttctgcctcttttggcccttttggcactctggggcccagacccggcagctgcgtttgtgaatcagcacctctgtgggtcccatttggtggaggccctgtaccttgtgtgtggagaaagaggattcttttacactgataagactgaagccgaagatctccaggtgggccaggtagagctgggtggcggaccgggagcgggttcgctgcaacccttggcactcgaagggagccttcaaaagcgcggcatcgtcgagcaatgctgtaccagtatttgctcgctgtaccaacttgaaaactactgcaac

SEQ ID NO: 14251 - DNA, 324 bp, synthetic construct
  misc_feature 1..324: note = source = /note="Description of Artificial Sequence: Synthetic coding sequence"
  source 1..324: mol_type = other DNA
atggctctctggatgagacttctgcccctcttggccctactggcgctatgggggcctgatcccgccgcggcctttgtgaaccagcatctatgtggctcccatctggtggaagcgctgtatctggtttgtggcgagcgtggattcttctataccgataagaccgaggctgaggacctgcaggtcggacaggttgagttgggtggaggacccggcgcaggcagcttgcagccacttgccttagaaggctccctgcagaaacgcggaatagtcgagcagtgctgtacgtccatctgctccttataccagcttgaaaattactgtaat

SEQ ID NO: 14252 - DNA, 324 bp, synthetic construct
  misc_feature 1..324: note = source = /note="Description of Artificial Sequence: Synthetic coding sequence"
  source 1..324: mol_type = other DNA
atggcactctggatgagactgttgcctctgcttgccttgttagccctgtggggccctgacccagccgccgctttcgtgaaccagcatctctgcgggagccatctggtcgaggcactttatctggtgtgcggcgagaggggtttcttctatactgacaagactgaagcggaagatttgcaggtgggacaggtagaacttggtggggggcctggcgcaggctcactacagccactagccttagagggttccctgcagaaaagaggtattgtggaacagtgttgcacatccatctgtagtctgtatcagctcgaaaactattgtaat

SEQ ID NO: 14253 - DNA, 324 bp, synthetic construct
  misc_feature 1..324: note = source = /note="Description of Artificial Sequence: Synthetic coding sequence"
  source 1..324: mol_type = other DNA
atggcgctgtggatgagactgcttcccctgctggcactgcttgccctgtggggccctgacccagcagcagcatttgtgaaccaacatctttgcggtagccatctggtggaggccctgtacctggtctgtggagaaaggggattcttttacaccgataaaacggaggcagaggatctccaagtcgggcaagtcgagcttggaggcgggccgggagcaggctctcttcaacctttggcactggaaggctccctgcaaaagcgagggatcgtggagcaatgctgcacttcgatttgttcactgtaccagctggagaactattgtaat

SEQ ID NO: 14254 - DNA, 324 bp, synthetic construct
  misc_feature 1..324: note = source = /note="Description of Artificial Sequence: Synthetic coding sequence"
  source 1..324: mol_type = other DNA
atggctctgtggatgaggctcctgccgctgctggccctgttggcgctgtgggggccggatcctgcggcagcctttgtcaatcagcatctgtgtgggagccacctggtggaggccctgtacctggtgtgcggtgagcgcggcttcttctacaccgacaaaacggaagcagaggatttgcaagtgggacaggtggaactgggaggcggaccgggagcgggaagcctgcaacctcttgcattggaaggctccctccaaaagcgggggatcgtcgaacagtgttgcacctcaatttgctcactttatcagctggagaactactgcaat

SEQ ID NO: 14255 - DNA, 324 bp, synthetic construct
  misc_feature 1..324: note = source = /note="Description of Artificial Sequence: Synthetic coding sequence"
  source 1..324: mol_type = other DNA
atggcgctttggatgcgcctgcttcccctgcttgcactcctcgcactgtggggaccagacccggcagcagctttcgtcaaccaacacctgtgcggatcgcatcttgtggaggcactgtacctcgtgtgtggcgagcgagggtttttctacacggataaaaccgaggcggaggatctgcaagtcggacaggtggaacttgggggcggtccaggtgcaggatcgcttcaaccacttgcactcgagggatcgctccagaagaggggcatcgtggaacagtgttgcacctcaatctgtagcctgtaccagctcgaaaactattgtaac

SEQ ID NO: 14256 - DNA, 324 bp, synthetic construct
  misc_feature 1..324: note = source = /note="Description of Artificial Sequence: Synthetic coding sequence"
  source 1..324: mol_type = other DNA
atggcactgtggatgcggctgcttcccctcctggcgcttctggcgctctggggccccgatccagcagcggcatttgtcaaccaacacctgtgtggttcacatcttgtggaagccttgtacctcgtgtgtggagaaagaggtttcttttacactgataagacggaagcagaagatctccaagttgggcaggtggaacttggtggaggccctggcgccggtagcctgcagccactggctctggaagggtcactgcaaaagaggggcatagtggagcaatgctgcactagcatctgctcgctgtaccaactcgagaattactgtaac

SEQ ID NO: 14257 - DNA, 324 bp, synthetic construct
  misc_feature 1..324: note = source = /note="Description of Artificial Sequence: Synthetic coding sequence"
  source 1..324: mol_type = other DNA
atggcactttggatgagattgttaccactacttgcattattagcattatggggacctgatcctgctgctgcttttgtaaatcaacatttatgtggaagtcatcttgttgaagcactttatttagtctgtggtgaaagaggatttttctatacagataagactgaagcagaagatcttcaagttggacaagtcgaattaggaggaggaccaggtgcaggttcattacaacctttggcacttgaagggtctttacaaaagagaggtattgtagaacaatgctgtacttcaatttgttcattatatcaattagaaaattattgtaat

SEQ ID NO: 14258 - DNA, 324 bp, synthetic construct
  misc_feature 1..324: note = source = /note="Description of Artificial Sequence: Synthetic coding sequence"
  source 1..324: mol_type = other DNA
atggcgctctggatgaggctgctcccacttcttgctctcctggcactgtgggggcccgatcccgcagcggccttcgtcaaccaacacctctgcggcagccatcttgtcgaagccctgtacctcgtgtgcggagaacgcggattcttttacactgataagacggaggccgaggatttgcaggtgggacaggtggaacttggaggcgggcctggagccggcagcctccagcctctcgctctcgaaggcagtttgcagaagcgtggaattgttgaacagtgctgcaccagcatctgcagcctgtaccagctcgaaaactactgtaac

SEQ ID NO: 14259 - DNA, 324 bp, synthetic construct
  misc_feature 1..324: note = source = /note="Description of Artificial Sequence: Synthetic coding sequence"
  source 1..324: mol_type = other DNA
atggctctctggatgcggctccttccgctgctcgctctcctggccctctggggacccgacccggccgctgcattcgtgaaccaacatttgtgcgggtcccaccttgttgaggcactgtatctcgtgtgtggcgaaagaggatttttctacacggacaaaaccgaagccgaagatctgcaggtggggcaggtggagctcggcggaggcccaggcgccggctcgctccagccgctcgcgcttgaaggctctctgcaaaagcggggtatcgtggagcagtgctgcactagcatctgttccctgtaccaactcgagaactattgcaac

SEQ ID NO: 14260 - DNA, 324 bp, synthetic construct
  misc_feature 1..324: note = source = /note="Description of Artificial Sequence: Synthetic coding sequence"
  source 1..324: mol_type = other DNA
atggctttgtggatgagactccttccgcttctagccctcctggcactgtgggggccagatcctgcagccgcgttcgttaatcagcacctctgcggatctcatctggtggaggcactgtatttggtgtgtggggagcgaggtttcttttacactgacaagacggaagctgaggatttgcaggtggggcaggtggaactcggaggggggcctggcgctggatctttacagcctctagccctcgagggttcactgcagaagagagggatcgtcgagcagtgctgtacatctatctgttcattgtaccagctggaaaactattgcaac

SEQ ID NO: 14261 - DNA, 324 bp, synthetic construct
  misc_feature 1..324: note = source = /note="Description of Artificial Sequence: Synthetic coding sequence"
  source 1..324: mol_type = other DNA
atggccttgtggatgagacttctgccacttctggcactgctggctctgtggggccctgacccagccgcagcattcgtgaaccaacacctgtgcgggtcccatctggtcgaagcgctctaccttgtgtgtggggaaagaggctttttctacactgataagaccgaagcggaggatcttcaagtgggccaagtcgaactggggggaggcccgggcgcaggctcccttcagccactggcgcttgaaggatcgctccagaaacggggaattgtggaacaatgttgtacttcaatttgctcgctgtaccaattggaaaactactgtaac

SEQ ID NO: 14262 - DNA, 324 bp, synthetic construct
  misc_feature 1..324: note = source = /note="Description of Artificial Sequence: Synthetic coding sequence"
  source 1..324: mol_type = other DNA
atggctttgtggatgcgcttgctgcccctcctcgcactcctggcactttggggcccagatccggcggcggccttcgtgaatcaacacctgtgcgggtcccacctggtggaagcgctctacctggtgtgcggagagcggggcttcttttacacggacaaaaccgaggcagaagatctgcaggtgggtcaggtggagttgggaggaggcccgggagccggcagcctccagccgctcgccctcgagggtagcctgcagaagcgcggcattgtcgaacaatgctgcacttcgatctgcagcctctaccagttggagaattactgcaat

SEQ ID NO: 14263 - DNA, 324 bp, synthetic construct
  misc_feature 1..324: note = source = /note="Description of Artificial Sequence: Synthetic coding sequence"
  source 1..324: mol_type = other DNA
atggccctgtggatgcggctgttgcccctcctggcacttttggctctctggggacctgacccggcggcggcctttgtcaaccaacatctctgcggttcgcacctcgtggaagccctgtacctggtgtgtggcgaaagagggttcttctacaccgacaagactgaagctgaggatctgcaggtgggccaagtggagctcggaggaggaccaggcgccggatccctgcagccgctggcactggaagggtcacttcaaaaacgcggaatcgtcgagcagtgctgtaccagcatctgctcgctctaccagctggagaactactgcaat

SEQ ID NO: 14264 - DNA, 324 bp, synthetic construct
  misc_feature 1..324: note = source = /note="Description of Artificial Sequence: Synthetic coding sequence"
  source 1..324: mol_type = other DNA
atggcactgtggatgcggctacttccccttctggcactgctggccctgtgggggcctgatccagctgccgcgttcgtcaatcagcacctctgtggatctcatctggtcgaggccctatatctcgtgtgtggggaacgggggttcttttacacagataaaacagaggcagaagatctccaggtaggacaggttgaattagggggagggcccggggctgggtctctgcagccactggcactggaagggtctctccaaaagaggggaattgtagaacagtgctgtacaagtatttgcagtctgtatcagctcgagaactattgcaac

SEQ ID NO: 14265 - DNA, 324 bp, synthetic construct
  misc_feature 1..324: note = source = /note="Description of Artificial Sequence: Synthetic coding sequence"
  source 1..324: mol_type = other DNA
atggccctgtggatgcggcttttaccactgctcgccctgctcgccctgtggggcccagacccagccgccgcatttgtgaatcagcacctttgcggaagtcacctagtcgaagccctgtacctcgtgtgcggtgaacgcggcttcttctacaccgacaaaactgaagctgaagatctgcaggtcggacaggtggaactcggcggtggacccggcgccggctccctccagcccctcgccctagagggttctctgcagaaacgggggatcgttgagcagtgttgcactagtatctgctcactctaccaactcgagaattattgtaat

SEQ ID NO: 14266 - DNA, 324 bp, synthetic construct
  misc_feature 1..324: note = source = /note="Description of Artificial Sequence: Synthetic coding sequence"
  source 1..324: mol_type = other DNA
atggccctgtggatgcggcttctacctctgctggcgctgttggcgctctggggcccagaccctgctgccgcattcgtgaaccagcatctgtgcggaagtcaccttgtcgaggctctgtacctggtgtgtggcgagagaggcttcttttatactgataagactgaggcagaggacctgcaggtgggacaagtcgaactgggcggtggacccggagcgggaagcctacagcctctagctctggaaggaagtctccagaagaggggcatcgtcgagcagtgctgcaccagcatttgttcgctttatcagctcgaaaactattgtaac

SEQ ID NO: 14267 - DNA, 324 bp, synthetic construct
  misc_feature 1..324: note = source = /note="Description of Artificial Sequence: Synthetic coding sequence"
  source 1..324: mol_type = other DNA
atggcactatggatgagacttctccccctgttagccctgctggccctgtggggtcccgacccagcagccgcattcgttaaccagcacctctgcggcagccacttagtagaagccctgtacctcgtctgcggcgagcggggattcttctataccgataagacagaggcagaagacctacaggtgggccaagtcgaactcggaggcggccctggtgctggatcgctacagccactggcgttggagggtagcttacagaaaagggggatcgttgagcagtgttgcactagcatttgttctttatatcagttggaaaattactgtaac

SEQ ID NO: 14268 - DNA, 324 bp, synthetic construct
  misc_feature 1..324: note = source = /note="Description of Artificial Sequence: Synthetic coding sequence"
  source 1..324: mol_type = other DNA
atggcgttatggatgcgtttattaccgttattagcgctattagcgttatggggtccggatccggcggcggcgtttgttaatcaacatctatgtggttcgcatctagttgaagcgctatatttagtatgtggtgaacgaggttttttttatacggataaaacggaagcggaagatttacaagtaggtcaagttgaactaggtggtggtccgggtgcgggttcgttacaaccgctagcgctagaaggttcgttacaaaaacgtggtatagttgaacaatgttgtacgtcgatatgttcgctatatcaattagaaaattattgtaat

SEQ ID NO: 14269 - DNA, 324 bp, synthetic construct
  misc_feature 1..324: note = source = /note="Description of Artificial Sequence: Synthetic coding sequence"
  source 1..324: mol_type = other DNA
atggcactttggatgcgacttctccctcttctcgcactccttgcactgtggggtcctgaccctgcagcggcatttgtgaatcagcatctttgcggaagccatcttgtcgaagccctctacctggtctgcggggaaagaggattcttttacactgataagaccgaagctgaggaccttcaggtcgggcaagtggaactgggcggtggtccaggtgcgggatcgttgcaaccccttgcgctggagggctcgcttcagaagcggggaattgtggaacaatgctgtacctccatttgttcactgtaccaactcgaaaactactgtaac

SEQ ID NO: 14270 - DNA, 324 bp, synthetic construct
  misc_feature 1..324: note = source = /note="Description of Artificial Sequence: Synthetic coding sequence"
  source 1..324: mol_type = other DNA
atggccttgtggatgcggcttctccccctgcttgctctcctggccctctgggggccggacccagcagcagcgttcgtcaatcagcacttgtgcggatcccatctggtggaagccctttacctggtgtgcggcgaacgtggatttttctacacggacaaaactgaagcggaggatctgcaagtcggacaggtggagttgggcggagggccaggggcaggatcgctgcagccgctcgcgctcgagggtagcttgcagaagagaggaatcgtcgagcaatgttgtacctccatctgctcattgtatcaactggaaaactactgcaac

SEQ ID NO: 14271 - DNA, 324 bp, synthetic construct
  misc_feature 1..324: note = source = /note="Description of Artificial Sequence: Synthetic coding sequence"
  source 1..324: mol_type = other DNA
atggcgctgtggatgagattgctccctctgttggcgctgctggccctttggggaccagacccagcagccgcctttgtgaatcaacatctgtgtggatcgcacttggttgaagcactctatctggtttgcggagaacggggattcttttacactgataagactgaagcggaggacttgcaggtgggacaggtggagctcggcggaggccctggggcggggtcccttcagccgttggctctcgaaggaagtctgcagaagcgaggaatcgtcgagcaatgttgcacctcgatctgctccctttaccaactggagaactactgcaac

SEQ ID NO: 14272 - DNA, 324 bp, synthetic construct
  misc_feature 1..324: note = source = /note="Description of Artificial Sequence: Synthetic coding sequence"
  source 1..324: mol_type = other DNA
atggctctctggatgaggctcctgcctctgctggctcttctggccctctggggacctgacccagctgctgcctttgtcaatcagcatctgtgtggtagtcatctagtggaggccttgtacctggtgtgcggcgagcgcggattcttctataccgataaaaccgaagctgaagacctccaggtgggccaagtggaactgggcggaggtcccggggctggctccctgcagccactggcactggagggaagtcttcaaaagcggggaatcgtggagcagtgctgtacttctatctgttctctgtaccagctcgagaactactgcaac

SEQ ID NO: 14273 - DNA, 324 bp, synthetic construct
  misc_feature 1..324: note = source = /note="Description of Artificial Sequence: Synthetic coding sequence"
  source 1..324: mol_type = other DNA
atggcgttgtggatgcgattgctgcccttgctggccctcctcgccctctggggaccggacccggcagctgcgtttgtgaatcagcacttgtgcggatcccatcttgtggaggcactgtacctggtgtgcggggagcgcggattcttttacaccgataagactgaagccgaggacctgcaggtggggcaggtggaactgggcggaggtccgggggctggctccctccagcctcttgcgctcgaaggttctctgcagaagagaggaattgtggagcagtgttgtacctcgatctgctcgctctaccaattggaaaactactgcaac

SEQ ID NO: 14274 - DNA, 324 bp, synthetic construct
  misc_feature 1..324: note = source = /note="Description of Artificial Sequence: Synthetic coding sequence"
  source 1..324: mol_type = other DNA
atggccctttggatgagactattgcccttgctggccctattagctctctggggccccgaccccgccgccgccttcgtgaatcagcacctgtgcggttcacatctggtggaggccttgtacctggtgtgtggcgagcgtggattcttctacaccgataagacagaagcggaggacctacaggtgggacaggtagaattgggcggtgggccgggcgccggctcactccagcccttggccctggagggtagtctccaaaagaggggaatcgttgagcaatgttgtacatcaatttgtagcctctatcagctggaaaactactgcaac

SEQ ID NO: 14275 - DNA, 324 bp, synthetic construct
  misc_feature 1..324: note = source = /note="Description of Artificial Sequence: Synthetic coding sequence"
  source 1..324: mol_type = other DNA
atggctctttggatgcggctgctgcctctcctcgcactccttgcgctgtggggaccagatccggcggccgcgtttgtcaaccaacatctctgtgggtcccacttggtggaagccctgtacctcgtttgtggcgagagggggttcttctacaccgacaaaactgaggctgaagatctgcaagtcggacaagtggagcttggaggtggaccgggagccggctcgctgcaaccgctcgcgcttgaggggtcccttcagaagcgcgggatcgtggaacagtgctgcaccagcatttgctcgctctaccagctggagaattactgcaac

SEQ ID NO: 14276 - DNA, 324 bp, synthetic construct
  misc_feature 1..324: note = source = /note="Description of Artificial Sequence: Synthetic coding sequence"
  source 1..324: mol_type = other DNA
atggccctctggatgaggctgctgcctctgctggcgctgctggcgctttggggcccggacccggcggccgcatttgtgaaccagcatctctgcggctcacatctggtggaggctctctacctggtctgtggagaaagaggattcttctacaccgacaagaccgaagcagaagatctccaggtcggacaggtggagctggggggaggaccgggagcggggtcgctgcagcccctcgcgcttgaaggatcactgcagaagagaggaatcgtcgaacaatgctgcactagcatttgctccctgtaccaactcgagaattactgcaac

SEQ ID NO: 14277 - DNA, 324 bp, synthetic construct
  misc_feature 1..324: note = source = /note="Description of Artificial Sequence: Synthetic coding sequence"
  source 1..324: mol_type = other DNA
atggcactctggatgaggcttctgcccttactggcactcctggcactttgggggcccgacccagcagccgctttcgtaaaccaacatctgtgtggatcacatctggtagaagctctgtatctcgtttgcggggagcgaggtttcttttatactgataagacagaggctgaagatctccaggtcggccaggtggagctaggaggcggtcctggcgctgggagtctgcagcccctcgcactggagggcagtctccaaaagcgaggcatagtcgagcagtgctgcacctctatatgttctctctaccagttggaaaactattgcaat

SEQ ID NO: 14278 - DNA, 324 bp, synthetic construct
  misc_feature 1..324: note = source = /note="Description of Artificial Sequence: Synthetic coding sequence"
  source 1..324: mol_type = other DNA
atggcattgtggatgcgcctgctgccactccttgctctgctggccctctggggaccagaccccgccgcagcatttgtgaatcagcacttgtgcgggtcccacctcgtggaggcactgtatctggtttgcggggaacgggggttcttctacacggacaagacagaggcggaggacctccaggttggccaggtggaactcggtggagggccaggcgctggaagcctgcaaccactggccttggagggttccctgcagaagcgcggtattgtggagcagtgctgtacctctatatgctccctttaccagctggaaaactactgcaat

SEQ ID NO: 14279 - DNA, 324 bp, synthetic construct
  misc_feature 1..324: note = source = /note="Description of Artificial Sequence: Synthetic coding sequence"
  source 1..324: mol_type = other DNA
atggctctttggatgcgcttgttgcctctgctggctctgttggccctttggggcccagatcctgcggccgcattcgtcaatcagcatctttgcggaagccacctggtcgaagcgttataccttgtgtgtggggagcgtgggttcttttataccgataaaactgaagctgaggacctacaggtaggccaggtcgagttggggggcgggcctggagctgggagcttgcagcccctcgccttggagggctctcttcagaagcgcggaatcgtggaacagtgctgcactagcatttgctcgctgtaccagctggagaattattgcaac

SEQ ID NO: 14280 - DNA, 324 bp, synthetic construct
  misc_feature 1..324: note = source = /note="Description of Artificial Sequence: Synthetic coding sequence"
  source 1..324: mol_type = other DNA
atggctctgtggatgagactgttgcccctgctggccctccttgctctctggggcccggaccctgcggcggccttcgtgaaccagcatctctgcggatcacacctcgtggaggccctgtacctcgtgtgcggagaacgcggattcttctacactgataagacggaagctgaggacctgcaagtgggacaggttgagctcgggggtggacccggcgctggctccttgcagccgctggcgctcgagggctcgctgcagaagcggggaatcgtggaacagtgctgcacgagcatctgcagcctctaccaactcgaaaactactgcaat

SEQ ID NO: 14281 - DNA, 324 bp, synthetic construct
  misc_feature 1..324: note = source = /note="Description of Artificial Sequence: Synthetic coding sequence"
  source 1..324: mol_type = other DNA
atggccctgtggatgcggctgcttccactccttgcgctgctggccctctggggacctgacccggccgcggccttcgttaaccaacatttgtgcggaagtcacctcgtagaagccctctaccttgtgtgcggtgagagaggattcttttacactgacaaaaccgaggcggaagatttgcaggtcggacaagtcgaactgggaggcggcccgggggctgggtccttgcaacccctggccttggaggggtccctgcagaagaggggcatcgtggaacagtgttgcacttcaatctgttcactgtaccagcttgagaattactgtaac

SEQ ID NO: 14282 - DNA, 324 bp, synthetic construct
  misc_feature 1..324: note = source = /note="Description of Artificial Sequence: Synthetic coding sequence"
  source 1..324: mol_type = other DNA
atggccctgtggatgcgactgctgccactactggccctgctggctctgtggggacctgatcctgctgcagcctttgtcaaccagcacttgtgtggcagccacctcgtcgaggcactctatttggtgtgtggcgaaagggggttcttctacacagataaaaccgaagctgaggacctccaggtggggcaggtggagctaggaggtggcccaggagcgggatccttgcagccgctggcactggaagggagtcttcagaaaaggggaatagtggaacagtgttgtacatccatctgctcactgtaccaactggaaaattattgtaac

SEQ ID NO: 14283 - DNA, 324 bp, synthetic construct
  misc_feature 1..324: note = source = /note="Description of Artificial Sequence: Synthetic coding sequence"
  source 1..324: mol_type = other DNA
atggccctatggatgcgactgctacctctcctggccctcctcgccctctggggtccggaccccgccgcagcattcgtcaaccagcatctctgtggatcacatctggttgaagctctctacctggtgtgcggggagcgtggcttcttctatacagataagactgaagcagaggatctacaggtgggacaagtcgagctgggcggcggaccaggcgctggaagcctgcagcccctggccctggagggcagtctgcagaagcgcgggatcgtcgaacagtgttgtaccagcatctgctccctgtatcaactggaaaactattgcaat

SEQ ID NO: 14284 - DNA, 324 bp, synthetic construct
  misc_feature 1..324: note = source = /note="Description of Artificial Sequence: Synthetic coding sequence"
  source 1..324: mol_type = other DNA
atggcattgtggatgcgcctgctgcccttgctggccctgctggcactgtggggtccagatcccgccgctgcatttgtcaaccagcatctgtgcggatcacatctcgtggaggcactctatctcgtatgcggagaacggggcttcttttacacggataaaacagaagccgaagatttgcaggtgggacaggtggagctgggcggaggccctggagccggtagtttgcagccgcttgccctggagggctctcttcagaaacgaggaattgtggagcagtgttgcacttcaatctgtagcttgtaccagttggagaattactgcaac

SEQ ID NO: 14285 - DNA, 324 bp, synthetic construct
  misc_feature 1..324: note = source = /note="Description of Artificial Sequence: Synthetic coding sequence"
  source 1..324: mol_type = other DNA
atggcactctggatgaggctgttgccactcctggcacttctggctctttggggcccggatccagcagcagcctttgtgaaccaacacttgtgtggctcccacctcgttgaagcactctatcttgtctgtggagaacggggcttcttctacactgataagactgaggccgaggacctccaggtggggcaggtcgaacttggcggtggacccggtgcagggtcactgcaaccgctcgcgctggaaggtagcctgcaaaagcgcggaatcgtggagcagtgctgtacttcgatttgttccctgtaccagctcgagaattactgcaac

SEQ ID NO: 14286 - DNA, 324 bp, synthetic construct
  misc_feature 1..324: note = source = /note="Description of Artificial Sequence: Synthetic coding sequence"
  source 1..324: mol_type = other DNA
atggcactgtggatgcgactgcttcctctcctggcattgctcgcactttggggcccggatcccgctgcggcttttgtaaaccagcatttgtgcggatcgcatctcgttgaggctttgtacctcgtgtgtggggagcgcggtttcttttacacggataagaccgaggctgaagaccttcaggtggggcaggtcgagctaggcggtggaccaggagctgggtctctgcagccgctggcgctagaaggtagcctccagaagcgcggcatcgtcgaacaatgctgtactagcatctgctcgttgtaccaacttgagaattattgtaat

SEQ ID NO: 14287 - DNA, 330 bp, synthetic construct
  misc_feature 1..330: note = source = /note="Description of Artificial Sequence: Synthetic coding sequence"
  source 1..330: mol_type = other DNA
atggctctgtggatgaggctgctgccactgctggccctgctcgctctgtggggacccgaccctgcagccgcatttgtgaatcagcacttgtgtggcagtcatctggtggaggccttgtatttggtgtgcggagagagagggtttttctacacacctaagacaagacgtgaggcagaggatctgcaggtggggcaggtggagcttggtggcgggccaggcgcagggagtctccagccgttggcgttagaaggcagcttgcaaaagagaggtatcgtcgaacagtgttgtactagcatctgttctctttatcagctggaaaactattgtaac

SEQ ID NO: 14288 - DNA, 330 bp, synthetic construct
  misc_feature 1..330: note = source = /note="Description of Artificial Sequence: Synthetic coding sequence"
  source 1..330: mol_type = other DNA
atggcgctgtggatgagacttctacccctgctcgccctgcttgcactgtggggcccagatccagccgctgccttcgtgaatcagcacctgtgtgggtctcacttggtggaagccttgtatcttgtgtgtggcgagaggggattcttttacactcccaaaactcgacgcgaagccgaggacctgcaggttggacaggtggagctgggaggggggccaggagctgggagtttacagcctttggcgttagaagggtcgttgcagaagagagggatcgttgagcagtgctgcacatcaatttgctcactgtatcagttagagaactattgtaat

SEQ ID NO: 14289 - DNA, 330 bp, synthetic construct
  misc_feature 1..330: note = source = /note="Description of Artificial Sequence: Synthetic coding sequence"
  source 1..330: mol_type = other DNA
atggcgctctggatgcgcttgctgcccttgcttgcgctgctggcactttggggacctgaccccgccgctgcctttgtgaatcaacacctgtgcgggagccatctggtggaagcactctacttggtctgcggtgaaaggggctttttctacaccccaaagactagaagagaagctgaggaccttcaggtgggacaggtggaactcggcggaggaccaggagccgggagcctgcaaccgctggcccttgaaggatccctccaaaagagaggaatcgtcgaacagtgttgtacttcgatctgctccttgtaccagctggagaattactgcaat

SEQ ID NO: 14290 - DNA, 330 bp, synthetic construct
  misc_feature 1..330: note = source = /note="Description of Artificial Sequence: Synthetic coding sequence"
  source 1..330: mol_type = other DNA
atggcgctctggatgcgcctgctgccgctcctcgcgctgctggcattgtggggcccagacccggcggctgcctttgtcaatcagcatctgtgcggatcccatctggtggaagcactctacctggtttgcggggagcggggcttcttctacactcctaagaccagacgcgaggccgaggatcttcaagtcggacaggtggagctgggcggaggtccaggggcgggaagcctccaacctttggcgctggagggttcactccaaaagcgcggaatcgtcgaacaatgctgtacttctatctgctcgctgtaccagcttgagaattactgcaac

SEQ ID NO: 14291 - DNA, 330 bp, synthetic construct
  misc_feature 1..330: note = source = /note="Description of Artificial Sequence: Synthetic coding sequence"
  source 1..330: mol_type = other DNA
atggccctctggatgagactcctccctttgcttgcacttctggcactgtggggacccgatcccgccgcagcatttgtgaatcaacatctgtgtggctcgcatctggttgaggcactctacttggtgtgcggtgagcggggattcttttacaccccgaaaacgcggagggaagcggaagatctgcaagtcggacaggtggagctcggtggtggccccggagcaggatcacttcagccactggcactggagggctcgctccagaagcgaggcattgtggagcaatgctgtactagcatttgttcactgtatcaactggagaactactgcaac

SEQ ID NO: 14292 - DNA, 330 bp, synthetic construct
  misc_feature 1..330: note = source = /note="Description of Artificial Sequence: Synthetic coding sequence"
  source 1..330: mol_type = other DNA
atggcactttggatgcgactgttgccgctgctggcacttcttgcactgtggggacctgatcccgccgcagcatttgttaaccagcatctgtgcggatcacacctggtggaagccctttacctggtgtgcggcgagcgcggattcttttacacgcctaagactcgccgagaggcagaggatttgcaggtgggtcaagtggaacttggtggaggacctggtgcgggttcgctgcagcccctggcactcgaaggttcgcttcaaaagcgcgggatcgtcgaacaatgttgcaccagcatttgtagcctttatcaacttgagaactactgcaat

SEQ ID NO: 14293 - DNA, 330 bp, synthetic construct
  misc_feature 1..330: note = source = /note="Description of Artificial Sequence: Synthetic coding sequence"
  source 1..330: mol_type = other DNA
atggctctttggatgcggctgctgccgcttctggcgctcctggcactgtggggtcccgaccctgcggcagcgttcgtgaaccaacatctgtgtggatcgcacctcgtggaagcactctacctcgtctgcggcgaaaggggcttcttttacacccccaagactaggcgcgaggccgaggatctgcaggtgggccaggtggagctgggaggaggaccaggagcgggcagtctgcagcctctggccctcgaagggtcattgcagaaacggggaatcgtggaacagtgctgtactagcatctgctccctttaccagctggagaattactgtaac

SEQ ID NO: 14294 - DNA, 330 bp, synthetic construct
  misc_feature 1..330: note = source = /note="Description of Artificial Sequence: Synthetic coding sequence"
  source 1..330: mol_type = other DNA
atggccctgtggatgcggctgctgcctctgctggctctgttggcattgtggggacccgacccagccgctgcgttcgtaaatcagcatctatgcggctcccatctggttgaggcgttgtacctcgtttgtggagaaagaggattcttttacacaccaaaaacgcgacgggaagctgaagacttgcaagtgggacaggtggagctggggggaggcccaggagccgggagtttgcaacctctcgcattggagggcagtctgcaaaagcgtggaatagtggagcagtgctgcaccagcatctgctccctgtaccagctggagaactactgcaat

SEQ ID NO: 14295 - DNA, 330 bp, synthetic construct
  misc_feature 1..330: note = source = /note="Description of Artificial Sequence: Synthetic coding sequence"
  source 1..330: mol_type = other DNA
atggcactctggatgcgcctccttcccctacttgctctacttgcactgtggggccccgatcccgcagcagcctttgtgaatcagcacctttgcggatcccacttggtcgaggccctgtacctggtgtgtggagagagaggctttttctacacacccaaaacaagaagagaagctgaggacctccaggtgggccaggtggaactcggaggcggccctggtgcggggagcctacagcccctggcgttggaaggatcactccagaagagaggaatcgttgaacaatgctgcacgtctatctgctcactgtatcagctcgaaaattattgcaat

SEQ ID NO: 14296 - DNA, 330 bp, synthetic construct
  misc_feature 1..330: note = source = /note="Description of Artificial Sequence: Synthetic coding sequence"
  source 1..330: mol_type = other DNA
atggcactctggatgaggttgttacccctgctagcccttctggctctgtggggcccagatcccgctgcagctttcgtcaaccaacacctctgtggaagtcacttggtggaagccctctatcttgtgtgcggcgagagaggatttttttacaccccaaagacacggcgggaggctgaggacctgcaagtggggcaagtggagcttggcggcggccctggtgctggtagcctgcaaccactagccttagagggctctctgcagaagcggggcatcgttgagcagtgctgcacctctatctgctcgctgtatcagcttgaaaactattgcaat

SEQ ID NO: 14297 - DNA, 330 bp, synthetic construct
  misc_feature 1..330: note = source = /note="Description of Artificial Sequence: Synthetic coding sequence"
  source 1..330: mol_type = other DNA
atggctctctggatgcgactcctgcccctgctagcccttctggccttgtggggccctgaccccgctgcagcgttcgtgaaccagcacctctgcggctcacacctagtggaggctctttacctcgtctgcggtgagcgcggtttcttttatacacctaagactagacgggaggctgaggacctgcaggtgggtcaggttgaactcgggggcggtcccggagccgggtcactccagccactcgcactggagggatccctgcagaaacgcgggatcgtggagcagtgctgtacttccatctgtagtctctatcaactcgaaaattactgcaac

SEQ ID NO: 14298 - DNA, 330 bp, synthetic construct
  misc_feature 1..330: note = source = /note="Description of Artificial Sequence: Synthetic coding sequence"
  source 1..330: mol_type = other DNA
atggctttgtggatgagactgctccccctcctggccctcctggctctgtggggccccgaccccgctgcggcctttgtgaaccagcatctctgcggctcacacttagtcgaggccttgtatctggtttgcggcgagcggggttttttttacactcctaaaactcgccgggaagccgaggacctccaagtgggtcaggtggaactcggtgggggccccggggcgggctccttgcagcctttggctctcgaggggagtctgcagaagcgcggaattgtcgagcagtgctgcacaagcatatgctccctatatcagttagagaattactgcaac

SEQ ID NO: 14299 - DNA, 330 bp, synthetic construct
  misc_feature 1..330: note = source = /note="Description of Artificial Sequence: Synthetic coding sequence"
  source 1..330: mol_type = other DNA
atggccctctggatgcggttgctgccgctcttggcacttctcgccctctggggcccggacccagcagcggccttcgtgaaccagcatctgtgcggatcacatctggtcgaggcgctgtacctggtgtgcggggagcgcggattcttctacacccctaagactcgcagggaagcagaggacctgcaggtgggtcaggtggagctggggggcggacctggagcgggatcactccaacctcttgccttggagggatctcttcagaagcggggaatcgtggaacaatgctgcacttcgatttgctccctttaccaactggaaaactactgcaat

SEQ ID NO: 14300 - DNA, 330 bp, synthetic construct
  misc_feature 1..330: note = source = /note="Description of Artificial Sequence: Synthetic coding sequence"
  source 1..330: mol_type = other DNA
atggccctttggatgcgcctgcttccacttctggcgctcctggcactgtgggggccagaccctgccgccgcatttgtgaaccagcatctctgcgggtcccacctggtcgaagccctttacctggtgtgtggagagcggggtttcttttacacgcccaaaactcgtagggaagcagaggatctgcaagtcggacaggtggaactcggtggaggcccgggtgcaggtagtttgcaacctttggcgctggaaggctccctccagaagcgaggaatcgttgaacaatgctgtacctctatttgcagcctctaccaattggagaactactgtaat

SEQ ID NO: 14301 - DNA, 330 bp, synthetic construct
  misc_feature 1..330: note = source = /note="Description of Artificial Sequence: Synthetic coding sequence"
  source 1..330: mol_type = other DNA
atggccctgtggatgcgcctgctgcccctgttagctctgttagccctctgggggccagaccccgcagccgcatttgtaaaccagcacctgtgcggttcacatcttgtggaagcactctatctggtatgcggagagcgaggcttcttttacactccaaagacgcggcgggaggctgaggacctgcaagtaggccaagtcgaactcggtggcgggcccggggccggtagcttacagccactcgctctagaagggtctctacagaaacgaggcattgtggaacaatgctgtacgtccatctgcagcctctatcaactcgagaattactgtaac

SEQ ID NO: 14302 - DNA, 330 bp, synthetic construct
  misc_feature 1..330: note = source = /note="Description of Artificial Sequence: Synthetic coding sequence"
  source 1..330: mol_type = other DNA
atggctctgtggatgcgccttctccctctcctcgctttgcttgctctctggggccccgatccagccgccgcttttgtcaaccaacacctgtgcggctcccatctggtggaagctttgtatctcgtatgcggcgaacgtgggttcttttatactcccaaaacacggcgtgaggctgaggacttgcaggtcggacaggtcgagctcggtggggggccgggggccggttccctgcagccgctggccctcgaggggtccctgcagaagaggggaatcgtggagcagtgttgtaccagtatatgttcactataccagctggaaaattactgcaac

SEQ ID NO: 14303 - DNA, 330 bp, synthetic construct
  misc_feature 1..330: note = source = /note="Description of Artificial Sequence: Synthetic coding sequence"
  source 1..330: mol_type = other DNA
atggccctgtggatgcgtctgctgccgcttctcgcactcctggcactgtggggtccagaccctgcagcagccttcgttaatcagcatctgtgcgggtcccacctggtggaagcattgtatctcgtgtgtggagaacgaggttttttctacaccccaaagactcggcgcgaggcggaggacctgcaggtgggtcaggtcgaacttgggggtggcccgggagccggttcacttcagcccctggcgttggagggatcccttcaaaagaggggcattgtggagcaatgctgtacttcgatttgcagcctttaccagcttgagaattactgcaat

SEQ ID NO: 14304 - DNA, 330 bp, synthetic construct
  misc_feature 1..330: note = source = /note="Description of Artificial Sequence: Synthetic coding sequence"
  source 1..330: mol_type = other DNA
atggccctttggatgcgtttgcttccgctgctggctctcctcgcattgtggggacccgatccggcggccgcttttgtaaaccaacatctctgtggttctcatctagtggaagcgctgtatcttgtctgtggtgagagaggtttcttttatacacctaagacaagacgagaagcggaagatctccaagtaggtcaggttgaactcggtgggggcccgggagctgggagcttgcaacctttggccctagaaggctcactacaaaaacgcggtatcgtagaacagtgctgtacaagcatttgttcattgtaccaactggaaaactattgtaac

SEQ ID NO: 14305 - DNA, 330 bp, synthetic construct
  misc_feature 1..330: note = source = /note="Description of Artificial Sequence: Synthetic coding sequence"
  source 1..330: mol_type = other DNA
atggccttgtggatgcgactgcttcccctgctggcacttctcgcgctatggggacctgacccggccgccgctttcgttaaccagcatctgtgtggtagtcaccttgttgaagccctttacctcgtgtgtggtgagcgcggttttttctacactcctaagacccgcagggaggccgaggacctgcaggtgggtcaggtcgagctcggcggaggccctggtgccggctccttgcagcccctggcccttgagggttcgctgcagaagcggggtattgttgaacaatgctgcacttcgatctgcagcctgtatcagctcgagaactactgtaac

SEQ ID NO: 14306 - DNA, 330 bp, synthetic construct
  misc_feature 1..330: note = source = /note="Description of Artificial Sequence: Synthetic coding sequence"
  source 1..330: mol_type = other DNA
atggctttgtggatgaggctcttgccgctgctggcgctcttggccctgtggggacccgatccagcggcggccttcgttaaccagcatctgtgcggctcccacctagttgaagcgttgtaccttgtttgtggcgagcgcggcttcttttacacccccaagacccgccgggaagcggaagatctccaggtaggacaggtggaacttggcggaggcccgggagcgggcagccttcagccactggccctggagggctcccttcagaaacggggaatcgtcgagcagtgttgtacgtctatatgtagtctgtaccagctggaaaactactgcaac

SEQ ID NO: 14307 - DNA, 330 bp, synthetic construct
  misc_feature 1..330: note = source = /note="Description of Artificial Sequence: Synthetic coding sequence"
  source 1..330: mol_type = other DNA
atggccctttggatgcgccttctgccgcttttggcacttctggcactgtggggtccagatcccgcagcagcgtttgtgaatcaacacctgtgtggatcacacctcgtggaagcactgtacctcgtgtgtggggaacgaggctttttctatacccctaaaactagaagagaagcagaggacctccaggtcggccaggtggaactcggagggggaccaggagcaggatcccttcagcctctcgccctggaggggtccctgcaaaagagaggcatagtggaacagtgttgtacttcgatctgtagcttgtaccagctcgaaaactactgtaac

SEQ ID NO: 14308 - DNA, 330 bp, synthetic construct
  misc_feature 1..330: note = source = /note="Description of Artificial Sequence: Synthetic coding sequence"
  source 1..330: mol_type = other DNA
atggcactctggatgcggctgttgcctctgctggccctgcttgccttgtgggggcccgacccggcggctgccttcgtgaatcagcatctgtgcggatcccatctggtggaggccctctacctggtgtgcggagaaaggggcttcttttacaccccaaagactagaagagaagcggaggatctccaagtcggacaggttgagctgggcggaggcccgggggccggatcattgcagccgctggctttggaaggttcactccaaaagcggggcatcgtcgaacaatgctgcacttcgatctgctccctttaccaattggaaaactactgcaac

SEQ ID NO: 14309 - DNA, 330 bp, synthetic construct
  misc_feature 1..330: note = source = /note="Description of Artificial Sequence: Synthetic coding sequence"
  source 1..330: mol_type = other DNA
atggccttgtggatgagactgctccccctccttgctcttctggcgctctggggacccgaccctgccgcagcatttgtgaaccagcatctctgtggctctcacttggtggaggccctctatcttgtgtgtggtgaacggggcttcttctacacaccaaagaccaggcgcgaagcagaggatctgcaagtgggccaagttgaacttggtgggggacccggcgccggcagtctgcagcccctcgcgctggagggcagtcttcaaaaacgcgggattgtagagcaatgctgtacgagtatctgcagtctctaccagctggaaaactattgcaat

SEQ ID NO: 14310 - DNA, 330 bp, synthetic construct
  misc_feature 1..330: note = source = /note="Description of Artificial Sequence: Synthetic coding sequence"
  source 1..330: mol_type = other DNA
atggcgctgtggatgaggctgctgccccttctggccctcctcgctctgtggggtccagaccccgcagccgcgttcgttaaccagcatttgtgcggctcccacttggtcgaagcactgtacctggtctgcggggaacgggggttcttctatacacccaaaacaagacgggaagctgaggacctgcaggtggggcaagtggagctgggcggaggaccgggagctggatcactgcaacccctggccctcgaaggaagtctgcaaaaaagaggtattgtggagcagtgctgcacaagtatctgctccctgtaccagctcgaaaactactgcaac

SEQ ID NO: 14311 - DNA, 330 bp, synthetic construct
  misc_feature 1..330: note = source = /note="Description of Artificial Sequence: Synthetic coding sequence"
  source 1..330: mol_type = other DNA
atggccctttggatgagactgctgcctttgctagccttgctggctctctggggccctgacccggccgcagccttcgtaaaccaacacttatgtggatctcatcttgtggaggcactgtacctagtatgtggcgaacgaggattcttctatacacccaagactagacgagaagctgaggacctgcaggtcggccaggtggagctcggggggggacccggagcaggaagtctgcagcccctcgctctagaaggctctctccaaaagcggggcatcgtggagcagtgttgtaccagtatctgttcgttgtaccagttggagaattattgcaac

SEQ ID NO: 14312 - DNA, 330 bp, synthetic construct
  misc_feature 1..330: note = source = /note="Description of Artificial Sequence: Synthetic coding sequence"
  source 1..330: mol_type = other DNA
atggctttgtggatgcggctcttgcccctgctcgcactgctcgccctgtggggacctgacccagctgctgctttcgttaatcagcacctttgtgggtcccacctcgtggaggcactttatctcgtgtgcggggaacgcgggttcttctacacacctaaaactcggagggaggccgaggacctgcaagtgggtcaggtggaacttgggggaggaccgggcgcagggagccttcagcccctcgcattagaaggaagcctgcagaagcggggaatcgtcgagcagtgctgcacctccatctgcagtttatatcagctggaaaattattgcaac

SEQ ID NO: 14313 - DNA, 330 bp, synthetic construct
  misc_feature 1..330: note = source = /note="Description of Artificial Sequence: Synthetic coding sequence"
  source 1..330: mol_type = other DNA
atggcactctggatgcgcctgctgccgctcttggccctgctcgccctctggggtccagatccggcagcagcatttgttaatcaacacctctgcggatcgcatctggtggaagcgctttacctggtctgcggagagaggggattcttttacactcccaagacgcgcagagaggcggaggacctccaggtgggacaagtggaactggggggtggcccgggagcgggctcgcttcagccactggcactggaaggtagcttgcaaaagcgaggaattgtggaacagtgctgcaccagcatctgctcactgtaccagctcgagaattactgcaac

SEQ ID NO: 14314 - DNA, 330 bp, synthetic construct
  misc_feature 1..330: note = source = /note="Description of Artificial Sequence: Synthetic coding sequence"
  source 1..330: mol_type = other DNA
atggccctttggatgcgtctcttgccacttctggcgttgcttgcactgtggggaccggaccctgcagcagccttcgtgaaccagcatttgtgtggttcccacctggtggaggcactctaccttgtgtgcggagaacgcggttttttctacactccaaaaaccaggcgcgaagccgaagatctgcaggtgggacaggtggaactgggtggtgggcccggtgcggggtcactgcaacctctcgccctggaagggtcacttcaaaagaggggtattgtcgaacaatgttgtacttcaatttgctcgctgtaccagctggagaattactgcaac

SEQ ID NO: 14315 - DNA, 330 bp, synthetic construct
  misc_feature 1..330: note = source = /note="Description of Artificial Sequence: Synthetic coding sequence"
  source 1..330: mol_type = other DNA
atggccctgtggatgcgacttctgccactgctggccctgctggccctgtggggtcccgatcccgccgctgccttcgtcaatcagcatctttgcggttcccatctcgtagaagccctctatctggtttgcggagagcgcgggtttttctatacccccaagactcggcgggaggccgaggatctgcaggtggggcaggtagaactcggtggcggaccgggcgccggatccctgcagcctctggcattggaggggagcttgcagaagagggggatcgtggaacaatgctgcacctctatctgcagcttgtatcagctggaaaactattgtaac

SEQ ID NO: 14316 - DNA, 330 bp, synthetic construct
  misc_feature 1..330: note = source = /note="Description of Artificial Sequence: Synthetic coding sequence"
  source 1..330: mol_type = other DNA
atggcactttggatgcgcctgcttcctctgctcgcactccttgccttgtggggtccagacccggcggcagcttttgtgaatcagcatctttgcggttcacacctcgtcgaggcactttatctggtctgtggtgaaagaggatttttctacacccccaagactagaagggaagcagaagatctccaagttggacaagtggaattgggcggagggccaggtgcaggatcgttgcagcctcttgcactggaggggtccttgcaaaaaaggggcatcgtggagcaatgctgtacgtcgatttgtagcctttaccagttggaaaactactgtaac

SEQ ID NO: 14317 - DNA, 330 bp, synthetic construct
  misc_feature 1..330: note = source = /note="Description of Artificial Sequence: Synthetic coding sequence"
  source 1..330: mol_type = other DNA
atggctctgtggatgcggttattgcccctcttagcattgttggctctgtggggacccgatccggccgcggcttttgtaaaccagcacctgtgtgggtcgcacttggtcgaggctctttacctcgtgtgcggcgaaagaggattcttttataccccaaagaccaggagggaagctgaagatctgcaggttggtcaggtggagcttggaggaggtcctggcgccggcagtctgcagcctctcgcattggaagggagcctccagaaacgcgggatcgtggagcagtgttgtaccagtatatgctctttgtaccagctcgaaaattattgcaat

SEQ ID NO: 14318 - DNA, 330 bp, synthetic construct
  misc_feature 1..330: note = source = /note="Description of Artificial Sequence: Synthetic coding sequence"
  source 1..330: mol_type = other DNA
atggcactgtggatgagactgctgcccctattggccctgctggccctctggggaccagaccccgcagccgcttttgtgaaccagcacctgtgtgggtcccatctggtggaagccctgtatctcgtgtgcggcgaaagggggtttttttatacacccaagactaggagagaggcagaggatctgcaagtgggccaggtggagctaggagggggtcctggagccggctccttgcaacctctcgctttggagggtagcctgcagaagcgaggaatcgttgaacagtgttgcacttccatctgcagcctataccagctggagaactattgcaac

SEQ ID NO: 14319 - DNA, 330 bp, synthetic construct
  misc_feature 1..330: note = source = /note="Description of Artificial Sequence: Synthetic coding sequence"
  source 1..330: mol_type = other DNA
atggccctgtggatgagactgctgcctctgctggcgctcctcgctctgtggggtccggaccccgcagctgcctttgttaatcagcacctctgtgggagtcacctggttgaggctctgtacttggtctgcggtgagagggggttcttttacacgcctaaaaccaggcgtgaagccgaggatctacaggtgggtcaggtagagctcggtggtggtccgggggccggtagcctgcagccactggccctggaaggcagcctgcagaagcgtggcattgttgagcagtgctgtaccagcatctgcagcctatatcaactagagaattactgcaac

SEQ ID NO: 14320 - DNA, 330 bp, synthetic construct
  misc_feature 1..330: note = source = /note="Description of Artificial Sequence: Synthetic coding sequence"
  source 1..330: mol_type = other DNA
atggcattatggatgcgacttttaccattacttgctttacttgcattatggggtccagatccagcagcagcatttgttaatcagcatctttgtggtagtcatcttgttgaagcactttatttagtttgtggagaacgaggttttttttacacaccaaaaactagaagagaagctgaagatcttcaagtcggacaagttgaattaggtggtggtcctggagctggttcattacaacctttagctttagaaggatctcttcaaaagcgtggaattgtagaacaatgttgtactagtatttgtagtttatatcaattagaaaattattgcaat

SEQ ID NO: 14321 - DNA, 330 bp, synthetic construct
  misc_feature 1..330: note = source = /note="Description of Artificial Sequence: Synthetic coding sequence"
  source 1..330: mol_type = other DNA
atggccctgtggatgcggttgctgcctctgctggcgctgctggcactctgggggcctgaccctgcagccgcgttcgtaaatcagcacctctgcggcagccatttggttgaagctctttacttggtgtgtggggaacggggcttcttttatacacctaagaccagaagggaggctgaggatctccaggtgggacaggtggagctaggaggcggtccgggtgcaggatcactccaacccctagctctcgagggctccctgcagaaacgaggcattgtcgaacagtgttgcacgtccatctgttcgttatatcagctcgagaattactgtaat

SEQ ID NO: 14322 - DNA, 330 bp, synthetic construct
  misc_feature 1..330: note = source = /note="Description of Artificial Sequence: Synthetic coding sequence"
  source 1..330: mol_type = other DNA
atggctctgtggatgcgactgctgcctttgcttgcgctgctcgcgctctggggaccggatccggcagccgcattcgtgaaccagcatctgtgtgggagccatctcgtggaagcgctctacctggtctgtggagaacgcggatttttctacacgcctaagactagacgggaagctgaagatctccaggtgggacaagtggaactcggaggcgggccaggagctggcagcctccagccgctggcgcttgagggatccttgcagaaacggggtatcgtcgaacagtgctgcacctcgatctgctcgctgtaccaactggagaattactgcaat

SEQ ID NO: 14323 - DNA, 330 bp, synthetic construct
  misc_feature 1..330: note = source = /note="Description of Artificial Sequence: Synthetic coding sequence"
  source 1..330: mol_type = other DNA
atggcgttgtggatgagactgcttccccttctcgcgttgctggcattgtgggggccggatcccgcggccgcgttcgtcaaccagcacctgtgcggttcccacttggtggaagcgctgtacctggtgtgtggcgagcggggcttcttctacaccccaaaaactcgcagagaggctgaggacctgcaggtgggccaggtggagctgggtggagggccaggagcgggatcattgcaacctctggccctggagggctcgcttcaaaagcggggcatcgtcgaacagtgttgcacttcgatctgtagcctgtaccaacttgagaattactgcaat

SEQ ID NO: 14324 - DNA, 330 bp, synthetic construct
  misc_feature 1..330: note = source = /note="Description of Artificial Sequence: Synthetic coding sequence"
  source 1..330: mol_type = other DNA
atggccctttggatgcggctccttcccctcctggccttactcgctctgtggggacctgatccagccgcagccttcgtcaatcaacacctgtgcggctcccatctggtggaggctttatatcttgtatgcggcgaaagaggatttttttacacccctaagacgcggcgcgaagccgaggacctgcaggtcggtcaggtggaattaggcggcggtccaggtgccggctccctgcagcccctcgcactcgaagggtcgctgcagaagagaggcattgtggaacagtgctgcacatcaatttgctctctgtaccagttggaaaattattgtaat

SEQ ID NO: 14325 - DNA, 330 bp, synthetic construct
  misc_feature 1..330: note = source = /note="Description of Artificial Sequence: Synthetic coding sequence"
  source 1..330: mol_type = other DNA
atggcactgtggatgagactacttccacttttggctcttctagccttgtgggggcctgacccagctgctgccttcgtgaaccagcacctctgtggtagccacctggtagaagccctataccttgtttgcggtgagcgggggttcttctatacacccaaaactcggcgcgaggccgaagacctacaagtcggccaggtggaacttggcgggggtccaggggctggctcccttcagccgttagctctggaagggagcttgcagaagcgcggcatcgtcgagcagtgctgtacaagtatttgcagcctgtaccagctcgagaactattgtaac

SEQ ID NO: 14326 - DNA, 330 bp, synthetic construct
  misc_feature 1..330: note = source = /note="Description of Artificial Sequence: Synthetic coding sequence"
  source 1..330: mol_type = other DNA
atggcactctggatgagactgctgcctctcttagccctgttagccctgtgggggcctgaccccgctgccgcctttgttaatcagcacctatgtggctcccatttagtcgaagcgctatatctggtgtgtggtgagagaggctttttttatacccccaagactagacgtgaggccgaagacttgcaggtggggcaggtagagttaggcggaggacctggggccggttctctccagccactcgcactggaggggtccctgcaaaaaagaggcatagttgaacaatgttgcacttcaatatgtagcttgtatcaacttgagaattattgcaat

SEQ ID NO: 14327 - DNA, 330 bp, synthetic construct
  misc_feature 1..330: note = source = /note="Description of Artificial Sequence: Synthetic coding sequence"
  source 1..330: mol_type = other DNA
atggccctttggatgcgcttgctgcccttgctggctctcctggccctgtggggaccagacccggccgcggcgttcgtgaaccagcacctgtgtggaagccacctggtggaggctctttacctcgtgtgcggcgaacggggctttttctacactccaaagactcggcgggaagccgaggatctgcaggtgggccaagtggagctgggaggaggaccgggcgcaggctcactgcagccgctcgccctggagggctcgcttcagaagaggggcatcgtggaacagtgttgcacttcaatctgctccctttaccaactggagaactactgcaac

SEQ ID NO: 14328 - DNA, 330 bp, synthetic construct
  misc_feature 1..330: note = source = /note="Description of Artificial Sequence: Synthetic coding sequence"
  source 1..330: mol_type = other DNA
atggctctctggatgcgtcttctgccattgctggcattgttggccctgtggggacccgatcccgccgcagcatttgtaaaccaacatttgtgcggctctcacctggtcgaagccctgtatttggtgtgtggggaaaggggttttttctatacgcccaagactcgcagagaggccgaggatctgcaagtgggccaggtcgagctgggcggggggccgggagctggcagtctgcagccactggcattggaggggtccctccagaagaggggcatcgtcgaacagtgttgcactagtatttgcagcctttatcagttggagaattactgcaac

SEQ ID NO: 14329 - DNA, 330 bp, synthetic construct
  misc_feature 1..330: note = source = /note="Description of Artificial Sequence: Synthetic coding sequence"
  source 1..330: mol_type = other DNA
atggcactgtggatgcggctactcccattgctcgctctcctagcactgtggggacccgaccccgcagccgcgtttgtgaaccagcacctatgtggatcccatctcgtagaggctctataccttgtatgcggcgaaagaggatttttctacacccccaaaactaggcgcgaggcagaggacctgcaggtcggccaggtggaactcggaggtgggccgggggcaggttccctgcagccgttagctctggaaggctcactccagaagcggggcatcgttgaacagtgctgcacctcaatctgtagcctctaccagttagagaactactgcaat

SEQ ID NO: 14330 - DNA, 330 bp, synthetic construct
  misc_feature 1..330: note = source = /note="Description of Artificial Sequence: Synthetic coding sequence"
  source 1..330: mol_type = other DNA
atggccctctggatgcggctcctgccgctgctggccctgctcgcactgtggggaccggaccccgcggcggcgttcgtgaaccaacacctctgcggatcacatctggtggaagctctttacctcgtctgtggagaacggggatttttctacaccccaaaaacccggagagaagccgaagatctccaggtcggccaagtggaactgggcggcggaccgggggcggggtccctccagccacttgcgcttgaaggatcgctgcagaaacgcgggatcgtggaacagtgttgcacctcgatctgctcgttgtaccaacttgaaaactactgtaat

SEQ ID NO: 14331 - DNA, 330 bp, synthetic construct
  misc_feature 1..330: note = source = /note="Description of Artificial Sequence: Synthetic coding sequence"
  source 1..330: mol_type = other DNA
atggccttatggatgcggctcctgcccctgctggcattattggccctttggggccctgacccagcggctgctttcgtgaaccagcacctgtgcgggagtcacttggtggaagcactttacctggtgtgtggagaacgcgggttcttctacactccaaagaccagacgcgaagccgaggaccttcaggtgggacaggttgagctcgggggtggccccggcgccgggtcacttcagcccctggccctggagggctctcttcagaaaaggggcatagtagagcagtgctgtacatctatctgctcgctgtaccagctggagaactactgcaac

SEQ ID NO: 14332 - DNA, 330 bp, synthetic construct
  misc_feature 1..330: note = source = /note="Description of Artificial Sequence: Synthetic coding sequence"
  source 1..330: mol_type = other DNA
atggcgctctggatgaggctgctgccccttctggctctgctggccctttgggggcccgaccccgccgcagcatttgtgaaccagcacctgtgtggatcccacctggtggaggctctatacctggtttgtggagagcgggggtttttttacacccccaaaactcgccgcgaggcagaggatctacaagttggccaggtggaactcggtgggggccccggcgccgggtcactgcagcctctggcgctggagggctccctgcaaaagagagggatcgtcgagcagtgctgcacctctatctgtagcctgtatcagttggaaaactattgtaat

SEQ ID NO: 14333 - DNA, 330 bp, synthetic construct
  misc_feature 1..330: note = source = /note="Description of Artificial Sequence: Synthetic coding sequence"
  source 1..330: mol_type = other DNA
atggcgttgtggatgcgcctcctgccactgctggccctgctcgcgctctggggacccgatccggctgcagcctttgtgaatcaacacctgtgcggatcacaccttgtcgaagccctctatctggtctgcggtgagcggggattcttctacactcccaagactcgccgcgaagccgaggatctccaggtgggacaggtggaactggggggaggcccgggcgcaggatccctgcagcccctggcgttggaagggtccctgcagaaaagaggaatcgtggagcaatgttgcacctcaatctgctccttgtaccaactggagaattactgcaac

SEQ ID NO: 14334 - DNA, 330 bp, synthetic construct
  misc_feature 1..330: note = source = /note="Description of Artificial Sequence: Synthetic coding sequence"
  source 1..330: mol_type = other DNA
atggcactgtggatgcggctgttgccgctcctcgctctcctggctctgtggggaccagatccggctgcggcgttcgtgaaccaacacttgtgcggctcacacctggtggaggccctgtatctggtgtgcggggaacgcggattcttttacactccaaaaacccgacgggaagccgaggaccttcaggtcgggcaggtggaactgggcgggggcccaggagccggatcgttgcagccacttgcgctggagggatcactccagaagaggggtatcgtggagcaatgttgtacctccatctgttccctttaccaactggaaaactattgcaat

SEQ ID NO: 14335 - DNA, 330 bp, synthetic construct
  misc_feature 1..330: note = source = /note="Description of Artificial Sequence: Synthetic coding sequence"
  source 1..330: mol_type = other DNA
atggcgctttggatgagacttctgcctctgcttgcccttcttgcactttggggccctgatcccgcagcagcatttgtgaaccaacatctttgtgggtcgcatcttgtcgaagcactttaccttgtgtgtggagaacggggcttcttttacacccccaagacccgacgcgaagcagaagatcttcaggtggggcaggtcgaactcggcgggggtccaggagcagggtccctgcagcctctggccctcgaaggctccctgcaaaagagaggtattgtggagcagtgctgtacctccatctgtagcctctaccaactggaaaactactgtaat

SEQ ID NO: 14336 - DNA, 330 bp, synthetic construct
  misc_feature 1..330: note = source = /note="Description of Artificial Sequence: Synthetic coding sequence"
  source 1..330: mol_type = other DNA
atggctctgtggatgaggctgttgcccctgttggcactactggcgctctggggtcctgatccagccgctgcatttgtaaaccagcacctctgtgggtcccacctcgtggaagccttgtacctggtctgcggggagcgcgggttcttttatacccctaaaacccggagggaagctgaagatttacaggtgggccaggtggagctgggaggtgggccaggcgctggcagcttgcagcctttagccttggagggatctctgcagaagcgcggtatcgtcgagcagtgctgcacctctatctgcagtctataccagctggaaaattactgtaac

SEQ ID NO: 14337 - DNA, 330 bp, synthetic construct; identical to SEQ ID NO: 14288
  misc_feature 1..330: note = source = /note="Description of Artificial Sequence: Synthetic coding sequence"
  source 1..330: mol_type = other DNA

SEQ ID NO: 14338 - DNA, 330 bp, synthetic construct
  misc_feature 1..330: note = source = /note="Description of Artificial Sequence: Synthetic coding sequence"
  source 1..330: mol_type = other DNA
atggcactgtggatgagactgcttcctctgctggcactccttgcactgtggggaccagatccggcagcggcgttcgttaaccagcatctctgcgggtcccatctcgtcgaggcactgtaccttgtgtgcggagagaggggctttttctacactcctaaaaccagaagagaggcagaagatctgcaagtggggcaagtcgagcttggcggcggtcctggtgctggcagcctgcagccccttgcactcgaaggatcgctgcagaaacgtggaattgtcgaacaatgttgtacctccatttgttcgctttaccagctggaaaactattgtaac

SEQ ID NO: 14339 - DNA, 330 bp, synthetic construct
  misc_feature 1..330: note = source = /note="Description of Artificial Sequence: Synthetic coding sequence"
  source 1..330: mol_type = other DNA
atggccttgtggatgaggctgcttcctttgctagcattgctcgcactctggggccccgatccagccgcagcctttgtgaaccaacacctgtgcgggagccacctcgtcgaggcactttacctggtctgtggtgagagggggtttttctatactccaaaaacaagacgtgaggccgaggatctgcaggtgggccaagtcgaactggggggaggtccaggcgctgggtcccttcagcctctggcacttgagggctcactgcagaaaagaggtattgtggagcaatgctgtacttcaatctgtagtctatatcagctcgagaactactgtaat

SEQ ID NO: 14340 - DNA, 330 bp, synthetic construct
  misc_feature 1..330: note = source = /note="Description of Artificial Sequence: Synthetic coding sequence"
  source 1..330: mol_type = other DNA
atggctctgtggatgagactgctgccgcttcttgcattgcttgccctgtggggaccagaccctgccgcagcgttcgtcaaccagcatctgtgcggatcgcatctggtggaggccctgtacttggtttgtggagaacggggattcttttacaccccgaaaacccgcagagaagcggaggacctgcaagtgggacaagtggagctgggaggcggacctggtgctggctcactccagcccctcgctctggagggttccctgcagaagagaggaatcgtcgaacagtgctgtactagcatctgctcgctttaccaactggagaattactgcaac

SEQ ID NO: 14341 - DNA, 330 bp, synthetic construct
  misc_feature 1..330: note = source = /note="Description of Artificial Sequence: Synthetic coding sequence"
  source 1..330: mol_type = other DNA
atggccttatggatgcggctccttccccttttggcccttctagccctatggggacctgatcctgctgctgcttttgtaaatcagcatctctgtgggtctcatcttgttgaagctctgtaccttgtatgtggagaaagagggtttttctatacacctaagacacggcgggaagcagaagatttacaggtcggacaggtagagcttggaggaggaccgggggccggatctttgcagccactggcccttgaagggtccctccaaaaaagaggaatagttgagcagtgttgtacttcaatctgctctctctatcagttggaaaattattgcaac

SEQ ID NO: 14342 - DNA, 330 bp, synthetic construct
  misc_feature 1..330: note = source = /note="Description of Artificial Sequence: Synthetic coding sequence"
  source 1..330: mol_type = other DNA
atggcactctggatgaggttgttgccactgctcgcgctgctagcattgtggggcccggaccctgccgcagcatttgtgaatcagcatctgtgtggcagccatctggttgaagctttatatttggtttgtggggagagaggattcttctatacaccgaagacccgccgcgaggctgaggatttgcaagtgggccaggtagaactgggagggggccctggagcgggaagtctgcagcctctcgctctcgaaggatccctgcagaagagggggattgtagaacagtgctgcaccagtatctgttcactctaccagttggagaactattgcaat

SEQ ID NO: 14343 - DNA, 330 bp, synthetic construct
  misc_feature 1..330: note = source = /note="Description of Artificial Sequence: Synthetic coding sequence"
  source 1..330: mol_type = other DNA
atggccctatggatgcgtttgttgcctctgctggccctcttggcactttggggtccggaccctgctgctgccttcgtgaaccagcatctgtgtggctcacatctagttgaagctctctacttagtgtgtggcgaaaggggtttcttttataccccgaagacaaggcgagaggcagaggatctgcaggtgggtcaggtcgagctcggtggtggccccggcgcaggttcgttacagccgctggctcttgaaggtagcttgcagaaacgaggaatagtagaacagtgttgtacaagcatttgtagtctttaccagttggaaaactattgcaac

SEQ ID NO: 14344 - DNA, 330 bp, synthetic construct
  misc_feature 1..330: note = source = /note="Description of Artificial Sequence: Synthetic coding sequence"
  source 1..330: mol_type = other DNA
atggctctgtggatgcggctgcttcctctgctcgccctgctggcgctctgggggccagatccggccgcggcattcgtgaaccaacacctttgcgggtcacatcttgtggaagcactctacctcgtgtgtggagagcgcggatttttctacactcccaagacgaggcgggaggcggaggacctgcaggttggtcaagtggagttgggaggagggcctggcgccggaagcctgcaaccgctcgctctggaaggcagcttgcaaaagcggggcatcgtagaacaatgctgcacctccatctgctctctctaccagttggagaactactgtaat

SEQ ID NO: 14345 - DNA, 330 bp, synthetic construct
  misc_feature 1..330: note = source = /note="Description of Artificial Sequence: Synthetic coding sequence"
  source 1..330: mol_type = other DNA
atggccctttggatgcgcctgcttcccttgctggctctactggccctgtgggggcctgaccccgctgccgccttcgtgaatcagcacttgtgcggtagtcatctggtggaagcactatatctggtctgcggcgagagaggcttcttctacacccctaagacacggagggaggcagaggacttgcaggtgggacaggtggagctaggcggtgggccaggggctggttctcttcagcccctcgcccttgagggaagcctccagaagcgcgggatcgtggagcagtgctgtacctcaatatgctccctgtatcaactcgagaattactgcaac

SEQ ID NO: 14346 - DNA, 330 bp, synthetic construct
  misc_feature 1..330: note = source = /note="Description of Artificial Sequence: Synthetic coding sequence"
  source 1..330: mol_type = other DNA
atggcgctatggatgcgactattaccgctattagcgctactagcgttatggggtccggatccggcggcggcgtttgttaatcaacatttatgtggttcgcatttagttgaagcgctatatctagtttgtggtgaacgtggttttttttatacgccgaaaacgcgacgagaagcggaagatttacaagtaggtcaagtagaattaggtggtggtccgggtgcgggttcgttacaaccgctagcgctagaaggttcgctacaaaaacgaggtatagttgaacaatgttgtacgtcgatatgttcgctatatcaattagaaaattattgtaat

SEQ ID NO: 14347 - DNA, 330 bp, synthetic construct
  misc_feature 1..330: note = source = /note="Description of Artificial Sequence: Synthetic coding sequence"
  source 1..330: mol_type = other DNA
atggctctgtggatgaggcttctgccgctgttggccttactggctctgtggggccccgaccccgctgccgcattcgtgaatcagcatttatgcggctctcacctggtggaggccctgtatcttgtgtgtggtgagcggggcttcttctacacccccaagactcggcgtgaggcagaagacctgcaagtgggccaggtggaactgggtggaggccccggagctggatccctacagcccctggccttagagggcagccttcagaagcgcggcatcgtggagcagtgttgtaccagtatttgctccctataccaattggagaactactgcaac

SEQ ID NO: 14348 - DNA, 330 bp, synthetic construct
  misc_feature 1..330: note = source = /note="Description of Artificial Sequence: Synthetic coding sequence"
  source 1..330: mol_type = other DNA
atggctctttggatgaggctgcttccactcctggctcttttggcgttgtggggacccgacccagccgcagcctttgtaaaccagcacctatgtgggtcccacctggtggaggctctgtatctggtgtgtggtgaaagaggctttttttacacccccaagacacggcgtgaagcagaagatctccaggttggccaagtcgagctgggcggtggaccaggagccggatcgctccagccactagccctggaaggcagtctccagaaacgtggaatcgttgagcaatgttgcacttcgatctgctccctgtaccaattagaaaactattgcaac

SEQ ID NO: 14349 - DNA, 330 bp, synthetic construct
  misc_feature 1..330: note = source = /note="Description of Artificial Sequence: Synthetic coding sequence"
  source 1..330: mol_type = other DNA
atggcactgtggatgcggctgctgccgctgctggcgttgcttgcgctttggggccctgatcctgccgcagcttttgtgaatcagcatctctgcggttcgcacttggtggaagctctttacctcgtctgcggcgaaagaggattcttctacactcctaagaccaggcgcgaagcagaggacctccaagtcggccaagtggaactcggtgggggaccaggggccggatcgctgcagccactggcccttgagggttccctgcaaaaacgcggtatcgtagagcagtgctgtaccagcatctgttccctctaccagctggaaaactattgtaac

SEQ ID NO: 14350 - DNA, 330 bp, synthetic construct
  misc_feature 1..330: note = source = /note="Description of Artificial Sequence: Synthetic coding sequence"
  source 1..330: mol_type = other DNA
atggctctgtggatgagacttctgccgctgctggcactgctcgcgctgtggggtcccgatcctgcagcagccttcgtgaatcaacacttgtgtggttcacatctggttgaggccttgtacctggtgtgcggagagaggggctttttctacacgcctaaaaccaggcgtgaagcagaagatttgcaggtcggtcaagtggaacttggtggtggaccaggtgcaggcagccttcaacctcttgcactggagggctcccttcagaagaggggcatagtggagcaatgttgtacttcaatttgctcgctttaccaactcgagaactactgtaac

SEQ ID NO: 14351 - DNA, 330 bp, synthetic construct
  misc_feature 1..330: note = source = /note="Description of Artificial Sequence: Synthetic coding sequence"
  source 1..330: mol_type = other DNA
atggccctgtggatgcgtctgctgccactgctggccctcctggccttatggggacccgatcctgcagccgcctttgtgaaccaacatttgtgcgggtcacacctcgtggaggctctataccttgtgtgtggcgagagagggttcttctatacgccgaaaaccaggagagaggctgaggatcttcaggtgggacaggtggaacttggtggaggcccaggcgccgggagtctccagccactagctctggaaggctctctgcagaaacggggcatcgtcgagcagtgctgtacctcaatttgttccctttatcaattagagaactattgtaat

SEQ ID NO: 14352 - DNA, 330 bp, synthetic construct
  misc_feature 1..330: note = source = /note="Description of Artificial Sequence: Synthetic coding sequence"
  source 1..330: mol_type = other DNA
atggctctgtggatgagactgctgcctctgctcgcactgctcgccctttgggggccggacccagcggcggcattcgtgaaccagcatctctgcgggtcccatttggtcgaggccctgtacttggtgtgcggagaacgaggcttcttttacaccccgaaaaccaggcgggaagcagaagatttgcaagtcggacaggtggaactcggaggcggcccgggagcaggatcgctccagcccctggctttggagggatctctccaaaagcgcggcatcgtggaacagtgctgcacgagcatctgttcactgtaccaactggagaactactgcaat

SEQ ID NO: 14353 - DNA, 330 bp, synthetic construct
  misc_feature 1..330: note = source = /note="Description of Artificial Sequence: Synthetic coding sequence"
  source 1..330: mol_type = other DNA
atggctttgtggatgagacttctccccctcttggctctgctggcattgtggggacccgaccccgctgcagcttttgtcaaccaacatctgtgcggctcacacctcgttgaggccctgtatcttgtgtgcggtgagcgtggttttttttatactcccaaaacccgtagagaggccgaggatttgcaggtgggtcaagtggaactgggtggcggacctggtgctggctctttgcagccactggcactggagggtagtctgcaaaaaagaggcatcgttgagcagtgttgcacaagcatttgcagtttgtatcagcttgagaattattgcaac

SEQ ID NO: 14354 - DNA, 330 bp, synthetic construct
  misc_feature 1..330: note = source = /note="Description of Artificial Sequence: Synthetic coding sequence"
  source 1..330: mol_type = other DNA
atggccctctggatgcgcttgcttcccctcctggcacttcttgccctgtggggacccgatcctgctgccgcatttgtaaaccaacacctctgtggatcgcatctcgtcgaagcgctgtaccttgtttgcggagaaagaggtttcttttacactccaaaaaccagacgcgaagcggaagatcttcaagtcggacaggtggagctcgggggtggacccggtgcaggttcattgcaacctctggcacttgaaggatccctgcagaagcggggcatcgtggagcaatgttgcacgagcatttgttctctctaccagctcgaaaactactgtaat

SEQ ID NO: 14355 - DNA, 330 bp, synthetic construct
  misc_feature 1..330: note = source = /note="Description of Artificial Sequence: Synthetic coding sequence"
  source 1..330: mol_type = other DNA
atggccctgtggatgagactcctccctctgttggcacttctggccctctggggccctgatcccgcagctgcttttgttaaccagcacctgtgcgggtcccacctggtcgaggctctttatctcgtttgcggggaacggggcttcttttatacacccaagaccagacgggaagccgaagacctccaagtcggtcaggtcgagctaggcggcggccccggcgctggcagtctgcaaccacttgctctggaaggctcacttcagaagcgcggaatcgtggagcagtgctgtaccagcatctgttcgctgtaccagctcgaaaactattgtaac

SEQ ID NO: 14356 - DNA, 330 bp, synthetic construct
  misc_feature 1..330: note = source = /note="Description of Artificial Sequence: Synthetic coding sequence"
  source 1..330: mol_type = other DNA
atggcgctgtggatgaggctgcttccgttgcttgcacttttggcattgtgggggcctgatcctgcggccgcatttgtcaatcagcatctctgtggctctcacctcgtcgaagcactttacctggtgtgtggagaacgcgggttcttctatactcccaagaccaggagagaggccgaggatcttcaggtgggacaagtggaactcggaggcggtccaggagcggggtcgcttcaaccactcgcactcgaaggatcactgcaaaaacggggtatcgtcgagcagtgctgcacttctatttgctccctttaccaacttgaaaactactgtaac

SEQ ID NO: 14357 - DNA, 330 bp, synthetic construct
  misc_feature 1..330: note = source = /note="Description of Artificial Sequence: Synthetic coding sequence"
  source 1..330: mol_type = other DNA
atggccctttggatgaggctactgccgctcctagcactcctggctttgtggggacctgaccccgcagccgcgtttgtcaaccaacacctttgcggcagccacctcgttgaggcgctgtatttggtgtgtggagagagagggttcttctatactccaaagaccaggagagaggcagaagacctgcaggtaggacaggtggagcttgggggaggcccgggcgcagggtcactacagcctttggcactggagggcagcctgcagaaaagggggattgtcgagcagtgctgcacgagcatttgtagtctgtatcagctggagaattattgcaac

SEQ ID NO: 14358 - DNA, 330 bp, synthetic construct
  misc_feature 1..330: note = source = /note="Description of Artificial Sequence: Synthetic coding sequence"
  source 1..330: mol_type = other DNA
atggcgctgtggatgaggcttctcccgctgctggcattgctggccctctggggaccggacccagcagccgcattcgtgaatcaacatctctgcggttcccacttggttgaggccctttaccttgtctgtggagaacgtggctttttctatacccctaaaactaggcgtgaggccgaggatttgcaggtaggccaagtcgaactcggaggtggtcccggagcaggctccctgcagcctctggccctcgagggatcgctccaaaagagaggtattgtggaacagtgttgcacctcgatctgtagcctgtaccagcttgaaaactactgtaac

SEQ ID NO: 14359 - DNA, 330 bp, synthetic construct
  misc_feature 1..330: note = source = /note="Description of Artificial Sequence: Synthetic coding sequence"
  source 1..330: mol_type = other DNA
atggcgctgtggatgagactgctgccactgctcgccctgctggcgctgtggggaccagacccagcagccgcattcgtgaaccagcatttgtgcggatcgcacctcgtggaagcactttatctggtgtgcggggagcggggattcttctacactccgaaaactaggagagaagccgaagacctccaagtcggacaggtggagttgggaggcggccctggggccggttcactccaaccactcgcgctggagggttctttgcagaagagaggcatcgtcgagcaatgctgcacttcaatttgctccttgtaccagctcgagaactactgtaat

SEQ ID NO: 14360 - DNA, 330 bp, synthetic construct
  misc_feature 1..330: note = source = /note="Description of Artificial Sequence: Synthetic coding sequence"
  source 1..330: mol_type = other DNA
atggcattatggatgcggctgttaccgctgttggccctgctggctctgtggggaccagacccagccgctgctttcgtgaatcaacacctctgcggctctcacttagtagaagcactgtatttagtttgcggagaaaggggattcttctacacaccaaagactcgtagagaggccgaagatctgcaggtgggtcaggtggagttaggaggtggcccaggtgctggttccctccagccattggctctggaggggtccctacagaagcgtgggattgtagaacagtgctgcacctcaatttgttctctgtatcagctagagaactactgcaat

SEQ ID NO: 14361 - DNA, 330 bp, synthetic construct
  misc_feature 1..330: note = source = /note="Description of Artificial Sequence: Synthetic coding sequence"
  source 1..330: mol_type = other DNA
atggcgctctggatgcgccttctcccgctgcttgcgttgctcgcattgtggggacctgacccggccgcagcttttgtcaaccaacatctttgcggatctcacctcgtggaggccttgtacctggtgtgtggcgaaagaggttttttctataccccaaagactagaagggaagcagaagatctccaagtgggtcaagtggaactgggaggcgggccgggagcaggatccctgcagccacttgccctcgaaggctcgcttcagaagcggggaattgtcgagcagtgctgtacctcgatctgttccttgtaccaactcgagaattactgcaac

SEQ ID NO: 14362 - DNA, 330 bp, synthetic construct
  misc_feature 1..330: note = source = /note="Description of Artificial Sequence: Synthetic coding sequence"
  source 1..330: mol_type = other DNA
atggcgctgtggatgcggctactgccactcctggcccttcttgcactgtggggtcccgacccagcggcagcattcgtgaaccaacacctatgcgggtcgcacttagttgaagcactatatctggtgtgcggcgaacggggcttcttctatactcctaaaacaaggcgagaggcggaagaccttcaggtgggacaagtggaacttggaggtggtccaggcgccggtagtcttcagccattagcgctagaaggttcacttcagaagcgtgggatcgtcgaacagtgctgcaccagtatctgctcactgtatcagttggagaattactgcaat

SEQ ID NO: 14363 - DNA, 330 bp, synthetic construct
  misc_feature 1..330: note = source = /note="Description of Artificial Sequence: Synthetic coding sequence"
  source 1..330: mol_type = other DNA
atggcgctctggatgcggctgcttcctcttctcgcactcctcgcgctttggggaccggacccagcagctgccttcgtcaaccagcatctgtgtggttcccacctggtggaagctctctatctggtgtgtggggaacgggggtttttctacactcccaagacccgaagggaagctgaggatttgcaagtgggccaagtcgagctgggaggtggtcctggagcaggttcgcttcaacccctcgcactggagggatctttgcagaaacgcgggatcgtggaacaatgctgtacgagcatttgctcactttaccagcttgaaaactactgtaac

SEQ ID NO: 14364 - DNA, 330 bp, synthetic construct
  misc_feature 1..330: note = source = /note="Description of Artificial Sequence: Synthetic coding sequence"
  source 1..330: mol_type = other DNA
atggcactgtggatgaggctgctgcctcttctcgccctcctggctctctggggtccggaccccgcagccgcctttgtgaaccagcatctttgtggctctcatttggtcgaggcgctttacctcgtgtgtggcgaacgaggattcttctatacccccaaaacaaggagggaagctgaggacctccaggtcggtcaagtagagcttgggggtgggccaggcgccgggagcttacagccactggctttagagggatccctgcaaaaaagaggaatcgtggaacagtgttgcacgtccatatgttcactgtatcagttagaaaattactgtaac

SEQ ID NO: 14365 - DNA, 330 bp, synthetic construct
  misc_feature 1..330: note = source = /note="Description of Artificial Sequence: Synthetic coding sequence"
  source 1..330: mol_type = other DNA
atggcactgtggatgcgcctcctgccgcttctcgcactgctggcactttggggacccgatcctgcagcagcctttgtgaaccaacacctctgtggatcacaccttgtggaggcgctctaccttgtctgtggtgaacggggattcttctacacccctaagacccgacgggaagcggaagatttgcaagtcggacaagtggaacttgggggcggtccaggcgctggaagcctgcaacctcttgcattggagggatcactccagaagagaggtatcgtcgaacaatgctgtaccagcatctgctccctgtaccaacttgaaaactactgtaac

SEQ ID NO: 14366 - DNA, 330 bp, synthetic construct
  misc_feature 1..330: note = source = /note="Description of Artificial Sequence: Synthetic coding sequence"
  source 1..330: mol_type = other DNA
atggcattgtggatgaggcttttgcctctgctcgccctcttagcgctctggggccctgatcctgctgctgctttcgttaatcagcacttgtgcggctcccatctcgtcgaggctctgtaccttgtgtgtggggagcggggcttcttttatacgccaaaaacaagacgggaggcagaggacttacaagttggccaggtagagctcggaggcggacccggggccggtagtctacagcctctggccctggagggctccctccagaaacgcgggatcgttgagcagtgttgcacatcgatatgctcactctatcagctagagaattactgcaac

SEQ ID NO: 14367 - DNA, 330 bp, synthetic construct
  misc_feature 1..330: note = source = /note="Description of Artificial Sequence: Synthetic coding sequence"
  source 1..330: mol_type = other DNA
atggcactgtggatgcgtttactaccacttcttgcgcttttggcgctctggggaccagatccagctgctgcctttgtaaaccagcatctctgtggatcacatctagtcgaagctctttatttagtctgtggagagagaggatttttttatacaccgaaaacacgtagagaagcagaagatttacaggttggacaagttgagttaggagggggaccgggagctggaagtttgcaaccgcttgccttagaaggatctcttcagaaacgcggaattgttgaacagtgctgcacgtcaatttgttcgttgtaccagctcgagaattattgcaac

SEQ ID NO: 14368 - DNA, 330 bp, synthetic construct
  misc_feature 1..330: note = source = /note="Description of Artificial Sequence: Synthetic coding sequence"
  source 1..330: mol_type = other DNA
atggcactgtggatgcgtctccttccgttgcttgcactgctggcgctctgggggccagacccagcagctgcattcgttaaccagcatctctgcggcagtcatctcgttgaggctctctatttggtgtgtggcgaaagaggattcttctatactccaaaaactcgtagagaagcggaggatctgcaggtggggcaggtcgagcttggaggcggtcccggagctggatcacttcagccattggcgttggaaggttcgctacaaaagaggggaattgtggagcaatgctgtacttctatatgttcactttaccaattggagaattactgcaat

SEQ ID NO: 14369 - DNA, 330 bp, synthetic construct
  misc_feature 1..330: note = source = /note="Description of Artificial Sequence: Synthetic coding sequence"
  source 1..330: mol_type = other DNA
atggccctgtggatgagacttctccctcttctggctctgctggctttgtggggacccgaccctgcagctgcttttgtaaaccaacacctgtgtggatctcacctcgtcgaggcactgtatcttgtttgcggagagagaggcttcttttacacccctaagacgaggagagaggctgaggatttgcaggtgggtcaagtagaattgggaggcggtcccggcgccggctccctgcagccactggcattggaaggttctctccagaaacgcggcattgtggagcagtgctgtacttctatctgttctttgtaccagcttgaaaattactgcaac

SEQ ID NO: 14370 - DNA, 330 bp, synthetic construct
  misc_feature 1..330: note = source = /note="Description of Artificial Sequence: Synthetic coding sequence"
  source 1..330: mol_type = other DNA
atggccttgtggatgaggttgcttcccctgctggctctcctggcactctgggggcctgatccggccgcggcatttgtgaaccagcacctgtgtggatcccatctggtggaagccctctacctggtctgcggcgagagagggttcttctacaccccaaaaacccgccgcgaggccgaggaccttcaggtgggacaggtggagctgggaggtggaccgggcgcgggaagcctccaaccgctggctctggaaggttcgctccaaaagcggggcatcgtcgaacaatgctgcacttcgatctgttcactgtaccagctcgaaaattactgcaac

SEQ ID NO: 14371 - DNA, 330 bp, synthetic construct
  misc_feature 1..330: note = source = /note="Description of Artificial Sequence: Synthetic coding sequence"
  source 1..330: mol_type = other DNA
atggccctctggatgcggctgctccccctcctggcactgttggctctctggggcccggatcctgcagcagcgttcgtgaatcaacacctgtgtggatcacatcttgtggaagccctttacctggtctgcggcgaacggggattcttctacactcctaaaacccggcgcgaggccgaggatctgcaagtcggacaggtggagttggggggtggtccgggcgccggatcccttcagccattggccctcgaaggaagccttcaaaagcgcggaatcgttgaacagtgctgcacctcgatctgcagcctgtaccagcttgagaactactgcaac

SEQ ID NO: 14372 - DNA, 330 bp, synthetic construct
  misc_feature 1..330: note = source = /note="Description of Artificial Sequence: Synthetic coding sequence"
  source 1..330: mol_type = other DNA
atggcgctgtggatgcgacttctcccactgctcgcacttttggctctttggggtcctgatcctgcggctgcatttgtcaaccaacacctgtgcggctcccatctggtggaagcactctacctcgtctgtggagaaaggggctttttctacacgcctaagactaggagagaagccgaggatctgcaggtgggtcaggtggaactggggggagggccgggggcaggaagcctccaacctttggcactggaagggtcactgcaaaagcggggaattgtcgaacaatgctgtacttcgatatgctccctttaccaactggaaaactactgtaat

SEQ ID NO: 14373 - DNA, 330 bp, synthetic construct
  misc_feature 1..330: note = source = /note="Description of Artificial Sequence: Synthetic coding sequence"
  source 1..330: mol_type = other DNA
atggcactgtggatgaggctgcttcccttgcttgcactccttgccctctggggacccgacccagccgcagctttcgtgaaccagcatctatgtggatcacatttagtagaggctctgtatctagtatgtggagagcgagggtttttctatacgcccaaaactaggagggaggccgaagatctgcaggtcgggcaggtagagctgggggggggaccaggggccggatctctccagcccctcgcactggaaggaagtctccagaaaagaggaattgtggaacagtgctgcacatcaatctgttctctctatcagttggaaaactattgtaac

SEQ ID NO: 14374 - DNA, 564 bp, synthetic construct
  misc_feature 1..564: note = source = /note="Description of Artificial Sequence: Synthetic coding sequence"
  source 1..564: mol_type = other DNA
atggccctgacctttgccctgctcgttgctctgcttgtcttgtcatgtaagtcatcttgctctgttggctgcgacctccctcagacacactctctgggatcacgccgcactcttatgttgttggcgcaaatgagaagaatatcactcttcagctgcctgaaagacagacacgattttggcttcccacaggaggagtttggaaatcagttccagaaagcagaaacgatccccgtcctccatgagatgattcagcagatatttaatctgttttctacgaaagatagctccgccgcatgggacgaaaccctgctcgataaattctacaccgagctctaccagcagctgaacgacttggaggcctgtgttatccagggcgttggggtcactgaaacccccctgatgaaggaggattcaattctggcagtcagaaagtattttcagcggatcactctttaccttaaggaaaagaaatatagcccctgcgcatgggaagtcgtgagggcagaaattatgaggtctttctccctgtccactaatctgcaggagtccctcagatcaaaagag

SEQ ID NO: 14375 - DNA, 564 bp, synthetic construct
  misc_feature 1..564: note = source = /note="Description of Artificial Sequence: Synthetic coding sequence"
  source 1..564: mol_type = other DNA
atggcgctgacctttgcacttcttgtcgcactgctggtcctctcatgcaagtcctcgtgttccgtgggatgcgatctgccacaaactcatagccttgggagcagaagaactctgatgctcctggctcagatgcggcggatcagcctgttctcgtgtctgaaggacagacacgattttggtttcccgcaagaggaatttggcaaccaatttcagaaggcagaaaccatcccagtgctccacgaaatgatccaacaaatctttaacctgttctccaccaaggattcatccgccgcctgggacgaaaccctgctggacaagttctatactgaattgtaccagcagctgaatgatctggaggcctgtgtgatacaaggagtgggagtgactgaaacccctcttatgaaggaagattcgattcttgcagtccggaagtactttcagaggataaccctgtacctgaaggagaagaagtattcgccttgcgcgtgggaagtggtgcgggcagaaatcatgcgttccttctccctttcaactaacctgcaagagagcctgcgatcaaaagaa

SEQ ID NO: 14376 - DNA, 564 bp, synthetic construct
  misc_feature 1..564: note = source = /note="Description of Artificial Sequence: Synthetic coding sequence"
  source 1..564: mol_type = other DNA
atggcccttacctttgcccttcttgtggcgcttcttgtgctgtcctgcaaatcgagctgcagcgttggctgcgacctgccccagactcactcactgggaagcagaagaacccttatgcttcttgcacaaatgcgccgaatttcactgttctcctgcctgaaggataggcatgactttggtttccctcaggaagaattcggcaatcagtttcaaaaggcagaaactatcccagtcctgcacgagatgatccagcaaatctttaatctcttctcgactaaggattcctcggcagcatgggacgagactcttcttgataagttctacaccgaactctaccaacagcttaatgatctggaagcatgtgtgatccagggtgtgggggtcactgaaaccccattgatgaaggaggattcgatcctcgcggtccgcaagtactttcaaagaataaccctgtaccttaaggagaagaagtattcgccctgtgcctgggaagtcgtgagagcagagattatgagatcattttccctttccacgaatcttcaggaatccctcaggtcgaaagaa

SEQ ID NO: 14377 - DNA, 564 bp, synthetic construct
  misc_feature 1..564: note = source = /note="Description of Artificial Sequence: Synthetic coding sequence"
  source 1..564: mol_type = other DNA
atggcccttacattcgctctgctcgtcgcgctactagtccttagttgtaaaagtagctgcagcgtgggttgtgatttgcctcagacgcactctctgggctcgcgccggactctcatgctcctggcacagatgcggcgaatcagcctcttttcctgtctgaaggataggcatgatttcggatttccccaggaggaatttggaaaccagttccagaaggctgagactataccggtgttgcacgagatgattcagcagatcttcaacttgttcagcacaaaggactcatccgccgcttgggatgagactctcctagataaattctatactgaactgtaccagcagttgaacgatttggaagcctgtgttatccagggggtcggggtgaccgaaaccccactaatgaaggaggattccatcctggctgtgcggaaatacttccagagaattaccctttacctgaaagaaaagaaatacagcccctgcgcatgggaagttgtgcgcgcggaaattatgaggtccttctcgctgagtacgaatctccaggaaagcttgcggagcaaggaa

SEQ ID NO: 14378 - DNA, 564 bp, synthetic construct
  misc_feature 1..564: note = source = /note="Description of Artificial Sequence: Synthetic coding sequence"
  source 1..564: mol_type = other DNA
atggccttgacctttgcgttgttggtcgctctgctcgtactctcctgcaaatcttcatgctccgtgggctgcgatcttccgcaaactcactcgcttggatcgcggcgcaccctgatgctgctggcgcagatgagaagaatcagcctgttcagctgtctcaaagatcgccatgacttcggcttcccccaagaggagttcggtaaccaattccaaaaagcagagactatcccggttttgcatgaaatgatccagcaaatcttcaatctcttttcgaccaaggactcttcggcagcgtgggacgagactctgctcgacaaattctacactgaactgtaccaacagctcaacgacttggaggcctgcgtgatccagggcgtgggagtgaccgaaaccccgcttatgaaggaagatagcatcctggcggtccgcaagtactttcagcgaatcactctctaccttaaagaaaagaagtactcaccatgtgcttgggaagtggtgcgggccgaaatcatgcggtcgttctcgctctcgactaatcttcaggaatccctgagatcgaaggaa

SEQ ID NO: 14379 - DNA, 564 bp, synthetic construct
  misc_feature 1..564: note = source = /note="Description of Artificial Sequence: Synthetic coding sequence"
  source 1..564: mol_type = other DNA
atggctctgacttttgcattacttgttgctcttctcgtgttgtcttgtaaatccagttgttccgtcgggtgtgatcttccccagactcactcccttgggtccagacgcactcttatgctcctggctcagatgaggcggatctctttattctcctgtctgaaagataggcacgatttcggattcccccaagaagaatttgggaaccagttccagaaagccgaaacaatcccagttttacacgaaatgatacagcagatatttaacctgttttccacgaaggatagtagtgccgcctgggatgaaacacttctagataagttctatacagaactgtatcagcagttaaatgacctggaagcttgtgttatacagggggtgggagtaacagaaacacctctcatgaaagaagattccatccttgccgtgagaaaatattttcagcggataactctttatctaaaagaaaaaaaatattcaccatgtgcttgggaagtggtgcgcgcagaaataatgcggtcgttttcgctctctactaacctgcaggaaagtctacggtccaaagag

SEQ ID NO: 14380 - DNA, 564 bp, synthetic construct
  misc_feature 1..564: note = source = /note="Description of Artificial Sequence: Synthetic coding sequence"
  source 1..564: mol_type = other DNA
atggctctgacttttgcgctgctcgtggccctgctggtcctgtcatgcaaaagctcatgcagcgtggggtgcgatctgccacaaactcactccctgggctcaagacgcaccctcatgctccttgcccagatgagacgcattagtcttttctcctgcctcaaggatcggcacgactttggcttcccgcaagaggaatttggaaaccagttccaaaaggccgaaactattccggtgctgcacgagatgatccaacaaatcttcaacctcttctccaccaaagactcgagcgccgcgtgggacgaaaccctgctggacaagttctacaccgaactgtaccagcaacttaacgacctcgaagcgtgtgtgatccagggagttggggtgactgaaactcctcttatgaaagaggactccatcctggcagttcggaagtatttccagcggatcacgctctacctgaaagaaaagaagtactcgccgtgtgcgtgggaagtcgtgagggcagaaattatgaggagcttttcgctgtccaccaacctgcaggagagcctcagatcaaaggaa

SEQ ID NO: 14381 - DNA, 564 bp, synthetic construct
  misc_feature 1..564: note = source = /note="Description of Artificial Sequence: Synthetic coding sequence"
  source 1..564: mol_type = other DNA
atggcgttgaccttcgctcttctggtggccttgttggtgttgagttgcaagtccagttgttctgttggttgtgaccttccgcaaacccatagcctgggctcccgcagaactcttatgctgctggcgcaaatgcgccgaatcagccttttcagttgcctaaaggaccggcatgatttcggtttcccacaggaggagttcggcaatcagttccaaaaagctgaaacaatcccagttctccacgagatgatccaacagatttttaatctcttctcgactaaagacagctctgcggcctgggacgaaaccctactggacaaattttacactgagctgtaccaacaactgaatgatctcgaggcttgtgtcatccaaggcgtcggagtaaccgagactcctttgatgaaagaggattcgattctagccgttcggaaatacttccaacggattaccttgtatctaaaggagaaaaagtattctccgtgtgcctgggaagtggtccgtgcggagatcatgcgatcctttagtctaagcactaacctgcaggaatcgttgcgttcaaaggag

SEQ ID NO: 14382 - DNA, 564 bp, synthetic construct
  misc_feature 1..564: note = source = /note="Description of Artificial Sequence: Synthetic coding sequence"
  source 1..564: mol_type = other DNA
atggccctcacgtttgcattgctcgtcgcactgctcgtccttagctgtaagtcgtcatgctcggtgggctgtgatcttcctcaaactcattctcttggtagcagacggactttgatgctgctggcacagatgcggagaatttctcttttctcatgtctgaaggaccgtcacgattttggatttcctcaagaagagtttgggaaccagtttcaaaaggccgagactattcccgtgctgcatgaaatgattcaacagattttcaacctcttcagcaccaaggattcatcggcggcctgggacgaaacgctgcttgacaagttttacactgaactttatcagcaactgaacgatcttgaggcctgcgtgattcaaggagtcggagttactgaaacccctctgatgaaggaggactccatactcgcagtgcgcaaatacttccaacggattaccctttaccttaaagagaagaagtacagcccatgtgcatgggaagtggtcagagcagagattatgcgttcgttcagccttagcaccaatttgcaagaatcgctcaggtccaaagag

SEQ ID NO: 14383 - DNA, 564 bp, synthetic construct
  misc_feature 1..564: note = source = /note="Description of Artificial Sequence: Synthetic coding sequence"
  source 1..564: mol_type = other DNA
atggcgcttactttcgcgttgctggtggcactgctggtgctgtcgtgcaagtctagctgctccgtgggatgcgatctgccccaaacgcactcgctgggctcgcgcagaactctgatgctgcttgcgcaaatgagacggatcagcctgttctcatgtctgaaagacaggcacgacttcggattcccgcaggaagagtttggaaatcagtttcaaaaagccgagactattccggttttgcatgagatgattcaacagatctttaatcttttcagcactaaggattcttccgcagcttgggatgaaaccctgctcgacaagttctacaccgagctttaccagcagctgaacgatcttgaagcctgtgtcatccagggagtgggcgtcaccgaaacccctctcatgaaagaagattcgatcctggctgtgcgcaagtactttcagcgcatcaccctgtacctgaaggagaaaaagtactccccgtgtgcttgggaggtggtgcgggcagaaatcatgcggtcatttagccttagcacgaaccttcaagaatccctcagatcgaaggaa

SEQ ID NO: 14384 - DNA, 564 bp, synthetic construct
  misc_feature 1..564: note = source = /note="Description of Artificial Sequence: Synthetic coding sequence"
  source 1..564: mol_type = other DNA
atggcactcacttttgcgttgcttgtggccttgctcgtgctctcatgcaagtcgtcctgttcggtaggttgtgatctgcctcagactcactccttgggctcgagacggactcttatgctgctggcccagatgcgcaggattagccttttctcttgtctcaaggatagacatgacttcggatttcctcaggaagaatttgggaatcaatttcaaaaagcagaaaccattcccgtgctgcatgaaatgattcaacagatattcaacctgtttagtacgaaagactcctcagccgcgtgggatgagacgttgctggacaagttttacaccgaactctaccagcaactgaacgatctggaagcgtgtgtgatccaaggggtgggggtgacggaaaccccccttatgaaggaggatagcatccttgcagtccgtaagtatttccaacgaattaccctctacctcaaggaaaagaaatactcgccatgtgcatgggaagtggttagggcagagataatgaggagctttagcttgtcaaccaatctgcaagagtcccttcgttccaaggag

SEQ ID NO: 14385 - DNA, 564 bp, synthetic construct
  misc_feature 1..564: note = source = /note="Description of Artificial Sequence: Synthetic coding sequence"
  source 1..564: mol_type = other DNA
atggcattgacctttgcattgttggtcgccctgctcgtgctgtcgtgtaagtcatcgtgttcagtgggctgcgacctgcctcaaacccatagccttggatcccgccggacccttatgctgctggcacaaatgcggagaattagcttgttttcgtgcctgaaggacaggcacgactttggctttcctcaggaggaatttggaaaccaatttcaaaaagcagaaactattccagtccttcatgagatgatccagcagatattcaacctgttttcgaccaaggactcctcggcagcgtgggacgaaactctgctcgacaagttttacaccgagctctaccaacaactcaacgacctggaagcctgcgtcattcagggtgtgggggtcactgaaaccccccttatgaaggaggacagcattctggcggtgagaaagtacttccagaggatcactctttaccttaaggagaaaaagtacagcccatgtgcgtgggaagtggtgagggcggagataatgcgatcgttctccctgtccacgaatcttcaagagagcctgcgtagtaaagaa

SEQ ID NO: 14386 - DNA, 564 bp, synthetic construct
  misc_feature 1..564: note = source = /note="Description of Artificial Sequence: Synthetic coding sequence"
  source 1..564: mol_type = other DNA
atggcccttacctttgcgttgcttgtagctctgctcgtgctgtcatgcaaatcatcctgcagcgtgggttgcgacctgcctcagactcactccctcggctcccgcaggactctcatgctcctggcccaaatgaggcgcatctccctgttctcgtgccttaaggaccggcacgatttcgggttcccgcaggaagagtttggaaatcagttccagaaggcagaaactatccctgtcctgcatgaaatgatccagcagatcttcaacctgttcagtaccaaggacagcagcgcagcctgggatgagactctcctggacaagttctacacggagctgtaccagcagctcaatgacctggaagcatgtgtcatccaaggagtgggagtgaccgagactccactcatgaaggaggattccattctggccgtgcggaagtatttccagcggatcactctgtacctgaaggagaaaaagtactccccatgtgcctgggaggtggttcgcgctgagatcatgagatccttctccctcagcaccaatcttcaggaaagcctgcgctctaaggag

SEQ ID NO: 14387 - DNA, 564 bp, synthetic construct
  misc_feature 1..564: note = source = /note="Description of Artificial Sequence: Synthetic coding sequence"
  source 1..564: mol_type = other DNA
atggcgctgaccttcgcgctcctggtggcccttctggtgctttcatgcaagtcgtcttgcagcgtgggatgcgacctgccgcagacccactccttgggatcaagacgcaccttgatgctgctggctcagatgagacgaatcagcctgttctcctgcctgaaggaccgccatgacttcggtttcccacaagaggaattcggaaaccagttccaaaaggcagaaaccatcccggtgctgcacgaaatgatccaacagatctttaacttgttttcaactaaagatagctcagccgcgtgggatgaaaccctccttgacaaattctacactgaactgtaccagcagctgaatgaccttgaggcatgcgtgatccagggagtcggggtgaccgagactcctctgatgaaggaagattccatcttggcggtccgcaagtacttccagagaatcaccttgtacctcaaagagaagaagtatagcccctgtgcgtgggaagtggtgcgcgccgaaatcatgagatcattcagcctgtccacgaatttgcaggagtcgctccgctctaaggag

SEQ ID NO: 14388 - DNA, 564 bp, synthetic construct
  misc_feature 1..564: note = source = /note="Description of Artificial Sequence: Synthetic coding sequence"
  source 1..564: mol_type = other DNA
atggcgctgaccttcgccttgctcgtggcactgctggtgctgtcctgcaagagctcctgcagcgtggggtgcgatctgcctcagactcattccctcggaagccgacggactctcatgctgctcgctcagatgcggcggatttcgttgttctcctgccttaaggaccggcacgactttgggttcccgcaggaagagtttggaaatcagttccagaaggcggagactatcccggtcttgcacgaaatgatccagcagattttcaatttgttctcgaccaaggattcgtcggctgcctgggacgaaaccctgctcgacaagttctacacggaactctaccagcaactcaacgatctggaggcatgtgtgatccagggagtgggggtcaccgaaacccccctgatgaaggaggactcgatcctggcagtgaggaaatacttccagcggatcaccctttacctgaaggaaaagaagtactccccatgtgcttgggaagtggtcagagccgagatcatgaggagcttctccctctctactaaccttcaggaatctctcagatcgaaggag

SEQ ID NO: 14389 - DNA, 564 bp, synthetic construct
  misc_feature 1..564: note = source = /note="Description of Artificial Sequence: Synthetic coding sequence"
  source 1..564: mol_type = other DNA
atggctctcacctttgcgctcctggtggcactgctggttttgtcatgtaaatcttcgtgctctgtgggttgtgatctgccacagactcattcccttggttctcgccgaacgctgatgcttcttgcccagatgagaagaatctcgctcttctcctgtcttaaggataggcatgacttcgggttccctcaagaagaatttggtaaccaatttcagaaagccgaaactattccagtgctccatgagatgatccaacagatcttcaacctgttttcgacgaaggattccagcgcagcatgggatgagactctcctcgataagttttacactgagctttaccagcaacttaacgaccttgaagcatgtgtcattcaaggggtgggagttaccgaaactcctctgatgaaggaggattccattctcgcggtgcggaagtactttcagagaattactctgtacttgaaggagaaaaagtattcgccttgcgcatgggaggtggtgcgggcagagattatgagatccttttcactgtcaaccaatctccaagagtcgcttagatcgaaagaa

SEQ ID NO: 14390 - DNA, 564 bp, synthetic construct
  misc_feature 1..564: note = source = /note="Description of Artificial Sequence: Synthetic coding sequence"
  source 1..564: mol_type = other DNA
atggcccttacctttgctctgctggtggcgctgctcgtgctttcttgtaagtcatcatgctccgtggggtgcgatcttccacaaacacattcactcggctcacggcggactttgatgttgcttgcccagatgaggcgcattagcctgttttcctgtctgaaagacaggcacgacttcggatttccacaagaggagtttggaaatcagttccagaaagccgaaaccattcccgtgctccacgagatgatacagcagatcttcaacctgttctcaacgaaggattcttctgctgcctgggacgagacactgctggataaattctatacagaactttatcagcaactgaatgacctcgaggcgtgcgtgatacagggggtcggggtgacagaaacccctctgatgaaggaagacagcatccttgccgtgcgaaaatactttcagaggattaccctctacctcaaggaaaaaaaatacagcccctgtgcatgggaggtggtcagggccgagattatgcggagttttagtctctcaacgaacctgcaggaaagcctcagaagtaaagag

SEQ ID NO: 14391 - DNA, 564 bp, synthetic construct
  misc_feature 1..564: note = source = /note="Description of Artificial Sequence: Synthetic coding sequence"
  source 1..564: mol_type = other DNA
atggcgcttaccttcgcactgctggtggcccttcttgtgctctcctgtaaaagctcctgttcggtggggtgtgatctgccgcagacccattcacttggatcgaggagaactctgatgctgctggcacaaatgaggcggatttctctgttttcatgtctgaaggacagacatgactttggattccctcaggaagagttcggaaatcagttccaaaaggctgaaaccataccagtgctccacgagatgattcagcagatcttcaacctgttttccaccaaggatagtagcgcggcctgggatgaaactcttctggacaagttttacaccgaactgtatcaacaactgaacgatctggaagcatgcgtgatccaaggtgtcggcgtgaccgaaacgccccttatgaaggaggactcgatacttgccgtccgcaagtacttccagaggatcactctgtacctcaaggaaaagaagtatagcccatgtgcatgggaagtggtccgtgcagaaatcatgagatctttttcactgtcaaccaacctgcaggagtcgcttaggtcaaaggaa

SEQ ID NO: 14392 - DNA, 564 bp, synthetic construct
  misc_feature 1..564: note = source = /note="Description of Artificial Sequence: Synthetic coding sequence"
  source 1..564: mol_type = other DNA
atggccctaaccttcgctctgctggtcgcactgcttgtgctgtcttgtaagtctagctgctcagtaggatgcgatctgcctcaaacacattccctgggatctcggcgaactcttatgctactggcccagatgcgccgcatcagtctgttctcctgtctgaaagatcgtcacgacttcggctttccccaggaggaatttggtaatcagtttcaaaaagccgagacaatccctgtcctgcacgagatgatacaacagatattcaatctcttctccacgaaggacagctcagccgcctgggacgagactctgctggacaagttctacacagaactgtaccagcaactgaatgacctggaggcatgcgtaatacaaggagtaggcgtaaccgaaacacctctgatgaaggaggatagtattctcgccgtcaggaagtattttcagcgcataactttgtacctcaaagaaaaaaaatactcaccatgcgcgtgggaagttgtacgtgccgaaatcatgcggtctttctccctgtcgacaaatctgcaggagagtttaagaagtaaggaa

SEQ ID NO: 14393 - DNA, 564 bp, synthetic construct
  misc_feature 1..564: note = source = /note="Description of Artificial Sequence: Synthetic coding sequence"
  source 1..564: mol_type = other DNA
atggcattgacctttgcgctgcttgtggctctcctggttctttcatgtaagtcatcgtgttccgtgggttgcgatctccctcagactcacagtctgggctcccgccggactctgatgctgctggcgcaaatgaggcgcatctcactgtttagctgtctgaaggacagacatgattttggattccctcaggaagaattcgggaaccagttccaaaaggccgaaactattcctgtgctgcacgaaatgattcagcagattttcaacctcttttcgaccaaggattcgtccgcagcatgggatgaaactttgctcgataagttttacaccgaactctaccaacagcttaacgaccttgaggcctgtgtcattcaaggtgtcggagtcaccgaaactccactgatgaaggaagattcgattctcgcagtgagaaagtattttcagcgcataactctttacctcaaagaaaagaagtacagcccatgtgcgtgggaagtggtgagggcagaaatcatgcggtcattctcgctttcgactaacctccaggaaagcctgaggtcgaaggag

SEQ ID NO: 14394 - DNA, 564 bp, synthetic construct
  misc_feature 1..564: note = source = /note="Description of Artificial Sequence: Synthetic coding sequence"
  source 1..564: mol_type = other DNA
atggccctgaccttcgctctcctggtcgcgttgttagtgcttagctgtaaatcttcgtgctcagtcggttgtgatttacctcagacacactcactcggcagcaggaggaccctaatgcttctggctcaaatgagaagaatctctttattttcctgcttgaaagaccggcacgactttggattcccacaggaagagttcgggaaccagtttcaaaaggcagagaccataccagtcctgcacgagatgatccagcagatctttaatctgttcagcacgaaagactctagcgctgcatgggacgaaaccttgctcgataagttttataccgaactttaccagcagctgaacgatctggaagcctgtgtcatccagggtgtcggtgtgaccgagacacccctgatgaaggaagacagcattttggctgtccggaaatacttccagagaatcacgttatatctcaaagaaaagaagtacagcccgtgcgcctgggaagttgttagggccgaaatcatgcggtccttcagtctgtcgaccaatctgcaggaaagccttcggagcaaggaa

SEQ ID NO: 14395 - DNA, 564 bp, synthetic construct
  misc_feature 1..564: note = source = /note="Description of Artificial Sequence: Synthetic coding sequence"
  source 1..564: mol_type = other DNA
atggcactaactttcgcactacttgttgcactcctggtcctcagctgtaaaagctcctgtagcgtgggctgcgaccttcctcaaactcacagtctcggaagccggagaactctgatgctgctggcccagatgcgtcgaatttctctgttctcctgcctaaaggatagacacgatttcggattcccacaggaggagtttggcaatcagtttcaaaaagctgagaccatccccgtcctgcatgaaatgatccagcagatcttcaatttattttccacaaaagactctagcgccgcttgggatgagactttattagacaaattctatacagaactttaccagcagctcaatgaccttgaggcctgcgtgatccaaggcgttggagttaccgagacccccctcatgaaagaggattctatattagctgtccgcaagtattttcagcggatcacactgtacctcaaggagaagaagtactcaccgtgcgcgtgggaggtggtgcgggctgaaatcatgcgctccttcagcctttcaactaaccttcaggaatcattacggtctaaagag

SEQ ID NO: 14396 - DNA, 564 bp, synthetic construct
  misc_feature 1..564: note = source = /note="Description of Artificial Sequence: Synthetic coding sequence"
  source 1..564: mol_type = other DNA
atggccctgacttttgcactcctggtggctctcctcgtactcagctgcaaatcctcttgttcagtgggctgtgatcttcctcaaacccattcacttggatcccgaagaaccctgatgcttctggcacagatgcgaagaatttcgctcttctcgtgcctcaaggatcggcacgacttcggattcccacaagaggaatttggcaatcaatttcaaaaggcggagactatccctgtcctgcatgagatgattcaacagatctttaatctctttagcaccaaagattcgagcgcagcctgggatgaaactctgctggataagttttacactgagctttatcagcaacttaacgacctggaggcctgtgtgatccaaggggttggtgtgactgaaacccctctgatgaaagaggacagcatccttgccgtgcggaagtactttcaaagaattaccttgtaccttaaagaaaagaagtactcgccgtgcgcatgggaggtggtgcgagctgagattatgaggtccttttccctgtcgaccaacctccaagaatcactccgctcgaaggag

SEQ ID NO: 14397 - DNA, 564 bp, synthetic construct
  misc_feature 1..564: note = source = /note="Description of Artificial Sequence: Synthetic coding sequence"
  source 1..564: mol_type = other DNA
atggccctgaccttcgccttgctggtagccctactggtgctctcctgtaagagttcatgctcagtgggatgtgatctgccacagactcactcacttggcagccgcagaacactaatgctattagcgcagatgaggcggataagtctgttttcttgcctgaaggatcggcatgacttcggtttcccccaggaagagtttggcaaccagttccagaaagctgagaccattcctgtgctgcatgaaatgatccagcagatcttcaatctattctctacaaaagatagctccgcagcatgggacgaaaccctgctggataagttttacacagagctgtatcaacagcttaacgacctggaagcatgcgtgatacaaggggttggggtgacagaaacaccactgatgaaagaggactctattctggctgtccgtaaatacttccagcgtattactctgtacttaaaggagaagaagtacagtccttgtgcctgggaagtggtgcgagctgagatcatgcgtagtttctccttgtccacaaacctccaggagagcctaagatccaaagag

SEQ ID NO: 14398 - DNA, 564 bp, synthetic construct
  misc_feature 1..564: note = source = /note="Description of Artificial Sequence: Synthetic coding sequence"
  source 1..564: mol_type = other DNA
atggccctgacgtttgccttgctcgtagcactgctggtgctgtcgtgcaagagcagctgttccgttggatgcgacctccctcagacccactcactgggctcccggcgaaccctcatgcttctagcccaaatgcgtagaatctccctgttctcttgtctgaaggatcgccatgatttcggttttccacaagaagaatttgggaaccagtttcaaaaggccgaaacgatccctgtccttcatgagatgatccagcaaatcttcaacttgttctccactaaggatagttccgcggcttgggatgagactctgctggacaagttctataccgaactgtaccaacagctcaacgacttggaggcatgcgtcattcagggggtgggagtgaccgaaactcccctgatgaaagaagattccatattagccgtcaggaaatacttccagaggatcacgctctacctaaaggagaaaaagtactcaccttgcgcatgggaggtggtgcgcgccgaaatcatgaggagcttttctctgtccacaaatctgcaggagtccctgcgctcaaaggag

SEQ ID NO: 14399 - DNA, 564 bp, synthetic construct
  misc_feature 1..564: note = source = /note="Description of Artificial Sequence: Synthetic coding sequence"
  source 1..564: mol_type = other DNA
atggcacttaccttcgctcttctcgtggccctgctggtcctgtcctgtaagagctcctgcagcgtagggtgcgacctgcctcaaacacacagtctggggtctcggagaaccctcatgctgttagcccagatgagacggatcagcctgtttagttgcctgaaggacagacacgatttcgggtttcctcaagaggagtttggtaaccagtttcaaaaggctgaaaccattcctgtgcttcacgaaatgatccagcagatatttaacctgttcagcaccaaggattcatctgctgcctgggacgagacgctccttgataagttttatacggagctctatcagcaactcaacgatctggaggcctgtgtaatccaaggcgtcggcgtgactgaaactcccttgatgaaagaagactctatactggcggtgcggaaatatttccaaaggattaccctgtatttgaaagaaaaaaagtactctccctgcgcttgggaggtggtgagggcggaaattatgagatccttttccctatctacaaacctgcaggagtctttacggtctaaagag

SEQ ID NO: 14400 - DNA, 564 bp, synthetic construct
  misc_feature 1..564: note = source = /note="Description of Artificial Sequence: Synthetic coding sequence"
  source 1..564: mol_type = other DNA
atggcgctgaccttcgccttgctcgtggcgctgctggtgctcagctgcaagagttcttgctccgtcggatgcgacttgccgcaaactcactcacttggctccaggagaaccctgatgctgctcgctcaaatgagacggatcagcttgttctcttgcctgaaggaccgccacgatttcgggttcccgcaagaagagtttggaaaccagtttcaaaaggcggaaactatcccggtgctgcatgagatgatccaacagatcttcaacctgttctcgaccaaggattcgtccgccgcttgggacgagactttgttggataagttctacaccgaactgtaccaacaactcaatgacctggaagcgtgcgtgatccagggagtcggagtgactgaaacccctctgatgaaggaggactcaattctggctgtgcgcaaatactttcagcgcatcacgctgtacctgaaagagaaaaagtacagcccatgcgcgtgggaagtggtgcgggccgaaatcatgcggtcgttctcactgtccaccaacctgcaggaatccctgcggtcgaaagag

SEQ ID NO: 14401 - DNA, 564 bp, synthetic construct
  misc_feature 1..564: note = source = /note="Description of Artificial Sequence: Synthetic coding sequence"
  source 1..564: mol_type = other DNA
atggcactgacttttgcacttttagttgctcttttggtactttcatgtaagtcaagctgctctgtgggctgcgacctcccacagacccattccttaggctccagacgcactcttatgctgctagcccagatgagaaggatatctctcttctcctgcctgaaggaccggcacgatttcgggttccctcaggaggagttcggaaaccagtttcagaaagcggaaacaattcctgttctgcacgagatgatccaacagatcttcaatctgtttagcaccaaagacagcagtgcagcctgggacgaaaccttactggacaagttctataccgaactgtaccaacagttgaatgaccttgaagcttgcgtcatccaaggggtgggggtgactgaaactccactaatgaaggaggattccatactcgcagtgagaaagtactttcagaggataacactgtaccttaaagagaaaaaatactctccctgtgcatgggaagtggtccgcgccgagatcatgcgcagctttagcctgagtaccaatttgcaggagagcttgaggagtaaggag

SEQ ID NO: 14402 - DNA, 564 bp, synthetic construct
  misc_feature 1..564: note = source = /note="Description of Artificial Sequence: Synthetic coding sequence"
  source 1..564: mol_type = other DNA
atggcactgacctttgctctgctcgttgctctgctggtgttgtcctgcaaaagctcctgttcagtgggatgcgatctccctcagacccattccctgggctcaagacgaacactgatgctgctcgcccagatgcggagaattagcctatttagttgtctcaaagaccggcacgactttggtttcccacaagaagaatttgggaaccagttccagaaagcagaaacaattcctgtgctccatgagatgatccagcagatcttcaatctgttctcaaccaaggatagttctgctgcctgggacgagaccttgctggataagttttataccgaactctatcagcagttgaatgacctggaagcctgcgtgatccagggggtgggggtgacagaaacaccactgatgaaggaggactctatcttggctgtcaggaagtattttcaaaggatcacactctatctgaaggagaagaagtactcaccttgtgcgtgggaagtggtgagagctgaaatcatgaggtccttttcactgtccaccaacctccaggaaagtctgcgctccaaggag

SEQ ID NO: 14403 - DNA, 564 bp, synthetic construct
  misc_feature 1..564: note = source = /note="Description of Artificial Sequence: Synthetic coding sequence"
  source 1..564: mol_type = other DNA
atggccctgactttcgcgttgctcgtggcgttactcgttctgtcctgcaaatcctcttgttctgtagggtgtgatttgcctcagacgcattctctaggctctcgtaggacgctgatgctgttggcccagatgagaagaatctccctcttttcttgcctgaaagaccgtcacgattttggcttcccacaggaggaatttggcaatcagttccagaaagctgaaaccatcccggtactccatgaaatgatacagcagatcttcaacttgttcagcactaaagattcttctgctgcgtgggacgaaacgctattggacaagttttacacagaactttaccaacagcttaatgacctggaagcctgcgtcatccagggagtgggtgtgacagaaactcctctgatgaaggaggattctattctggccgttcgtaaatatttccaacgcatcaccctctatttgaaagagaagaagtatagcccctgtgcctgggaagtggttcgtgctgaaattatgcggagtttttctctctctaccaacctccaagagtcactgaggtcaaaagag

SEQ ID NO: 14404 - DNA, 564 bp, synthetic construct
  misc_feature 1..564: note = source = /note="Description of Artificial Sequence: Synthetic coding sequence"
  source 1..564: mol_type = other DNA
atggctctgacttttgcacttctcgttgccctcttggtcctcagctgtaagtccagctgttctgtcggatgcgacctgccccaaactcactcactcggcagcagaagaactcttatgctgcttgctcagatgcgccgtattagcctgttctcctgtctgaaggaccgtcacgatttcggcttccctcaagaagagtttggcaaccagttccagaaggcagagaccattcctgtgctgcatgaaatgatccagcaaatcttcaacctgttcagcaccaaggatagcagcgcagcctgggacgagactctcctggacaagttctacacagagctctaccagcaactaaatgacctggaagcttgtgtgattcagggcgttggagttacggaaacgcctctgatgaaagaagattcaatcttagcggtgcgcaaatacttccaaagaatcactctttacctcaaagaaaagaaatatagtccatgcgcctgggaagtcgtgagggctgagatcatgcggagtttcagccttagtaccaacctgcaggaaagcctcaggtcaaaggag

SEQ ID NO: 14405 - DNA, 564 bp, synthetic construct
  misc_feature 1..564: note = source = /note="Description of Artificial Sequence: Synthetic coding sequence"
  source 1..564: mol_type = other DNA
atggcactgactttcgcactcctggtcgcccttctggtgctctcctgcaagtcctcctgttctgtcggttgtgatcttccccagactcattcacttggatcgcgtcgcacccttatgctcctcgcccagatgagaagaatttcacttttctcctgccttaaggatcggcacgactttggattccctcaagaagagtttggcaaccaatttcaaaaagcggaaaccatacctgtgcttcatgagatgattcaacagatctttaacctcttttcgaccaaggactcgtcagcggcgtgggatgaaacgctcctggacaagttttacactgaactgtaccaacaactgaatgatctggaggcctgtgtcatccagggagttggagttactgaaaccccgctcatgaaagaagattccattcttgcagtcagaaagtatttccagcgaataacgctttaccttaaggagaagaagtacagcccatgtgcttgggaagtggtgagagcagagattatgagatccttctcgctgtcgactaatcttcaggagagcctgagatcgaaggaa

SEQ ID NO: 14406 - DNA, 564 bp, synthetic construct
  misc_feature 1..564: note = source = /note="Description of Artificial Sequence: Synthetic coding sequence"
  source 1..564: mol_type = other DNA
atggctctgacctttgccttgctggtggccctgcttgtcctgtcgtgtaagtcgtcatgctcagtaggatgtgatctgccacagactcattcgctcggtagtcgtagaactctgatgctgctggcacaaatgagacgcattagcctctttagctgtctcaaggatcgccatgacttcgggtttcctcaggaagaatttggaaaccagttccagaaggcagagactatacccgtgttgcacgaaatgattcaacagattttcaacctttttagcaccaaggactcatctgcagcatgggatgaaactctgcttgataagttttacaccgagctgtaccaacaactgaacgacctcgaggcgtgcgtaattcaaggcgtgggcgtgacggagactccactgatgaaagaagattccatcctggccgtccgcaagtactttcaaaggatcacgctttatctgaaagaaaagaaatactcgccgtgtgcttgggaagtggtgagagctgagatcatgcgatcattctcgctttcaaccaatctgcaagagtcgcttcggtcaaaagaa

SEQ ID NO: 14407 - DNA, 564 bp, synthetic construct
  misc_feature 1..564: note = source = /note="Description of Artificial Sequence: Synthetic coding sequence"
  source 1..564: mol_type = other DNA
atggcgttaacgtttgcgttactagttgcgctattagttctatcgtgtaaatcgtcgtgttcggtaggttgtgatttaccgcaaacgcattcgctaggttcgcgacgtacgttaatgctactagcgcaaatgcgacgtatatcgctattttcgtgtttaaaagatcgtcatgattttggttttccgcaagaagaatttggtaatcaatttcaaaaagcggaaacgataccggttctacatgaaatgatacaacaaatatttaatttattttcgacgaaagattcgtcggcggcgtgggatgaaacgctactagataaattttatacggaattatatcaacaactaaatgatttagaagcgtgtgtaatacaaggtgtaggtgttacggaaacgccgttaatgaaagaagattcgatattagcggttcgaaaatattttcaacgaataacgctatatctaaaagaaaaaaaatattcgccgtgtgcgtgggaagtagtacgtgcggaaataatgcgatcgttttcgttatcgacgaatttacaagaatcgctacgatcgaaagaa

SEQ ID NO: 14408 - DNA, 564 bp, synthetic construct; identical to SEQ ID NO: 14401
  misc_feature 1..564: note = source = /note="Description of Artificial Sequence: Synthetic coding sequence"
  source 1..564: mol_type = other DNA

SEQ ID NO: 14409 - DNA, 564 bp, synthetic construct
  misc_feature 1..564: note = source = /note="Description of Artificial Sequence: Synthetic coding sequence"
  source 1..564: mol_type = other DNA
atggccctgacctttgccctccttgtggcactgctcgtgttatcctgcaagagctcctgctctgtgggctgcgatctgccgcaaacacacagtcttggttcacgccgcactttgatgctgctggcacagatgagacgcatctctctgttcagctgtcttaaggaccgccatgattttggctttcctcaagaggagttcggcaaccaattccagaaagccgagacaatcccagtgctccatgagatgatccagcaaattttcaacctatttagtactaaagatagcagcgcagcttgggacgagactctgctagacaaattttacactgaactgtatcagcagctgaacgacctcgaagcctgtgtaatacagggtgtgggcgtgactgagacaccgctgatgaaggaggatagtattcttgctgtaaggaagtacttccaacggattacactgtacttaaaagagaagaagtattcaccatgcgcatgggaggtcgtaagggctgagatcatgagaagtttttccttatcgaccaacctgcaggagtctctgcggagcaaagag

SEQ ID NO: 14410 - DNA, 564 bp, synthetic construct
  misc_feature 1..564: note = source = /note="Description of Artificial Sequence: Synthetic coding sequence"
  source 1..564: mol_type = other DNA
atggcactaacattcgcccttctggtggcgttactggttctgtcatgcaagagttcttgctcagtgggctgcgacctgccccaaacacactctctggggagtagacgtacacttatgctgctggcgcaaatgcgtcgaatcagcctgtttagctgtctgaaggataggcacgactttgggtttcctcaagaagagttcggcaaccagtttcagaaagcagaaacgatacctgtgcttcacgagatgattcagcagattttcaacctattctccacaaaggactcatccgcagcctgggatgaaacactcttggataagttctatacggagctgtatcagcagctgaacgacctggaagcttgcgttattcagggcgtcggagtaacagagacacccctgatgaaggaagattcgattttggccgtgcgaaagtatttccagcggattaccctatacctcaaggagaagaagtattctccttgtgcctgggaggtggtccgcgcagagatcatgcggagttttagtttgtcgactaatttgcaagaatccctgcggagcaaggag

SEQ ID NO: 14411 - DNA, 564 bp, synthetic construct
  misc_feature 1..564: note = source = /note="Description of Artificial Sequence: Synthetic coding sequence"
  source 1..564: mol_type = other DNA
atggcattgactttcgcactgcttgttgctctcctggtccttagctgtaagagtagctgtagcgtgggctgtgatcttccacagacccactcccttggcagcagaagaacactgatgttgttggcacagatgagaagaatcagcctgttctcatgtcttaaggataggcacgattttggttttccacaggaagagttcgggaaccagtttcagaaggcagagacaatacctgttcttcacgagatgatccagcagatcttcaacctgttcagcaccaaagattccagcgctgcttgggatgagaccttgcttgataagttctacactgagctgtaccagcagctcaacgacctggaggcctgtgtgattcaaggagtgggtgtgaccgaaactccactgatgaaagaggactcaatactggcggtacgaaagtacttccaaagaatcacactctatctgaaggaaaagaagtacagtccttgtgcctgggaggttgtacgtgctgaaataatgagaagcttctccttgtccactaaccttcaggaaagccttcggagcaaggag

SEQ ID NO: 14412 - DNA, 564 bp, synthetic construct
  misc_feature 1..564: note = source = /note="Description of Artificial Sequence: Synthetic coding sequence"
  source 1..564: mol_type = other DNA
atggccctgacgtttgctctcctcgttgcgctgttggtgttgtcctgcaagagctcctgctctgtgggatgtgatctccctcagacgcatagcctgggatcccgccgcacactcatgctgctggcccagatgcgacggatctcactcttctcatgcctgaaagacagacatgactttggattcccccaggaggaatttgggaaccagtttcagaaggccgagacaattccagtgctgcacgaaatgatccaacagatctttaacctgttctccactaaggattccagcgccgcgtgggacgaaaccctcctggataagttttatacagagctttaccagcaactgaatgatttagaggcgtgcgtcatccaaggggtgggtgtgactgaaacccctctcatgaaggaagactctattttggccgtgcgcaaatactttcagcgtattaccctctacctgaaggagaagaagtacagtccctgcgcatgggaggttgtgcgcgctgagatcatgaggagtttttcactgtcgacaaatctccaggagtcattgaggtctaaagag

SEQ ID NO: 14413 - DNA, 564 bp, synthetic construct
  misc_feature 1..564: note = source = /note="Description of Artificial Sequence: Synthetic coding sequence"
  source 1..564: mol_type = other DNA
atggcactgacctttgccctcctagtggccttgctggtactttcctgtaagtcctcttgctctgtaggatgcgacctgccacagacccacagccttggaagtcgtcgcaccttgatgttgctggcgcagatgaggaggatttctctgttttcatgcctgaaggacagacacgacttcgggttcccgcaggaggagttcggcaatcagttccagaaggccgaaaccattcccgtgctccatgagatgattcaacagatattcaatctcttctcaaccaaagactcgtcagctgcctgggacgagacactgctcgataagttctacacagagctgtaccagcagctgaatgacctggaggcctgtgtaatccagggagtgggagtgacggaaaccccgctgatgaaggaagattcgatcctggccgtcaggaagtacttccagcgcatcacactatatctgaaggaaaagaagtatagtccatgcgcctgggaggtcgtgcgcgctgaaattatgagatcttttagcctttccacgaacctccaggagtccctgcgctcaaaagaa

SEQ ID NO: 14414 - DNA, 564 bp, synthetic construct
  misc_feature 1..564: note = source = /note="Description of Artificial Sequence: Synthetic coding sequence"
  source 1..564: mol_type = other DNA
atggcactcacttttgcacttctggtggcactgcttgtgctgagctgcaagtcaagctgtagcgtgggttgcgatctcccccagactcattcgctggggtcgcggcgcaccctcatgcttctggcccagatgagaaggatttcacttttttcctgtcttaaagatcgccatgactttgggttcccacaagaagaatttggtaatcaatttcaaaaggcagaaacgattccggtgctccacgaaatgatccagcagattttcaacctgttctcgaccaaagattcttccgcggcgtgggatgagactctgcttgacaaattctacaccgaactgtaccaacaactcaatgatctggaggcctgtgtcatccaaggcgtcggagtgacggagactccactgatgaaggaggacagcattttggcagtgagaaagtacttccaacgtatcaccctgtacctcaaggaaaagaagtactccccgtgtgcttgggaagttgttcgggcggagataatgcggagcttctcactcagcactaacttgcaagaatcccttcgtagcaaagag

SEQ ID NO: 14415 - DNA, 564 bp, synthetic construct
  misc_feature 1..564: note = source = /note="Description of Artificial Sequence: Synthetic coding sequence"
  source 1..564: mol_type = other DNA
atggccctcaccttcgccctcctggttgccctgcttgtgctctcatgcaaatcttcctgcagcgtgggatgcgatcttccacaaactcacagcttgggatcgcgccggacccttatgctccttgcccagatgcggcgcatctcgctgttcagctgcctgaaggacagacacgatttcggcttcccgcaggaagaattcggcaatcagttccagaaggcagaaaccattccagtgctgcacgagatgatccagcagatctttaacctcttctccactaaagactcctcagcggcgtgggacgaaaccctcctggacaaattctatactgaactgtaccagcaactgaatgatctggaggcttgcgtgatccaaggagtcggcgttactgagactccgttgatgaaagaggactcgatcttggcagtccgcaagtactttcagcgaatcaccctttacttgaaagaaaagaaatactcgccttgtgcctgggaggtggtcagagctgagatcatgagatcatttagcttgtcgacgaatctccaggaatcgctgcgatctaaagaa

SEQ ID NO: 14416 - DNA, 564 bp, synthetic construct
  misc_feature 1..564: note = source = /note="Description of Artificial Sequence: Synthetic coding sequence"
  source 1..564: mol_type = other DNA
atggcattgacctttgcccttcttgtcgcactgctcgtgctgagttgtaaatcgtcatgttcagtagggtgtgatctgccccaaacccattcccttggtagccgaagaactctcatgctcctggcccagatgagaaggatatcgctcttcagctgtctcaaggacagacatgactttgggtttccacaggaggagttcggaaaccagtttcaaaaagcagaaaccatccctgtgcttcatgagatgatccaacagattttcaacctgttttcgaccaaggattcgtccgcagcctgggatgaaactcttcttgataagttctacactgaactttaccaacagctgaatgacctcgaggcatgtgtgattcaaggtgtgggagtgaccgaaacgccccttatgaaggaagattcgattctcgcagttcgaaaatacttccagagaataactctttacctcaaggaaaagaagtattcaccttgcgcatgggaggtggtgagggcggagattatgaggtccttttcgctgtcgactaacctgcaagaatcccttcgttcaaaggaa

SEQ ID NO: 14417 - DNA, 564 bp, synthetic construct
  misc_feature 1..564: note = source = /note="Description of Artificial Sequence: Synthetic coding sequence"
  source 1..564: mol_type = other DNA
atggcactgaccttcgcacttcttgtggcactcctggtcctctcctgtaaatcatcttgtagcgtgggatgtgatctgccacaaactcactccctgggttcaaggcggactcttatgctgctggcgcaaatgagacggattagcttgtttagctgtctgaaggatagacatgactttggttttccacaagaagaatttgggaaccagtttcagaaagctgaaactattcccgtgctgcatgagatgatccaacagatcttcaatttgttttccaccaaggatagctcagcggcctgggatgaaacccttctggataagttctacaccgaactctaccagcagcttaatgatcttgaggcgtgtgtgatacagggcgtgggagtgaccgaaacccctttgatgaaagaggacagcatcctggccgtgcgcaagtactttcaaaggataactctttacctgaaggagaagaaatactcaccctgcgcctgggaagtggtgagagcagagataatgagatctttctccttgagtaccaacctccaggaaagcctccgatcaaaagag

SEQ ID NO: 14418 - DNA, 564 bp, synthetic construct
  misc_feature 1..564: note = source = /note="Description of Artificial Sequence: Synthetic coding sequence"
  source 1..564: mol_type = other DNA
atggcactgacattcgccctgttggtggccttgctcgtgctgagctgcaagtcctcctgcagtgtaggatgcgacctgccacaaactcactctttgggttcaagaagaacactcatgcttcttgctcagatgcgtcgcattagtctcttctcttgtctgaaggatcgtcatgacttcggatttccacaggaggagtttggcaaccagttccaaaaggccgagactataccagtgctgcacgaaatgattcaacagatcttcaaccttttttccacaaaagactctagtgctgcttgggacgagactttgttggataagttctacactgagctctaccaacagctgaatgatctggaagcctgcgtgatccagggcgtcggagtaacagagactccactcatgaaggaggattctatcctggccgtgcgtaagtacttccagagaatcacactctacctcaaggagaagaagtatagcccctgtgcctgggaggtggtaagagccgagatcatgagatccttcagcctgtccacaaaccttcaggagagtctgcgtagtaaggag

SEQ ID NO: 14419 - DNA, 564 bp, synthetic construct
  misc_feature 1..564: note = source = /note="Description of Artificial Sequence: Synthetic coding sequence"
  source 1..564: mol_type = other DNA
atggcgctgacatttgctttgctggtcgcactgttggttttgtcttgtaaaagcagttgcagtgttggctgcgatcttccacaaacccactctctaggatcgcggaggacactcatgctactcgcacagatgaggcgcatcagcctgttttcttgtttaaaggaccggcacgatttcggcttcccacaggaagagttcgggaaccagttccagaaagctgagactatacccgtcctgcacgagatgattcagcagatcttcaacttattctctaccaaagacagctcggccgcttgggacgagacgctactagataaattctacacagaactgtatcagcaactgaacgacctcgaagcctgcgtaatccagggggtgggcgtcaccgagacccccttaatgaaagaggacagcatcttggccgtcagaaaatatttccagcgcataaccctctatcttaaggaaaaaaagtactcaccctgtgcatgggaagtagtgcgcgcagagatcatgaggagcttttccttgtcaacaaacctgcaggagtcccttaggtcaaaagag

SEQ ID NO: 14420 - DNA, 564 bp, synthetic construct
  misc_feature 1..564: note = source = /note="Description of Artificial Sequence: Synthetic coding sequence"
  source 1..564: mol_type = other DNA
atggctctgacattcgcgctgttggtcgcgctcctggttctctcatgcaaatcttcatgcagcgtgggatgcgacctcccgcagacacattcattagggtcccggcgaacattgatgctgctggcccagatgaggagaatcagtctattctcatgtctcaaggatcgccacgatttcggttttccccaggaggagtttgggaatcaatttcagaaggccgaaaccatccccgtcttacatgagatgatccagcagatttttaacctgttctccactaaggattccagtgccgcctgggacgaaactctgctcgataaattctataccgaactgtatcaacagctgaacgatctcgaggcatgcgtcattcaaggagtcggggttaccgaaaccccactcatgaaggaggactctattctcgccgtgagaaagtatttccagcgaatcactctctatttgaaggagaagaagtactcaccctgcgcttgggaggtggttagagcggagatcatgaggagcttctccctgtcaactaacctgcaagaaagcctacgatcaaaggag

SEQ ID NO: 14421 - DNA, 564 bp, synthetic construct
  misc_feature 1..564: note = source = /note="Description of Artificial Sequence: Synthetic coding sequence"
  source 1..564: mol_type = other DNA
atggcgctcaccttcgccctcctggtagctctgctcgtgctttcgtgcaagagctcgtgctccgttggctgcgacctgccacagacccactcacttggctccagacggacccttatgctcttggcccaaatgcggcgtatctcacttttcagctgtttgaaagaccgacatgactttggtttccctcaggaagagttcggaaaccagtttcaaaaggcagagactatcccggtgctgcacgaaatgattcagcagatcttcaatctcttctcaaccaaggacagctctgctgcgtgggatgaaaccttgcttgataagttttacactgagctgtaccagcaattgaacgacctggaagcctgcgtgattcagggggtgggagtcaccgaaaccccgcttatgaaggaggattccatcctggccgtccggaagtactttcagagaattactctctatctgaaagagaagaaatactcgccctgcgcatgggaggtggttagggccgagatcatgcgctcgttctctctttccaccaacctccaagaatcgctgcggtcgaaggaa

SEQ ID NO: 14422 - DNA, 564 bp, synthetic construct
  misc_feature 1..564: note = source = /note="Description of Artificial Sequence: Synthetic coding sequence"
  source 1..564: mol_type = other DNA
atggctctcacgtttgccctcctcgtcgcattgctggtcctgagctgcaaaagtagctgctcagtgggatgcgatctgccacaaactcactctctgggaagccgcagaacgttgatgctcctcgcccaaatgcggcgcatctccctgttctcttgtctcaaggaccgccatgacttcggcttccctcaggaagagttcggcaatcaattccagaaggcggaaacgatccccgtgttgcatgaaatgatccagcagatcttcaatttgtttagcactaaggattcgtccgccgcgtgggacgaaaccctcctcgacaaattctacaccgaactgtaccaacaactcaacgacctggaggcgtgtgtgattcagggggtcggagtcacggaaaccccgcttatgaaagaagattcgattctggctgtacgcaagtatttccagcgcatcactctgtaccttaaagagaagaaatactcaccatgtgcatgggaagtggtgcgagctgagatcatgcgctcgttttcgctttccaccaacctgcaggagtctctgcggtcaaaggag

SEQ ID NO: 14423 - DNA, 564 bp, synthetic construct
  misc_feature 1..564: note = source = /note="Description of Artificial Sequence: Synthetic coding sequence"
  source 1..564: mol_type = other DNA
atggctctcacttttgctctccttgtagcactgttagtccttagctgcaaaagtagctgcagtgtcggttgcgacctcccccaaactcactcattgggcagccgacgcacgctcatgcttctcgctcagatgagacggatttcactgttcagctgtcttaaggacaggcatgattttggctttccccaggaggagttcggaaatcagttccagaaggccgaaactatacctgtattgcatgagatgatccagcaaatattcaatctcttttccacaaaagattcgtcagccgcttgggatgaaaccttgctcgacaagttctatactgagctgtatcaacagcttaacgatctggaggcctgtgtaatacagggtgtaggggtcaccgaaacacccctgatgaaggaggatagcattttagcagtaagaaaatatttccagcgtataaccctgtatctgaaggagaagaagtactctccctgtgcatgggaggtagtacgtgcagagattatgcggtccttcagcttgtcaaccaatttgcaagagagcctccggagcaaggaa

SEQ ID NO: 14424 - DNA, 564 bp, synthetic construct
  misc_feature 1..564: note = source = /note="Description of Artificial Sequence: Synthetic coding sequence"
  source 1..564: mol_type = other DNA
atggccctaaccttcgcccttttagtggccctgctggttctgtcctgtaagtcatcttgcagcgtcggatgtgatctcccacagacccactcactgggttctcgccgtaccctgatgttgctcgcccagatgaggagaatttcattgttttcctgtctgaaagaccggcacgattttggattcccccaagaggaattcggcaatcaattccagaaagcggaaacaataccagtgctccatgaaatgatccagcaaatctttaacctcttctcaaccaaggactcaagcgccgcctgggacgagacactcttggacaaattttacacagaactctatcagcagctcaacgatctggaggcctgtgtgattcagggtgtaggcgtgacagagaccccgctgatgaaggaagacagcatcttggctgtcagaaaatattttcaacggattactctgtatctcaaagagaaaaagtatagtccatgcgcctgggaggttgtacgagcagaaatcatgcgctctttttccctgagtaccaacttgcaggaaagtctgcgttctaaggaa

SEQ ID NO: 14425 - DNA, 564 bp, synthetic construct
  misc_feature 1..564: note = source = /note="Description of Artificial Sequence: Synthetic coding sequence"
  source 1..564: mol_type = other DNA
atggcactgaccttcgcattgttggtcgccctgctcgtgctgtcgtgcaaatcctcgtgctcggtggggtgtgacctcccgcaaactcactccctcggaagccggcggactctcatgctgctcgcgcagatgagacgcatctccctcttctcgtgcttgaaggaccggcacgatttcggattcccacaagaggaattcgggaatcagttccaaaaagcagaaactatcccggtcctgcacgaaatgatccagcagatcttcaatctgtttagcaccaaagactcctccgcagcatgggacgaaaccctgctggacaaattctacaccgaactctaccagcagcttaacgatttggaggcctgcgtgattcagggagtcggggtcactgagactccgcttatgaaagaagattcaatcctggccgtgaggaagtactttcaacgcatcactctctacctgaaggaaaagaagtactcgccttgcgcgtgggaagtcgtgagggcggaaatcatgcggtccttttccctgtccaccaacttgcaggagtcgcttcgctcaaaggaa

SEQ ID NO: 14426 - DNA, 564 bp, synthetic construct
  misc_feature 1..564: note = source = /note="Description of Artificial Sequence: Synthetic coding sequence"
  source 1..564: mol_type = other DNA
atggcactgactttcgctctcttggtcgctctcctggtgttgtcatgtaaaagcagctgcagcgtcggatgcgatctgccccagactcacagcctcgggtcgaggcgaaccctgatgttgctagcgcaaatgagaagaatttctcttttctcctgtctcaaggataggcacgattttggtttcccacaggaagagtttggtaaccaatttcagaaggcagagactatccccgtcttacacgagatgattcaacagatttttaatttattttccaccaaggattctagcgctgcatgggacgagacacttctggacaaattttacactgagctttaccaacaacttaatgatttagaggcctgtgtgattcaaggtgttggagtgactgaaactcccctgatgaaggaggactccatccttgcagttcgcaagtactttcagcgaatcacactgtacctaaaggagaagaagtactctccttgtgcgtgggaagtcgtgcgggcggagattatgcgttcattttctctctctaccaatctccaggagagcctgaggtcgaaagaa

SEQ ID NO: 14427 - DNA, 564 bp, synthetic construct
  misc_feature 1..564: note = source = /note="Description of Artificial Sequence: Synthetic coding sequence"
  source 1..564: mol_type = other DNA
atggccctgaccttcgccctgcttgtggccctcctcgtgctgtcctgcaagtcgagctgttccgtgggatgcgatctgccacaaacgcacagcctcggatcccggcgtacccttatgctgctcgcgcagatgaggagaatctcactcttctcatgcctgaaagatagacacgacttcggctttccgcaagaggagttcggaaatcagtttcagaaggcggaaacgatcccagtgttgcatgagatgattcagcaaatcttcaacctgttctcgactaaggactcgtcagcggcgtgggatgaaacccttctggacaagttctatactgagctgtaccaacagcttaatgacctcgaagcctgtgtcatccaaggcgtgggcgtgaccgaaactccactcatgaaggaggatagcattctggcggtccgcaaatactttcagcggatcaccctgtacctcaaggaaaagaaatacagcccatgtgcttgggaggtcgtcagagcggaaatcatgaggtcattctcgctttccaccaacctgcaggagtcactgcgctccaaagaa

SEQ ID NO: 14428 - DNA, 564 bp, synthetic construct
  misc_feature 1..564: note = source = /note="Description of Artificial Sequence: Synthetic coding sequence"
  source 1..564: mol_type = other DNA
atggctctcacttttgcgcttcttgtggcattgctggtgctttcctgtaagtcgtcatgcagcgtcggatgtgatctgccgcaaacccactccttgggatcgagaaggactctgatgctgctggcacagatgcggaggatttccctgttttcctgtcttaaggaccggcacgacttcggcttccctcaagaagaattcggcaaccaatttcaaaaagctgaaaccattcctgtcctgcatgagatgatacagcaaatctttaacctgtttagcacgaaggacagcagcgctgcatgggacgagacgctgcttgacaaattctacactgaactgtaccagcagctcaacgacctggaggcatgtgtgattcaaggagtcggggttaccgaaactccacttatgaaagaggactccattctggcagtgcgtaaatactttcagcgcatcaccctgtacctgaaggaaaagaagtactcgccatgcgcctgggaggtcgtgcgggcggaaatcatgagatcattctctctcagcacgaatctgcaagagtcgcttagaagcaaggaa

SEQ ID NO: 14429 - DNA, 564 bp, synthetic construct
  misc_feature 1..564: note = source = /note="Description of Artificial Sequence: Synthetic coding sequence"
  source 1..564: mol_type = other DNA
atggctcttacctttgctttgcttgttgcactcttggttttgtcgtgcaagtcaagctgtagtgttggatgtgaccttcctcagacccactccctaggatcacggagaacattgatgttattggctcaaatgcggaggatttcacttttttcttgtcttaaggataggcatgatttcgggttccctcaagaggaatttggtaaccaattccaaaaggctgagactattcccgtgctacacgaaatgatacagcagatcttcaacttgttctcaaccaaggactcgagtgcagcatgggacgaaactttgctggataagttttacacagaactctatcagcaactcaatgatttagaggcttgtgtgattcagggagttggggttaccgagacaccgctcatgaaagaagactcaatcctagctgtccggaagtattttcagcgaataactctttatctcaaggagaagaaatacagtccatgcgcatgggaagttgtgagagctgagattatgcgttctttttccctttcaacaaatcttcaggagtcacttcgttccaaagag

SEQ ID NO: 14430 - DNA, 564 bp, synthetic construct
  misc_feature 1..564: note = source = /note="Description of Artificial Sequence: Synthetic coding sequence"
  source 1..564: mol_type = other DNA
atggccctgacgttcgcgctgcttgtggctctgctggtcctctcgtgcaagtcatcctgctcggtgggttgcgacctgccacagacccattctctgggatccagacggacccttatgcttctcgcgcagatgcgccgcatcagcctcttctcatgtcttaaagaccggcatgactttggattccctcaggaagaattcgggaatcagtttcagaaggccgaaactatccccgtgctccacgagatgatccaacagattttcaaccttttcagcaccaaggattcatccgcggcgtgggacgaaactcttctcgataagttctacaccgagctttaccagcagcttaacgacctggaggcttgcgtcattcaaggggtcggagttacggagactccgctcatgaaggaggattcgattctggcggtgcgtaagtacttccaaaggatcactttgtacctgaaggagaaaaagtattcgccgtgcgcgtgggaagtggtgcgcgccgagatcatgcggagcttttcgctcagcaccaacctccaagaatccctgcgctcaaaggaa

SEQ ID NO: 14431 - DNA, 564 bp, synthetic construct
  misc_feature 1..564: note = source = /note="Description of Artificial Sequence: Synthetic coding sequence"
  source 1..564: mol_type = other DNA
atggcacttacgttcgcactgcttgtcgcactcctggtgctctcctgtaaatcaagctgttccgtcggatgtgacttgccgcaaacccactccctcggttcgaggcgcaccctgatgcttctggcccaaatgcggagaataagcctgttctcgtgtctgaaagacaggcatgactttggatttccccaggaagagtttggtaatcagtttcaaaaggcggagactattcccgtgctgcacgaaatgatccagcagatattcaacctcttttctactaaggattcatccgcagcatgggatgaaaccctgctggacaagttctacactgaactttaccaacaactgaacgatttggaggcatgcgtgattcaaggcgtgggggttaccgaaacgccactgatgaaggaagatagcatcctggcagtgcgtaagtactttcagaggatcactctctacttgaaagaaaagaagtactcgccgtgtgcttgggaggtggtgagggccgagataatgcggagcttcagcctgtccacgaaccttcaggaatcactgagatcgaaagaa

SEQ ID NO: 14432 - DNA, 564 bp, synthetic construct
  misc_feature 1..564: note = source = /note="Description of Artificial Sequence: Synthetic coding sequence"
  source 1..564: mol_type = other DNA
atggcgctgacttttgctctccttgtcgccctcctggtattgtcttgcaagtcatcttgctccgtgggatgcgatcttccccaaacccacagcctggggtccaggaggaccctcatgctgctcgctcagatgaggagaatttctctgtttagctgtctgaaagaccgccacgacttcgggttccctcaagaagagttcggcaatcagttccagaaagctgaaacaattcccgtactccatgagatgatacagcaaatcttcaatctgttcagcacaaaagacagcagtgccgcctgggatgagactcttttggacaagttttatacggagctgtatcagcagttaaatgatttagaggcatgcgtcatccagggggtgggcgtgacagaaacaccactgatgaaagaagactctatactggctgtccggaagtatttccagaggatcaccctctacctcaaagagaagaagtactctccctgcgcatgggaggtggtacgggctgaaattatgcgtagtttttctttgagcacaaacctgcaggagagcctacgaagtaaggaa

SEQ ID NO: 14433 - DNA, 564 bp, synthetic construct
  misc_feature 1..564: note = source = /note="Description of Artificial Sequence: Synthetic coding sequence"
  source 1..564: mol_type = other DNA
atggccctgaccttcgcccttctagtcgccttgcttgttctctcatgcaagagttcttgcagtgtgggatgtgatcttccacagacgcattccttggggtctagacgcacgttgatgctgctggcccagatgcggagaatttccttgttttcctgcctgaaggatagacacgattttgggttccctcaggaggagttcgggaaccagtttcagaaagcagagactattcctgtgttacacgaaatgattcagcaaatttttaacttgttttctaccaaggactcctcagcggcttgggacgagaccctcctggacaagttctacacagagctctatcagcagctcaatgatcttgaagcctgtgttattcagggggtgggggttacagagacccctctgatgaaagaggattctattctggctgtccgcaaatacttccagagaattacactctacctcaaagaaaaaaaatattccccatgtgcgtgggaggtggtgagggccgagatcatgcgatccttttccctgtccactaacctgcaggagagcctcaggagtaaagag

SEQ ID NO: 14434 - DNA, 564 bp, synthetic construct
  misc_feature 1..564: note = source = /note="Description of Artificial Sequence: Synthetic coding sequence"
  source 1..564: mol_type = other DNA
atggccctgaccttcgccttgttggtggccctgctcgtgctgagctgtaagtcgtcctgctcggtgggctgcgacctgccacaaactcattcgctgggcagccgaagaaccctcatgctgctggctcagatgcggagaatctccctcttctcgtgtttgaaagataggcatgattttggattcccgcaggaggagttcggaaaccagtttcagaaggccgaaaccatccctgtgctgcatgaaatgatccagcagatcttcaacctcttctctaccaaagattcatccgccgcgtgggacgagactttgcttgacaaattctacaccgagctgtaccagcaattgaacgatctggaagcgtgcgtgatccagggcgtgggagtcactgaaacgccgctgatgaaggaggactccattttggcggtccgaaaatactttcaaagaatcaccctgtatctcaaagaaaagaagtactcgccttgcgcctgggaagtggtgcgggcggagatcatgcgctcgttctccctgagcactaacctgcaggagtcgctccgctcaaaggag

SEQ ID NO: 14435 - DNA, 564 bp, synthetic construct
  misc_feature 1..564: note = source = /note="Description of Artificial Sequence: Synthetic coding sequence"
  source 1..564: mol_type = other DNA
atggcgctgactttcgccctgttggtcgccttgctggtgctgtcgtgtaagagctcatgttcggtgggatgcgatctgccacaaacccattcgctcggatccagaagaaccctcatgttgttggctcaaatgcggaggatcagcctcttcagctgccttaaggaccgccacgactttggcttccctcaggaggaattcggaaaccaattccagaaggcggagactataccagtactgcacgagatgattcaacagatcttcaatctgttcagcaccaaggattcatcggccgcttgggacgagactcttttggacaagttctatacggaactctaccagcaactgaatgatctggaggcctgcgtgatccagggggttggcgtgaccgaaacccccctgatgaaggaggactccatcctcgcagtccggaagtattttcagcgcataactctctacctgaaagaaaagaaatactccccgtgcgcatgggaagtcgtgcgcgccgagatcatgcgctcgtttagtctgtccacgaacctgcaggaatccctccggtcaaaagaa

SEQ ID NO: 14436 - DNA, 564 bp, synthetic construct
  misc_feature 1..564: note = source = /note="Description of Artificial Sequence: Synthetic coding sequence"
  source 1..564: mol_type = other DNA
atggctcttaccttcgccttgttggtggctctgcttgtactgagctgcaagtcaagctgctccgtgggctgtgacctcccccagacccactcgttggggagccggagaaccctgatgcttctggcacaaatgagaagaatctccctcttttcttgtctgaaggaccggcacgattttggatttcctcaggaggaattcggcaaccagtttcagaaagcagaaacaataccggtgcttcatgaaatgatccagcagatttttaacttgttcagtacaaaagactctagtgcagcgtgggatgagactctcctcgataagttctataccgaactctatcaacagttgaatgacctagaagcctgtgtcatccagggcgtcggtgtgacagagacccctctaatgaaggaggattcgatcctagcagtgcgcaagtacttccaacggatcactttgtatcttaaggagaagaaatactcaccttgcgcatgggaagtggtcagggcagaaatcatgcggagtttcagcctgtctactaacctgcaggaaagtctcagatctaaggaa

SEQ ID NO: 14437 - DNA, 564 bp, synthetic construct
  misc_feature 1..564: note = source = /note="Description of Artificial Sequence: Synthetic coding sequence"
  source 1..564: mol_type = other DNA
atggccctgaccttcgctctgctggtcgccctgctcgttctgagctgcaaaagcagttgcagtgtggggtgcgaccttcctcagacccacagcttaggctcgcgtaggacattgatgcttttggcacaaatgagacgcattagtctattttcttgtctgaaggatcgtcacgactttggttttccacaggaagaattcggtaatcagttccaaaaggccgagactatccctgttctgcacgaaatgatccagcaaatatttaatctgttcagtaccaaggacagcagcgccgcctgggacgagaccctgctggacaagttttatacggagctctatcagcagctgaatgatttggaagcatgtgtgatccagggtgtgggtgtcactgagactcccctcatgaaagaggacagcattctggcggtgcgcaaatactttcagcgtattaccctgtacctgaaagagaagaaatacagcccttgtgcctgggaggtggtgagggcggagattatgcgcagcttctccctgagcacgaatctgcaggagagcctgcgttcgaaagag

SEQ ID NO: 14438 - DNA, 564 bp, synthetic construct
  misc_feature 1..564: note = source = /note="Description of Artificial Sequence: Synthetic coding sequence"
  source 1..564: mol_type = other DNA
atggctttaacttttgcactattggtggcattattagttttatcatgtaaaagttcatgttcagtaggatgtgatcttccacaaacacactcacttggatcaagacgtactcttatgcttcttgcacaaatgagaagaattagtttattctcatgtcttaaagatagacatgattttggatttccacaagaagaattcggaaatcaatttcaaaaggcagaaactatcccagtgcttcatgaaatgattcaacaaattttcaatcttttttcaactaaagatagttctgcagcatgggacgaaacattattagataaattttatactgagttatatcaacaattaaacgatttagaagcatgtgtaattcaaggagttggagtaacagaaacaccattaatgaaagaagattcgattttagctgtaagaaaatattttcagagaattactctttatttaaaagaaaagaaatattctccttgtgcatgggaagttgttagagcagaaattatgagatcattttctttaagtactaatttacaagagtctttaagatcaaaagaa

SEQ ID NO: 14439 - DNA, 564 bp, synthetic construct
  misc_feature 1..564: note = source = /note="Description of Artificial Sequence: Synthetic coding sequence"
  source 1..564: mol_type = other DNA
atggcactcacgtttgctctattggttgctcttctggtcctcagctgcaaatcttcatgtagtgtgggatgcgacttgccccagacccattccctgggttcccgtcggaccttgatgcttctggcccagatgagaagaataagtctgttttcttgcctgaaagacagacacgattttggcttcccgcaggaggagttcgggaatcaatttcagaaagcagagacgattccggttttgcacgaaatgattcaacagatattcaatctgttcagcacaaaggattcgtctgcagcctgggacgagaccctgctggacaaattttataccgaactatatcagcaattgaatgacctcgaagcatgcgtgattcagggggttggtgtgacagagacccctttgatgaaggaggactctatcctagccgtacggaagtatttccagaggatcaccctctaccttaaagaaaagaagtacagcccctgcgcatgggaggtagtccgagccgagatcatgcggtcattctctttaagtaccaaccttcaggagtctttgagatctaaagaa

SEQ ID NO: 14440 - DNA, 564 bp, synthetic construct
  misc_feature 1..564: note = source = /note="Description of Artificial Sequence: Synthetic coding sequence"
  source 1..564: mol_type = other DNA
atggccctgacgtttgccctactggtcgctcttttggtcttgagttgcaagtccagctgctctgtaggctgcgatttacctcaaacccacagcctgggatccaggagaaccctgatgctactagcccagatgagacgaattagcctatttagctgtctgaaagacagacatgattttggcttccctcaggaggagttcggcaaccagttccaaaaagccgagaccattccagtgctgcacgaaatgatccaacagatcttcaatctgttcagtacgaaggactcttcagccgcctgggacgagacgttacttgataagttttacactgagctgtaccagcagctgaatgatctggaggcctgcgtcatacagggagtaggagtgactgagacccccctgatgaaagaagactcaatcttggcggtaaggaagtactttcagcgtattactctgtacttgaaagagaaaaagtattctccttgcgcctgggaagtggtccgagccgagattatgcgcagttttagcttgagcaccaatctccaggaatctctgcgatccaaagag

SEQ ID NO: 14441 - DNA, 564 bp, synthetic construct
  misc_feature 1..564: note = source = /note="Description of Artificial Sequence: Synthetic coding sequence"
  source 1..564: mol_type = other DNA
atggccttgacttttgctttgctggttgccttgctcgtgctgtcatgtaaaagttcgtgctctgtgggatgcgacctcccgcaaacccactctttaggttcccgacgtacattgatgcttctggcccaaatgcgcagaataagtctatttagctgtctaaaagaccgacacgatttcggttttccacaagaagaattcggcaaccagttccaaaaggctgaaacgattccagttctgcatgaaatgatccaacaaatttttaatctatttagcactaaagactcgtcagcggcttgggatgaaactcttcttgacaaattctatacagagctttatcaacaactgaacgacctcgaggcttgcgtaattcaaggcgttggggttacggagacgccattgatgaaggaagactctattctggctgtacgaaaatattttcaacgcattacactttacttaaaagagaaaaaatattcgccatgtgcatgggaagtcgtccgagctgaaattatgcgcagtttcagccttagcacgaacctacaagaatcactcagatccaaagaa

SEQ ID NO: 14442 - DNA, 564 bp, synthetic construct
  misc_feature 1..564: note = source = /note="Description of Artificial Sequence: Synthetic coding sequence"
  source 1..564: mol_type = other DNA
atggcccttacattcgctctcctggtggcgctgttggtactgagttgtaaatcatcttgtagtgttggatgtgatctgccacagactcattctctagggagtcggaggacactgatgcttctcgcccagatgagacgcatatctctattttcttgcctaaaagatagacacgacttcggattcccgcaggaagagtttggaaaccagttccagaaagcggaaacaatcccagtgctccatgaaatgatccaacagatatttaacctattttccactaaagattcctccgcggcatgggatgagactttgctagataaattctatacagaattgtaccagcagctgaatgatcttgaagcatgtgtcatccaaggagtgggagtcacagaaactccccttatgaaggaggattccatcctggctgtcagaaaatatttccaaagaatcactctgtatcttaaagagaaaaaatactcaccctgcgcttgggaagtcgtgcgggcggaaatcatgagatctttttcactctctacaaatctccaggaatccttaagatccaaagag

SEQ ID NO: 14443 - DNA, 564 bp, synthetic construct
  misc_feature 1..564: note = source = /note="Description of Artificial Sequence: Synthetic coding sequence"
  source 1..564: mol_type = other DNA
atggccttaactttcgcccttctggtagctctgctggtgctgtcttgtaaaagcagctgcagcgtgggctgcgatcttcctcaaacccatagtctgggctccagacggacattaatgttactggcacaaatgcggcgcatcagcctgttttcatgtctgaaggatagacacgattttggattcccacaggaggaatttggcaaccagtttcagaaggccgagacaatccctgtgctgcacgagatgatccagcaaatttttaacttattcagcacaaaggatagcagtgcagcttgggatgaaactcttttagataaattttacaccgagctgtaccagcaactcaatgacttagaggcttgtgttatccagggggtgggtgtgaccgagacacctcttatgaaggaggactcaatcctcgccgttcgaaagtacttccaacggatcaccctgtacctgaaagaaaaaaaatatagcccatgtgcctgggaggtggtacgagcagagataatgaggtctttttctctctccaccaacttacaggaatcactgaggtcaaaagaa

SEQ ID NO: 14444 - DNA, 564 bp, synthetic construct
  misc_feature 1..564: note = source = /note="Description of Artificial Sequence: Synthetic coding sequence"
  source 1..564: mol_type = other DNA
atggctctaacttttgcactgctggtcgccctcctcgtactgagttgcaagtcatcttgtagcgtagggtgtgacctgccacaaacccattctcttggttcaaggcgaaccctgatgctattggcgcagatgcgaagaatctccttgttttcgtgcctcaaggacaggcatgactttggttttcctcaggaggagtttggcaatcagttccagaaggccgagacaattcccgtgttgcacgaaatgattcaacaaatctttaacttgttctccacaaaggacagtagcgctgcctgggatgagacactactggataagttttacaccgaattataccaacagctaaatgatctcgaagcatgtgtgattcaaggcgtgggggtgacagaaactccgttgatgaaggaagactccattcttgccgtccgcaagtattttcagagaataacactgtaccttaaagaaaagaagtactccccttgcgcatgggaagttgtacgtgctgagatcatgagatccttcagccttagcaccaacctgcaggagtcactgcgcagcaaggaa

SEQ ID NO: 14445 - DNA, 564 bp, synthetic construct
  misc_feature 1..564: note = source = /note="Description of Artificial Sequence: Synthetic coding sequence"
  source 1..564: mol_type = other DNA
atggccctgactttcgcactcctcgtcgccctccttgtgctgagctgtaaatcttcgtgctccgtcggatgcgatctgccgcagacccactccttgggatcaagacgaaccttgatgctcctcgcccaaatgcggaggatttcgcttttctcctgtctgaaggaccgccacgactttggttttccccaggaggaattcgggaaccaattccagaaggctgaaactattccggtgctgcatgagatgatccagcaaatcttcaacctgttctccaccaaggactcatcggcggcttgggacgaaactctgctggataagttttataccgagctttaccaacagctgaatgacctggaagcgtgcgtgatccagggagtgggcgtgaccgaaactccactgatgaaggaagattcgatcctggccgtgcgcaagtacttccagcggatcactctctacttgaaggagaaaaagtacagcccttgcgcgtgggaggttgtccgcgcagagatcatgcggagcttctccctctcgacgaacctgcaggaatcactgagaagcaaagaa

SEQ ID NO: 14446 - DNA, 564 bp, synthetic construct
  misc_feature 1..564: note = source = /note="Description of Artificial Sequence: Synthetic coding sequence"
  source 1..564: mol_type = other DNA
atggcacttacatttgcactcctcgtggctctgttggtcctcagttgcaagtcaagctgtagcgttggttgcgatcttccccagactcattcattgggttcccggcgaaccctgatgttgcttgcacagatgcgccggatctccctgtttagttgcttgaaggacagacatgattttggcttcccccaagaagaatttggcaaccagtttcagaaggcggaaaccatcccggtgcttcatgaaatgatacaacagatatttaatttgttttcaacaaaggatagctccgccgcatgggacgagacacttctcgacaagttttacacggaactgtatcagcagctgaacgacctggaagcctgtgtcattcagggagtgggtgtgacagaaactccccttatgaaagaagattctattctcgcagtgcggaagtacttccagcgcatcactctttatctcaaggaaaaaaaatattctccgtgtgcatgggaggtggtgagagctgaaatcatgcgaagcttcagcttgtcaacaaaccttcaagagtcactgcggtccaaggag

SEQ ID NO: 14447 - DNA, 564 bp, synthetic construct
  misc_feature 1..564: note = source = /note="Description of Artificial Sequence: Synthetic coding sequence"
  source 1..564: mol_type = other DNA
atggccctgacgttcgctctcttggtcgcgctcctggtgctgagctgtaagtctagctgctctgtcggttgtgatcttcctcaaacccacagtctaggttcgcgaaggaccctgatgttgctcgctcagatgcgccgaatatctttgtttagctgtttaaaggaccgtcacgacttcggcttcccacaggaggaatttggcaatcagtttcaaaaggccgagacgattcccgtgttgcatgagatgattcaacagatctttaatctcttcagtacgaaggactcctccgcagcctgggatgagaccctgttagacaagttctatacggaactgtatcagcagctgaacgacctggaggcgtgcgtcattcagggcgtaggtgtcacggaaaccccccttatgaaggaggattccatcctagcggtgcgcaaatatttccagcgcataactctgtatctgaaggagaagaagtactccccgtgtgcctgggaagtggtgcgcgcagagataatgcgcagtttctccttgagtactaacctgcaagagtcccttcgtagcaaggag

SEQ ID NO: 14448 - DNA, 564 bp, synthetic construct
  misc_feature 1..564: note = source = /note="Description of Artificial Sequence: Synthetic coding sequence"
  source 1..564: mol_type = other DNA
atggccttgaccttcgcattgctggtcgctctccttgttctttcctgtaaatcttcatgctctgtgggctgcgatctgcctcagactcacagcctgggttctagacgcactctcatgttgctcgcccagatgaggcgcataagcctgttttcctgtttgaaggacaggcacgatttcggtttcccacaagaggaattcggaaaccagtttcaaaaggctgagaccatccccgtgctgcacgagatgatccaacaaattttcaacctgttctcaacgaaggacagctcagctgcctgggacgagacactgctggataagttctatacggaattgtatcagcaacttaatgacttggaagcttgtgttattcaaggcgtgggagtgacggagacccctctgatgaaggaggactcaatcctggctgtgaggaaatacttccaacgcataaccctgtacctgaaggagaaaaagtacagcccgtgcgcttgggaggtcgtacgcgcagagatcatgagatcattctctctttctacgaacctgcaagaatcccttaggtccaaggag

SEQ ID NO: 14449 - DNA, 564 bp, synthetic construct
  misc_feature 1..564: note = source = /note="Description of Artificial Sequence: Synthetic coding sequence"
  source 1..564: mol_type = other DNA
atggccctgaccttcgcgctgttggtcgccctcctggtgttgagctgcaaatcctcctgctccgtggggtgcgacctcccccaaactcactcactgggctcccgtcggactttgatgctactggcacaaatgcgacgaataagtctgttctcttgcctgaaggataggcatgacttcggcttccctcaggaggagttcggaaaccagttccagaaagccgaaacgatcccagtgctgcacgagatgatacagcaaatcttcaacctgttcagtactaaggatagttccgcagcatgggacgagacccttcttgacaagttttataccgaactgtaccagcagctgaatgatttggaagcttgcgtgattcagggcgtgggggtcacggaaactcctttgatgaaggaggacagcatactggctgtcaggaagtattttcagagaatcaccctctatctgaaggaaaaaaagtatagcccgtgcgcttgggaggtcgttcgtgccgaaattatgcgcagctttagtctttcaactaatcttcaggaaagcctgcggtccaaagag

SEQ ID NO: 14450 - DNA, 564 bp, synthetic construct
  misc_feature 1..564: note = source = /note="Description of Artificial Sequence: Synthetic coding sequence"
  source 1..564: mol_type = other DNA
atggccctgacatttgctctgctagtggccctgctggttttgtcttgtaagagttcttgctcggtcgggtgtgacctgccacagacccactccctgggaagccgaagaacactcatgctgctcgcacagatgcgtcgcatcagtttgttctcgtgcttaaaagataggcacgactttggcttcccccaggaagaatttggcaatcaatttcaaaaggccgagactataccagtgctgcacgaaatgatccagcagatatttaatctcttcagcacaaaggattccagtgccgcttgggatgaaacactactagataagttctacaccgagctgtaccaacaattaaatgatttggaagcctgcgttatccagggtgtcggggtcactgagacccctttaatgaaggaagatagtatcctggccgttaggaaatattttcagcgaattacgttgtatctcaaggagaagaagtattcaccatgcgcttgggaggtggtgagggctgaaatcatgcggtcattttcactctctactaacttgcaggaaagtttgcgatctaaggag

SEQ ID NO: 14451 - DNA, 564 bp, synthetic construct
  misc_feature 1..564: note = source = /note="Description of Artificial Sequence: Synthetic coding sequence"
  source 1..564: mol_type = other DNA
atggccctgacgtttgccctgttggtcgccttgttagtcttatcgtgtaaatcctcgtgttccgtgggctgcgatcttccgcagactcattctttaggaagtcgacgaacattaatgcttctggcccagatgcggcgtatctcactgttctcttgcctgaaggatcgtcatgactttggtttccctcaagaagagtttggcaaccagtttcaaaaagctgaaacaatccccgtgttacatgaaatgattcaacagatttttaacttattctcaaccaaagactcgtctgccgcttgggatgaaacactgcttgacaaattttatacagaactgtatcagcagctgaacgatttggaagcttgcgtgatccaaggtgtcggcgttacagaaacacctctgatgaaagaggattcaattctggcggtgagaaaatactttcagcggattacgctgtatctgaaagaaaaaaaatatagtccgtgcgcgtgggaggttgtaagagcggagattatgcgctcttttagtttaagcaccaatttgcaagaatcacttcgctcgaaagaa

SEQ ID NO: 14452 - DNA, 564 bp, synthetic construct
  misc_feature 1..564: note = source = /note="Description of Artificial Sequence: Synthetic coding sequence"
  source 1..564: mol_type = other DNA
atggcgctgacgttcgctctgcttgtcgcacttctcgtcctgtcatgtaagagctcttgctcagtgggctgcgacttgccccagactcactccctgggatcgcggagaaccttgatgctcctggcccagatgagaagaattagccttttctcatgccttaaggaccggcatgactttggtttcccgcaagaagaatttgggaaccagtttcagaaggccgagactatcccagtcctccacgaaatgatccaacagatcttcaacctgttcagcaccaaggactcatcggccgcgtgggatgaaactttgctggacaagttctacactgaactctaccagcaactgaacgatctggaggcctgcgtgatccagggagtgggagtgaccgaaaccccactgatgaaagaggactctatcctcgcggtgcgaaaatacttccagcgcattacgctgtatctgaaagaaaagaaatactctccgtgtgcatgggaggttgtgcgggccgagatcatgaggtcgttttccctgtctaccaatctgcaagagtccctccgctcgaaggag

SEQ ID NO: 14453 - DNA, 564 bp, synthetic construct
  misc_feature 1..564: note = source = /note="Description of Artificial Sequence: Synthetic coding sequence"
  source 1..564: mol_type = other DNA
atggcgcttacctttgcgctgctggtggcactgctggtccttagttgtaaaagctcctgttcggtcggctgcgatcttcctcaaacccattcccttggctcacgccgcactctgatgcttcttgcacagatgcgccgaatcagcctttttagctgcctgaaggacaggcatgactttggtttcccgcaggaagaatttgggaaccagtttcagaaggcagaaaccatccccgtccttcacgaaatgatccaacagatattcaatttgttttccaccaaggactcgtcagcagcatgggatgagacgctgcttgataagttctacactgaactttaccaacagcttaacgacttggaagcgtgcgttattcaaggtgtgggagtcactgaaaccccccttatgaaggaagattccattctcgcagtcaggaaatactttcaacgtattactctgtacttgaaggaaaagaaatactcaccctgtgcatgggaggtggtgagagccgagattatgcggtccttcagcctgagcactaaccttcaggagagccttaggtcgaaggaa

SEQ ID NO: 14454 - DNA, 564 bp, synthetic construct
  misc_feature 1..564: note = source = /note="Description of Artificial Sequence: Synthetic coding sequence"
  source 1..564: mol_type = other DNA
atggccctgacctttgcactgctggtggccttgttggtgctctcatgtaagtcttcttgttcggtgggttgcgatttgcctcagacgcactctctgggcagccgccggacactgatgttgctggcccagatgaggcggatctccctgttttcttgtttgaaggatcgtcacgattttggttttccacaggaagaattcggtaatcaattccagaaggctgaaacaattccggtcttgcatgaaatgattcagcaaattttcaatttgttcagtaccaaagactccagtgccgcatgggatgaaaccctcctggataagttttacaccgagttgtatcagcagctgaatgacctggaagcatgcgtgatccagggagttggcgtgacggaaacacctctgatgaaagaggatagtatccttgctgtcaggaagtacttccaacgtatcactctctatctgaaggaaaaaaaatattctccttgcgcttgggaggtcgttcgggctgagataatgaggagtttttccttaagcaccaatctgcaggaaagtctccgcagcaaagaa

SEQ ID NO: 14455 - DNA, 564 bp, synthetic construct
  misc_feature 1..564: note = source = /note="Description of Artificial Sequence: Synthetic coding sequence"
  source 1..564: mol_type = other DNA
atggctcttaccttcgccctccttgtagctcttctggtgttatcttgtaagagtagctgttccgtgggatgcgacctcccacaaacgcactcacttggttccaggaggacattgatgcttctggcacaaatgcgtagaatctctctgttcagctgcctaaaggaccggcatgatttcggatttccacaggaggagttcgggaatcagttccagaaagcagaaacaatacccgtactgcatgagatgatccagcagatcttcaacctgttcagcacgaaggacagctcagcagcgtgggacgagacactgctggataagttctacaccgagttgtaccaacagctcaacgacctagaagcttgcgtgatccagggagtgggggtgactgagactcctctcatgaaggaggactctattctggccgttcggaaatactttcagcgcattaccctgtacctgaaggagaaaaagtactcaccatgcgcctgggaagttgtccgcgctgagattatgcgcagtttttccctgagtaccaatctccaggagagtttaaggtctaaggag

SEQ ID NO: 14456 - DNA, 564 bp, synthetic construct
  misc_feature 1..564: note = source = /note="Description of Artificial Sequence: Synthetic coding sequence"
  source 1..564: mol_type = other DNA
atggcactgactttcgctctgctcgtggctctgctggtcttgtcgtgcaagagcagctgttcggtgggctgtgatctccctcaaactcactcgctgggatccaggcgtactctcatgctgcttgcccagatgcgccgcatctcgctgttttcgtgtctgaaggacagacacgacttcggtttcccccaagaggaattcggaaaccagttccagaaggcagaaaccatcccagttctgcacgaaatgatccagcagattttcaatctcttctcgaccaaagacagctccgcagcgtgggacgaaaccctgctggacaagttctacaccgagttgtaccagcagctgaacgatctggaggcctgtgtcatccagggagtgggagtgaccgaaaccccgctgatgaaggaggactcaatcctggctgtgcgaaaatacttccagcggatcacgctctacctcaaggagaagaagtactccccgtgcgcgtgggaagttgtccgggccgaaatcatgcggtccttctccctctctactaacttgcaagaaagcctcaggtcaaaggaa

SEQ ID NO: 14457 - DNA, 564 bp, synthetic construct
  misc_feature 1..564: note = source = /note="Description of Artificial Sequence: Synthetic coding sequence"
  source 1..564: mol_type = other DNA
atggcactgacttttgccctcctcgtcgctctgctggtactgagttgtaaatctagttgttctgtgggctgcgacttgccccaaacccattctctgggctcccgccgcaccctcatgctcctggcccaaatgcggagaatctccctcttcagctgtctcaaggatcgtcatgatttcggttttccccaggaggagttcgggaatcaatttcagaaggccgagactatccccgtcctgcacgagatgatccaacagatctttaatctgttcagcactaaggactctagcgccgcttgggacgagaccctgctggataagttttacacggagctctaccagcagctaaacgatttggaggcttgcgttatccagggtgttggggtcacggaaacgcctctcatgaaggaagactcaatcctggcagtgagaaagtactttcaacgtatcaccctgtacttgaaggagaagaagtactccccatgcgcctgggaggtggtgagagctgagattatgcgctcttttagcctgagcaccaacctccaagagagcttgcgttccaaggag

SEQ ID NO: 14458 - DNA, 564 bp, synthetic construct
  misc_feature 1..564: note = source = /note="Description of Artificial Sequence: Synthetic coding sequence"
  source 1..564: mol_type = other DNA
atggcgctcacattcgccctcctggttgccctgctagtcctctcatgcaagagcagttgctctgtcgggtgtgacctgccacagacacacagcctaggatcccgtcgtacccttatgcttctggcgcagatgcgcagaatctccctcttttcttgtttaaaggatcggcatgacttcgggtttcctcaggaggagttcgggaaccagttccagaaggcggagaccatcccagtccttcatgaaatgatacaacaaatattcaacttattctctactaaggatagtagtgcggcatgggacgagaccctgctggacaaattttatactgagctgtatcagcaacttaatgatttagaggcatgcgtgatccagggcgtgggcgttacggagacccccttaatgaaagaggattctattctcgctgtacgtaagtatttccagcgcatcaccctgtatctcaaagaaaagaagtatagcccctgtgcttgggaggtcgtgagagctgagattatgcgatccttttcactgagcaccaatctgcaagagagcctgaggagtaaggag

SEQ ID NO: 14459 - DNA, 564 bp, synthetic construct
  misc_feature 1..564: note = source = /note="Description of Artificial Sequence: Synthetic coding sequence"
  source 1..564: mol_type = other DNA
atggcgctgacctttgcgctcctcgttgcattgttggtcctgtcgtgcaaatcgtcctgctcagtgggctgcgacctcccccagacccatagcctggggagccgccgcaccttgatgctcctggcccaaatgcggcggatctccttgttctcgtgcctgaaagatagacacgactttggattcccgcaggaagaattcggaaatcaattccagaaggcggaaactataccggtgctccatgagatgatccagcagatcttcaacttgttttcgacgaaggactcgtcggctgcttgggatgagactttgctcgacaaattctacactgaattgtaccagcaattgaacgatctcgaagcctgtgtgattcagggtgtcggagtgaccgaaacccctctgatgaaggaagatagcattctggcagtgcgtaagtacttccaaagaatcactctctacctgaaggagaagaagtactccccttgtgcctgggaagtggtgcgggcagaaatcatgcggagcttttcgctgtcaaccaatcttcaggagtcactgaggagcaaggaa

SEQ ID NO: 14460 - DNA, 564 bp, synthetic construct
  misc_feature 1..564: note = source = /note="Description of Artificial Sequence: Synthetic coding sequence"
  source 1..564: mol_type = other DNA
atggctctaactttcgccctattggtggctctgctggtcctctcctgtaagtccagctgctccgtggggtgtgatctcccgcagacccatagcctgggtagccgcaggacacttatgctcttggctcagatgagacgaataagtttgttctcttgccttaaagaccggcatgactttgggttccctcaggaagaatttggcaaccagtttcagaaagctgaaacaattcctgtcctgcacgagatgatccagcagatcttcaacttattttccacaaaagatagcagtgctgcgtgggacgagactctgttggataaattctacacggagctctaccaacagctgaatgacttggaagcctgtgtgatacagggtgtgggggtgacagagactcccctgatgaaggaggattcgatcctggctgtgcgcaagtatttccagagaatcaccctctacctgaaagagaagaaatatagcccttgcgcgtgggaggtggttagagctgagattatgcgttcattttccttgtccacaaatcttcaggaaagtctaagatccaaggag

SEQ ID NO: 14461 - DNA, 561 bp, synthetic construct
  misc_feature 1..561: note = source = /note="Description of Artificial Sequence: Synthetic coding sequence"
  source 1..561: mol_type = other DNA
atgaccaataagtgcttgctccagatcgccctcctgctctgcttttccactactgcactgagcatgtcgtacaatctcctgggcttcctccagcgttcatcgaacttccagtgtcagaagctgctgtggcaactgaatggtcgacttgaatactgccttaaagatcgcatgaacttcgacatcccggaggagatcaagcaattgcagcagttccaaaaggaggatgcggccttgacgatctatgaaatgttgcaaaacatctttgcaatcttccgccaggactcatctagcaccggatggaacgagactatagtcgaaaatcttctggctaacgtgtaccatcagatcaatcatctgaaaactgtccttgaggaaaagctggagaaggaagatttcactcgcggaaaactcatgtccagcttgcacctcaaacggtactacgggcgcattttgcactacctcaaggccaaggaatactcgcactgcgcgtggaccatcgtgcgggtggaaatcctgcgtaacttctactttatcaataggttgaccggttatctgcgcaac

SEQ ID NO: 14462 - DNA, 561 bp, synthetic construct
  misc_feature 1..561: note = source = /note="Description of Artificial Sequence: Synthetic coding sequence"
  source 1..561: mol_type = other DNA
atgaccaataagtgccttctacagattgcactcttactgtgcttttccacaacagccctgtcaatgtcctataatctgctggggtttctacagcggagcagcaatttccagtgccagaaattgctgtggcagctcaatggccgcttggaatattgtttaaaggataggatgaactttgacattccagaggagataaagcagctgcaacagttccagaaagaagacgccgccttaacaatatacgaaatgcttcagaatatttttgctatattcaggcaggactcaagctccacgggttggaacgagacgatcgtggaaaacctacttgccaacgtatatcatcaaatcaatcacctgaagaccgtacttgaggaaaagctggagaaggaggattttactcggggaaaactcatgagttcactgcatctgaaacggtactatggacggatcctgcattacctgaaggctaaggagtacagccattgcgcttggactatcgttcgggtggagatccttagaaacttctacttcattaatcgcctgaccgggtacttgcggaat

SEQ ID NO: 14463 - DNA, 561 bp, synthetic construct
  misc_feature 1..561: note = source = /note="Description of Artificial Sequence: Synthetic coding sequence"
  source 1..561: mol_type = other DNA
atgactaacaagtgccttcttcaaattgcactcttgctgtgcttctcaaccaccgcgctgtccatgtcctacaaccttcttggatttctccagaggtcgagcaactttcaatgtcagaaattgctttggcaactcaatggacggctggaatactgtcttaaggatcgtatgaactttgatatcccggaagagattaaacaactgcaacagtttcagaaggaggacgcagcacttactatctacgaaatgcttcagaatatcttcgcaatctttcggcaggacagcagctcaacggggtggaacgagactatagttgagaacctcctggccaatgtgtaccaccagattaaccacctcaagacggtgcttgaagagaagctggaaaaggaggactttactcgaggtaaacttatgtcatcgctgcatcttaagcggtattacggaagaatccttcactaccttaaggctaaagaatacagccactgtgcatggactatcgtgagagtggaaatactgcggaatttctacttcatcaaccgcctcactggctacctgcgtaat

SEQ ID NO: 14464 - DNA, 561 bp, synthetic construct
  misc_feature 1..561: note = source = /note="Description of Artificial Sequence: Synthetic coding sequence"
  source 1..561: mol_type = other DNA
atgaccaacaaatgcctgctgcagattgccttactcttatgtttcagcacaaccgctctatccatgtcctataacctcctgggcttcctacagcgctcaagcaatttccagtgccagaagttactctggcagctcaatggaagattggaatactgtctgaaagaccgaatgaactttgacatcccagaggagatcaagcagttacagcagttccagaaggaggacgctgcactcactatctatgaaatgctccagaacattttcgccatctttcgccaggacagctctagcaccgggtggaatgagacaatcgtagaaaatttgctggcgaatgtgtaccaccagattaaccacctgaagaccgtgctcgaagaaaaactggaaaaggaggacttcacacgcggtaagttgatgagttccctgcatctgaagaggtactacggccgcattttgcactatctgaaggcaaaagagtattctcattgcgcttggaccatcgtgcgagttgaaatactgcgaaatttttatttcataaaccggctgactggttatctgcgcaat

SEQ ID NO: 14465 - DNA, 561 bp, synthetic construct
  misc_feature 1..561: note = source = /note="Description of Artificial Sequence: Synthetic coding sequence"
  source 1..561: mol_type = other DNA
atgaccaacaagtgtctgcttcagatcgccttgcttttgtgtttttcaaccactgcgctgtccatgtcatacaatctcctgggttttctgcagagatcttcgaactttcaatgccaaaaacttctctggcagctgaacggtagacttgagtactgccttaaggataggatgaatttcgatatccccgaggagataaagcaacttcagcagttccaaaaggaagatgcagctctgaccatatacgagatgctccaaaacatctttgccatttttcgccaggactcgtcatccactggatggaatgaaaccattgtcgaaaacctgcttgctaatgtctaccatcagataaaccatcttaaaaccgttcttgaagaaaaactcgaaaaggaggatttcacccgcggaaagttgatgtcctccctgcatcttaagcggtactatggaaggattttgcactaccttaaggccaaggaatactcccactgtgcatggactatcgtgcgcgtcgaaatactgcggaacttctacttcatcaacagacttaccggatatcttcggaac

SEQ ID NO: 14466 - DNA, 561 bp, synthetic construct
  misc_feature 1..561: note = source = /note="Description of Artificial Sequence: Synthetic coding sequence"
  source 1..561: mol_type = other DNA
atgacgaacaagtgccttcttcagattgctctgcttctgtgcttttcaaccactgccctctcgatgtcctacaatctccttgggtttctgcaacggtcaagtaactttcaatgtcagaaacttctctggcaactgaatggccggcttgaatactgtctgaaggatcggatgaatttcgacattcccgaagagattaagcagctccagcagtttcagaaggaagatgcggcactgactatttacgagatgcttcagaacatcttcgccatttttcgccaagatagctcctctactgggtggaacgaaaccattgtcgagaacctgcttgcaaacgtgtaccatcagattaaccatcttaagactgtgttggaagagaagctggagaaagaagatttcaccagaggaaagctcatgtcatcgttgcaccttaagaggtactacggcagaattcttcattaccttaaggcaaaagaatactcgcactgtgcctggacgattgtgagagtggagattcttaggaacttttacttcataaaccgactgaccgggtatctccgcaac

SEQ ID NO: 14467 - DNA, 561 bp, synthetic construct
  misc_feature 1..561: note = source = /note="Description of Artificial Sequence: Synthetic coding sequence"
  source 1..561: mol_type = other DNA
atgaccaacaaatgtctgctccaaattgcactgctgctgtgtttcagcactaccgcactgtccatgtcctacaacttgcttggattccttcaacgctcgagcaacttccaatgtcagaaactgctctggcaacttaatggtcgactggagtactgcctgaaagaccgaatgaacttcgatattccagaggagattaagcaactgcagcaatttcagaaggaggacgcagcactcaccatttacgagatgctgcagaacatattcgcaatctttcggcaagattcgtcatccactggatggaacgaaaccatcgtggaaaaccttctcgcaaacgtctaccatcagattaaccaccttaagacggtgctggaggaaaagctggaaaaagaggattttacgcgcggaaagttgatgtcgagcctgcacctgaagcgatactacggccgcatcctccattacctcaaggcaaaggagtactcacattgcgcatggactatcgtgagggtggaaattctgagaaatttctatttcattaatcgcctgactggataccttaggaac

SEQ ID NO: 14468 - DNA, 561 bp, synthetic construct
  misc_feature 1..561: note = source = /note="Description of Artificial Sequence: Synthetic coding sequence"
  source 1..561: mol_type = other DNA
atgaccaacaagtgtcttctccagattgctctgttgctctgcttctctacaaccgcattaagcatgtcctataatctcctgggcttccttcagcggtcttctaactttcagtgccaaaaactgctctggcaattgaacgggcgacttgagtactgtctcaaggataggatgaatttcgacattcccgaagagattaaacaattgcaacagtttcagaaagaagatgctgctctgaccatatacgagatgttgcagaacatcttcgctatctttcgccaagacagtagctccaccggctggaatgagaccattgtggagaatctgttggccaacgtctaccaccagatcaaccacttgaaaactgtgctcgaagagaagctggaaaaggaggactttacacggggcaagctcatgagttcactgcacctgaaaagatactacgggcggatccttcattacctgaaagccaaagagtactctcactgtgcttggaccattgtccgcgtagaaattttgagaaacttctacttcatcaatcgcctcacaggctaccttagaaac

SEQ ID NO: 14469 - DNA, 561 bp, synthetic construct
  misc_feature 1..561: note = source = /note="Description of Artificial Sequence: Synthetic coding sequence"
  source 1..561: mol_type = other DNA
atgacgaataagtgcctgcttcagattgcactgctgctttgcttttccaccactgcactttcgatgagctacaacttgttggggtttctgcagaggagttctaacttccagtgccagaaactgctttggcagcttaacggacgcctcgaatactgcttgaaggacagaatgaacttcgatattccagaggagattaagcaactccagcagttccaaaaagaagatgccgccctcactatctatgagatgctgcaaaacattttcgcgatctttcggcaagacagctcctcgacgggctggaacgaaaccatcgtggaaaatctgctcgccaacgtgtatcaccagatcaatcatcttaagaccgtcctcgaagaaaagctggagaaggaggatttcaccagaggtaaattgatgtcctcgctgcatctgaaacgctattacggacgcatcctgcactaccttaaagctaaggagtacagccactgtgcatggaccatagtgcgcgtggaaatcctgcggaacttctactttatcaataggttgaccggatacctgcgcaat

SEQ ID NO: 14470 - DNA, 561 bp, synthetic construct
  misc_feature 1..561: note = source = /note="Description of Artificial Sequence: Synthetic coding sequence"
  source 1..561: mol_type = other DNA
atgaccaacaaatgcctgctgcaaatcgccctgctgctgtgcttctccactaccgcactttcgatgtcgtacaatttgctggggttcctgcagcgcagcagcaacttccagtgccagaagttgttgtggcagctgaatggtcggctggagtactgcctcaaggacaggatgaacttcgatatccctgaagaaatcaaacagctgcaacagttccagaaggaggacgccgctctgaccatctacgaaatgctgcagaacatctttgcgatctttcgacaggactcgtcctcgacgggctggaacgaaaccatcgtggaaaacctcctcgccaatgtttaccaccaaatcaatcacctcaaaaccgtgctcgaagagaagctcgagaaagaagatttcacgcggggaaaactgatgtcctcgctccacctgaagcgatactacggacgcatcttgcactaccttaaggccaaggagtacagccattgcgcctggactatcgtccgggtggagattctgcgcaacttctacttcatcaaccgtctgaccggatacctgaggaac

SEQ ID NO: 14471 - DNA, 561 bp, synthetic construct
  misc_feature 1..561: note = source = /note="Description of Artificial Sequence: Synthetic coding sequence"
  source 1..561: mol_type = other DNA
atgacaaataaatgcttgttgcaaattgctttattactgtgtttttcaacaacggctttgagtatgagttacaatttgctaggatttctacaacgatcctctaatttccaatgtcaaaagttactctggcagctcaatggacgactggaatattgtctaaaagaccggatgaattttgacattcccgaagaaatcaagcagttacaacagtttcaaaaagaggacgctgccctcacaatttatgaaatgttacagaatatctttgccatttttcggcaggactcatcttcaaccggatggaatgagactattgtcgagaatcttttggctaatgtctaccatcaaattaatcatcttaaaactgttcttgaagaaaaattggagaaagaggattttacaagaggaaaactgatgtcaagcttacatttgaagagatactacggccgtatcttacattacctcaaagccaaagaatattctcattgtgcatggactatagtgagagtagagatcctccgcaacttctattttataaaccgactgacggggtacttacgcaat

SEQ ID NO: 14472 - DNA, 561 bp, synthetic construct
  misc_feature 1..561: note = source = /note="Description of Artificial Sequence: Synthetic coding sequence"
  source 1..561: mol_type = other DNA
atgaccaacaaatgtctcctccagatcgccctgctgctgtgcttcagcactaccgcactttccatgtcatataaccttcttggattcctgcaacgttcatcaaacttccagtgccagaagttgctctggcagctgaatggacgactggaatactgcctgaaggaccgcatgaacttcgatataccagaagaaatcaagcagctccaacagtttcagaaggaggacgccgctttgaccatttacgagatgctccaaaacatctttgcaatctttaggcaagactcgtcgtcgacgggctggaacgagactattgtggaaaaccttttggcaaacgtctaccatcagattaatcatttgaaaaccgtcttggaggaaaaacttgaaaaggaggattttacccgtggaaaacttatgtcgtccctgcacctcaaacggtactacggcagaatcctgcactaccttaaagccaaagaatactctcattgcgcttggaccatcgtgcgcgtggagattcttcgcaacttttacttcattaaccgccttacggggtacctccgtaat

SEQ ID NO: 14473 - DNA, 561 bp, synthetic construct
  misc_feature 1..561: note = source = /note="Description of Artificial Sequence: Synthetic coding sequence"
  source 1..561: mol_type = other DNA
atgactaacaagtgtctactgcagatagctcttctgctctgtttcagcaccaccgccttgagcatgagctacaatttactgggcttcctgcaacgtagctccaattttcagtgccagaagctgctttggcagctgaacggccggctggagtattgtctgaaggacagaatgaatttcgatattcctgaagaaatcaagcagttacagcagttccagaaagaagacgcagctctgaccatctatgagatgctccaaaacatttttgcaattttccggcaggactcttctagcactgggtggaacgagactattgtggaaaacctgctggccaacgtatatcaccaaataaaccatctgaaaacagtgctagaggaaaaacttgaaaaagaggacttcacaaggggcaaattaatgtcttccctccacctgaagcgctactacggccgaattctccactatctgaaggctaaggagtactctcactgcgcctggacaattgtgcgggtggagatcctgagaaacttctattttatcaaccgcttaacagggtacctgagaaac

SEQ ID NO: 14474 - DNA, 561 bp, synthetic construct
  misc_feature 1..561: note = source = /note="Description of Artificial Sequence: Synthetic coding sequence"
  source 1..561: mol_type = other DNA
atgaccaacaagtgtctcctccagatcgccctgctgttatgcttctccacgaccgcactctccatgtcctacaacctgttggggtttttgcagagatcctccaatttccagtgtcagaagctgctgtggcagctgaacgggcgcctcgaatactgtctgaaagacagaatgaatttcgatatacccgaagagattaagcagttgcagcaattccagaaggaggacgcagctttgacgatctatgagatgctgcagaacatcttcgctatcttccgacaggatagctccagcaccgggtggaatgaaacaatcgtggaaaatctcctggcaaatgtctaccatcagataaaccacctaaagacggtgctcgaagagaagctggaaaaggaggactttacgaggggcaaactgatgagctcccttcacctgaaacggtactacgggagaattctgcactacctgaaggccaaggagtactcccattgcgcctggacgattgtgcgcgtggaaatcctgcgaaatttttatttcatcaatcgcctgactggctacctgaggaat

SEQ ID NO: 14475 - DNA, 561 bp, synthetic construct
  misc_feature 1..561: note = source = /note="Description of Artificial Sequence: Synthetic coding sequence"
  source 1..561: mol_type = other DNA
atgactaataagtgtctcctacagattgccttgcttctttgtttcagtactactgccctgtcaatgtcgtataatctcctaggctttcttcaaaggagttccaacttccagtgccagaagctgttgtggcagctgaatggtaggctggaatactgcctgaaggaccggatgaattttgacattccagaggagatcaagcagctgcagcaattccagaaggaggacgccgccctgactatctacgagatgctacagaacatcttcgctatattcaggcaggactcctcaagcaccggctggaatgaaacaatcgtggaaaacctgctggcaaatgtataccatcagatcaaccatctgaagacagtccttgaggagaaacttgagaaggaggacttcacgcgcggtaagctgatgtcctcccttcacctgaagagatattatggccggattctgcattacttgaaggctaaggagtactcacactgcgcctggacaatcgtgagagtggagatattgcgcaatttttacttcatcaatcgcctgaccggttacctccgtaac

SEQ ID NO: 14476 - DNA, 561 bp, synthetic construct
  misc_feature 1..561: note = source = /note="Description of Artificial Sequence: Synthetic coding sequence"
  source 1..561: mol_type = other DNA
atgactaataaatgtctcctccagatagctttgctcttatgcttctctactacagcactcagtatgagttacaatctcctcgggttcctccagagatcatctaatttccaatgtcagaaactgctctggcagctcaatggacggctcgaatactgtcttaaagatcggatgaattttgatattcctgaagaaataaaacagctccagcagttccagaaagaagatgctgctctcactatttacgaaatgttacagaacattttcgctattttcaggcaggactcttctagtacgggatggaatgagacgatcgtggaaaaccttttggccaacgtgtatcaccagataaatcatctcaaaacagtgctcgaggaaaaacttgaaaaagaagattttacacgagggaaactcatgtcttcactccacctaaagaggtattatgggcgaatattgcactacctcaaagctaaagaatattctcattgcgcctggactatagtgagagtagaaattctccgaaatttttattttataaataggttaactgggtatctccgaaat

SEQ ID NO: 14477 - DNA, 561 bp, synthetic construct
  misc_feature 1..561: note = source = /note="Description of Artificial Sequence: Synthetic coding sequence"
  source 1..561: mol_type = other DNA
atgacgaacaagtgcttgctgcagatcgccctcctcctgtgcttctctaccactgccctgagcatgtcctataatttgctgggttttctgcagagatcttctaatttccagtgccagaagttgctgtggcaattgaacggacggttggagtattgcttgaaggaccgcatgaactttgatattcctgaggagatcaaacagctccagcagtttcagaaggaggatgccgcattgacaatctatgagatgctacaaaatatttttgctatttttcgacaggactctagctccactggatggaacgagacgatagttgagaacctgctggccaatgtataccaccaaatcaaccacctgaaaacggttttagaagagaaactagagaaggaagatttcacccgtggcaaactcatgtcgtccctgcacctgaagcggtactatgggcgaatccttcattacctcaaagcgaaggagtattcgcactgcgcctggacaatcgttcgagtggaaatcctgagaaacttctactttatcaaccggctcactggctatttacgcaat

SEQ ID NO: 14478 - DNA, 561 bp, synthetic construct
  misc_feature 1..561: note = source = /note="Description of Artificial Sequence: Synthetic coding sequence"
  source 1..561: mol_type = other DNA
atgacaaataaatgtcttttacagatcgctctgttgctttgcttctcgacaacagcactgtccatgtcgtacaacctgttggggttcctccagagatctagtaattttcagtgtcaaaaactattatggcagctgaatgggcggcttgaatattgtttgaaagatagaatgaatttcgatatacctgaagaaatcaaacagttacagcagtttcagaaggaagatgccgccctgactatctatgagatgttgcagaacatctttgcgattttccgccaggattcctcttctacagggtggaatgagacaatagtagaaaatctcttagccaacgtgtatcaccagataaaccacttaaaaacagtgctggaagaaaaacttgaaaaagaagatttcacacgaggaaaactcatgtcctctctccatctgaaaaggtattatggacgcatacttcactatcttaaagcaaaggaatattcgcattgtgcctggacgatcgtgagagtagaaatactcaggaatttctattttatcaatcgactaacagggtatcttcgcaac

SEQ ID NO: 14479 - DNA, 561 bp, synthetic construct
  misc_feature 1..561: note = source = /note="Description of Artificial Sequence: Synthetic coding sequence"
  source 1..561: mol_type = other DNA
atgactaataagtgtctgctgcaaatcgcactcctgctgtgcttctcgaccacggcgctgtccatgtcctacaatctgcttggcttcttgcagcgcagctccaattttcagtgccagaagttgttgtggcagctcaacggacgcctggagtactgtctgaaagaccgcatgaattttgatatcccagaagagattaagcagttgcagcaattccagaaggaggacgctgctctcacgatctacgagatgcttcaaaacatcttcgcaatcttccgccaagactccagcagcactggttggaacgagactatcgtggagaatctcctcgccaacgtgtatcaccaaatcaaccatctgaaaaccgtgcttgaggaaaaactggaaaaggaggatttcacccggggaaaactcatgtcaagcctccacctgaagagatactacggccggattctccactacttgaaggcgaaggaatactcccactgcgcatggactattgtgagagtcgaaatcctgcggaacttctacttcattaatcgcctgaccggatacctccgcaat

SEQ ID NO: 14480 - DNA, 561 bp, synthetic construct
  misc_feature 1..561: note = source = /note="Description of Artificial Sequence: Synthetic coding sequence"
  source 1..561: mol_type = other DNA
atgactaacaaatgccttctgcagatcgcactgctcctttgtttttctaccaccgcactctcaatgagctacaatctgctgggctttcttcaaagatcctccaatttccagtgtcaaaaacttctttggcagcttaacggacgcctggaatactgcctcaaggatcgcatgaacttcgacattcctgaagagatcaagcagctccagcaattccaaaaggaggacgcggcactcaccatctacgaaatgctgcaaaacatcttcgcaatcttcaggcaagattcgtccagcacgggatggaatgaaaccatcgtcgagaaccttcttgctaacgtgtatcaccagattaatcatcttaagacggtgcttgaggaaaagctcgaaaaggaagatttcacccgtggtaagctgatgtcatcccttcacctgaagaggtactacggccgcattttgcactatcttaaggcaaaggaatactcgcactgcgcctggactattgtgcgggtggaaatcctccgcaacttctacttcatcaatagactgaccggataccttagaaac

SEQ ID NO: 14481 - DNA, 561 bp, synthetic construct
  misc_feature 1..561: note = source = /note="Description of Artificial Sequence: Synthetic coding sequence"
  source 1..561: mol_type = other DNA
atgaccaacaagtgtctgctccaaatcgcactcctcctgtgtttttccactaccgcgctgtccatgtcgtacaacctcttgggctttttgcaacggtcgagcaatttccaatgccagaaactgctgtggcagcttaacgggcgactcgaatactgtctcaaggatagaatgaactttgatattcctgaagagattaagcaactgcagcaatttcagaaggaggacgcagcactcacgatttacgaaatgcttcaaaacatatttgccatcttccgccaagactcctcatcgactggttggaacgaaaccattgtcgagaaccttttggcaaatgtttaccatcagattaatcatctcaaaactgtgctggaagaaaagctggagaaggaagattttaccaggggaaaattgatgtcaagcctgcaccttaaacgttactacggacgaattttgcattatcttaaggccaaggaatacagtcactgcgcctggaccatcgtaagagtggagatactgaggaatttctacttcattaatcggcttactggttacctgaggaac

SEQ ID NO: 14482 - DNA, 561 bp, synthetic construct
  misc_feature 1..561: note = source = /note="Description of Artificial Sequence: Synthetic coding sequence"
  source 1..561: mol_type = other DNA
atgaccaataagtgcctcttgcagatcgcccttctgctctgtttctcaacgaccgccttgtcgatgtcttataacctcctgggatttctgcaaaggagctcaaatttccagtgtcagaagctgctgtggcagttgaacggcagattggaatactgcctcaaagacaggatgaatttcgacatcccagaggaaatcaagcagctgcaacaattccaaaaggaggacgctgcactgaccatttacgaaatgctgcagaacatctttgcgatcttccgccaggactcctcctccaccggttggaatgaaactatcgtggaaaacctgcttgccaatgtctaccaccagatcaaccatctcaagaccgtcctcgaggaaaagctggagaaggaggacttcactcgcggcaaattgatgtcctcgctgcaccttaagaggtactacggacgtatcctgcattacctgaaggcgaaggaatattcccattgtgcgtggactatcgtgcgggtcgagatcctgcggaacttttacttcatcaatcgcctgaccgggtacctccggaac

SEQ ID NO: 14483 - DNA, 561 bp, synthetic construct
  misc_feature 1..561: note = source = /note="Description of Artificial Sequence: Synthetic coding sequence"
  source 1..561: mol_type = other DNA
atgactaataaatgtcttcttcaaattgctttattattatgtttttcaactacagcacttagtatgtcatataatcttttaggttttttacaaagatcatctaattttcaatgtcaaaagttattatggcaattaaatggaagacttgaatattgccttaaggatagaatgaattttgatatacctgaagaaataaaacaacttcaacaattccaaaaagaagatgcagctttaacaatttatgaaatgttacaaaatatttttgctattttcagacaagatagttctagtacaggatggaatgaaactattgtagaaaacttactagcaaatgtatatcatcaaattaatcatcttaaaactgttcttgaagaaaaattagaaaaagaagatttcactagaggtaaattaatgtcttcattacatttaaaaagatattacggaagaatcttacattatttaaaggcaaaagagtattcacattgtgcctggactatcgtaagagttgaaattctaagaaatttttattttattaatagattgacaggatatttaaggaat

SEQ ID NO: 14484 - DNA, 561 bp, synthetic construct
  misc_feature 1..561: note = source = /note="Description of Artificial Sequence: Synthetic coding sequence"
  source 1..561: mol_type = other DNA
atgacgaataagtgcttattgcagattgccttgcttctctgcttttctacgaccgccttatcgatgtcatataatctgttgggctttctccagcgttccagcaactttcagtgccagaagctcttgtggcagcttaacgggagactggaatactgtctgaaagatagaatgaattttgacatcccagaggagattaagcagctgcaacagttccagaaggaggatgccgcattaacaatttacgaaatgttacagaatatttttgctatttttaggcaggactcctcaagtactggatggaatgaaaccattgtggagaatctcttagccaacgtctatcatcagattaaccacctaaagacggtactcgaggaaaaattggagaaagaggacttcacacgtggaaaactgatgagctctttacaccttaaaaggtattacggaaggatactgcactacctcaaggcaaaagaatatagccactgcgcctggaccatcgtgagagtggaaatcctgcgcaacttttattttataaatcgcctgacaggctatttgcgcaat

SEQ ID NO: 14485 - DNA, 561 bp, synthetic construct
  misc_feature 1..561: note = source = /note="Description of Artificial Sequence: Synthetic coding sequence"
  source 1..561: mol_type = other DNA
atgaccaataaatgccttcttcagatcgcccttctgctctgttttagcacaaccgcactgagcatgtcctacaatctgctgggtttcttacaaaggagcagcaacttccaatgccagaagctgctctggcaactcaatggtagacttgaatactgcctgaaggataggatgaattttgatattcccgaggaaattaagcaattgcagcagttccaaaaagaagatgcagcacttaccatctacgagatgctgcaaaacatatttgcgatctttagacaagattcctccagtacaggatggaatgaaactatcgttgaaaatcttcttgcaaacgtctaccaccaaattaaccatctcaagacagtgctggaggagaaactggagaaagaggattttactcgggggaagctgatgagttcactccatctgaaaagatactatgggcggatcttgcactatctgaaggcaaaggaatatagccattgtgcctggaccattgtccgcgtggaaatcctcagaaacttctacttcatcaacaggctgacagggtacctgcgcaac

SEQ ID NO: 14486 - DNA, 561 bp, synthetic construct
  misc_feature 1..561: note = source = /note="Description of Artificial Sequence: Synthetic coding sequence"
  source 1..561: mol_type = other DNA
atgaccaataagtgcctgctgcagatcgccctgcttctgtgcttttctaccactgctctctcaatgtcctataatctgctcggattcctgcaacggtcgtccaatttccagtgccagaaactgctttggcaacttaacgggcgcctggaatactgcctcaaggataggatgaactttgacattccagaggagatcaaacagttgcagcagtttcaaaaggaggacgcggctcttaccatctacgaaatgctccagaacatcttcgcgatcttccggcaagactcgagctccaccggatggaacgagactatagtggagaatctgttggcaaacgtgtaccaccagattaaccatctgaaaaccgtcttggaagaaaagctcgagaaggaagatttcactagaggcaagctcatgtcatcgctccaccttaaacgctactacggtagaatcttgcattacctcaaggccaaggaatacagccactgtgcctggactatcgtgagagtcgaaatccttcgcaatttctacttcataaaccgactgacgggatacctccgaaac

SEQ ID NO: 14487 - DNA, 561 bp, synthetic construct
  misc_feature 1..561: note = source = /note="Description of Artificial Sequence: Synthetic coding sequence"
  source 1..561: mol_type = other DNA
atgacgaataagtgccttttgcaaatcgccctgttgctatgctttagtaccacggccctgagtatgagctacaacctgctcgggttcctgcagcgcagttcgaacttccagtgccagaagctgctgtggcaactaaatggccgattggaatactgtctgaaggatagaatgaattttgatatccccgaagagatcaaacaactgcagcaattccagaaggaggacgctgctttaaccatctacgagatgctgcaaaatatctttgcaattttcaggcaggatagttccagcaccggatggaatgagacaattgtggagaatctgctcgcgaacgtgtaccaccagatcaaccaccttaagacagtactggaggagaaactagagaaggaggactttacacggggcaaactgatgtcgtcccttcatcttaaacggtactacggacgcatactccactatttgaaggctaaggaatacagtcactgcgcctggaccatcgtgcgtgtggaaatccttcgtaatttttactttataaacaggcttacaggatacctccggaac

SEQ ID NO: 14488 - DNA, 561 bp, synthetic construct
  misc_feature 1..561: note = source = /note="Description of Artificial Sequence: Synthetic coding sequence"
  source 1..561: mol_type = other DNA
atgacaaacaagtgtctgctgcagattgccctcttgctgtgcttcagcactacggccttgtccatgtcttataatcttctggggtttctgcaaaggtcaagtaatttccagtgtcagaagctgctctggcagctgaatggaagactcgagtactgtctcaaagacagaatgaatttcgatattccagaagaaatcaagcagttgcagcaattccagaaggaggacgccgcacttaccatttatgaaatgcttcagaatatcttcgctatctttaggcaggactcttcctctaccggatggaacgaaacaattgtcgaaaatctgctggctaacgtctaccaccagatcaatcacctgaaaaccgtgcttgaggagaaactcgagaaggaggacttcacgagggggaaactgatgtcttcactccacctgaagcggtactacggccgcatactgcattacctcaaggctaaagagtactcacactgtgcttggacaattgtgcgggtagaaatactcaggaacttctacttcatcaaccggcttacaggatacctgcgcaac

SEQ ID NO: 14489 - DNA, 561 bp, synthetic construct
  misc_feature 1..561: note = source = /note="Description of Artificial Sequence: Synthetic coding sequence"
  source 1..561: mol_type = other DNA
atgaccaataagtgtctgctccagatcgcactcctcctgtgcttttccactactgcactgtctatgagctacaacttgctgggattcctgcagcgctcgagcaattttcaatgtcagaagctcctttggcagctgaatggacgcctggaatattgtctgaaggaccgcatgaacttcgatatcccggaagaaatcaagcaattgcaacagtttcaaaaggaagatgctgccctgactatctacgagatgctgcaaaacatctttgctatctttcgacaggactcctcctccacggggtggaacgaaactattgtggaaaatctgctggccaatgtgtaccatcaaatcaaccacctcaagacggtgctggaagaaaaactggaaaaggaggatttcaccaggggaaaacttatgagctcactccatctgaaacggtactacggacggatcctgcattacctcaaagctaaagaatactcccattgcgcctggactatcgtccgcgtcgagatcctccgcaacttctacttcatcaacagactgaccggatacctccgcaac

SEQ ID NO: 14490 - DNA, 561 bp, synthetic construct
  misc_feature 1..561: note = source = /note="Description of Artificial Sequence: Synthetic coding sequence"
  source 1..561: mol_type = other DNA
atgactaacaagtgtctgctgcagatagcacttctcctctgcttctctactacagcactcagtatgtcatacaatctgcttggctttctgcagcgatctagtaattttcagtgccagaaactgctctggcagttgaacggtcggctcgagtactgtctcaaagacagaatgaatttcgacatacccgaagagataaagcagttgcagcagtttcagaaggaagacgccgccctcaccatctacgaaatgctgcagaatatctttgcaatcttcagacaagattcttccagcaccggatggaatgagacaatagtggagaaccttctcgccaacgtctatcatcagataaaccacctcaaaaccgtgctggaggaaaaacttgagaaagaagacttcaccaggggtaaactcatgagcagtctgcatcttaaaagatattatggacggatactgcactatctgaaagcaaaagaatatagtcattgcgcatggaccattgttagagttgagattctgcgcaatttttattttattaatagactgaccggctacttgcgaaat

SEQ ID NO: 14491 - DNA, 561 bp, synthetic construct
  misc_feature 1..561: note = source = /note="Description of Artificial Sequence: Synthetic coding sequence"
  source 1..561: mol_type = other DNA
atgacaaacaaatgcctgttgcagatcgctctgctgctatgttttagtactacagctttatccatgtcctacaatctcctcggcttcttacagcggtcttcaaattttcagtgccagaaactcctttggcaactgaatgggagacttgagtactgtcttaaagatcggatgaattttgatattccggaggagattaagcagctgcagcagttccaaaaagaggacgccgctcttacaatctacgaaatgctccaaaacatctttgccatcttccggcaggacagttccagcaccggttggaatgagacgatcgtagagaatttacttgccaatgtgtatcaccagattaatcacttgaaaaccgttttagaggaaaaactcgaaaaggaggacttcacgaggggcaagctcatgtcgagcctccacctcaagcgatattacggaagaatcctgcactacctgaaagccaaggagtatagccattgtgcgtggaccatcgtgcgggtggagattctcaggaacttttactttatcaaccggctcactggctatctgcgcaat

SEQ ID NO: 14492 - DNA, 561 bp, synthetic construct
  misc_feature 1..561: note = source = /note="Description of Artificial Sequence: Synthetic coding sequence"
  source 1..561: mol_type = other DNA
atgactaataaatgtctattacagattgcgctgctgctatgcttttctaccacagcattgagtatgtcctataatctcttagggttcctacagcggtcctctaatttccagtgtcagaagctgctctggcagctgaacggccgccttgagtactgcctgaaagaccggatgaactttgacatacccgaagaaatcaagcagttacagcaattccagaaggaggacgctgccctgaccatctatgaaatgctacaaaatattttcgcgatcttccgccaggattctagctccaccggctggaatgaaaccatcgtggaaaaccttttggcaaacgtgtatcatcagatcaaccatctaaagactgtccttgaagaaaagcttgagaaggaggacttcactcggggaaaactaatgtcatcgctgcatctgaaacgatactacggtaggatcctgcattacctgaaagctaaggagtactcccactgtgcgtggacaattgttcgggtcgagatacttcgaaatttttactttatcaaccgtttgacaggctacctaagaaac

SEQ ID NO: 14493 - DNA, 561 bp, synthetic construct
  misc_feature 1..561: note = source = /note="Description of Artificial Sequence: Synthetic coding sequence"
  source 1..561: mol_type = other DNA
atgacgaacaagtgtctgctccagatcgccctgctgctttgcttctccactacggcactcagcatgtcgtacaacttgctgggcttccttcagaggagctccaactttcaatgtcagaagctcctctggcaactcaacggtcggctggagtactgtctcaaggatcggatgaattttgacatccctgaagagataaaacagcttcagcagttccagaaggaagatgcggcccttaccatctacgaaatgcttcagaacatctttgcaattttccgacaggactcgtcatccaccggttggaatgaaactattgtggaaaaccttcttgcaaacgtgtaccatcaaatcaatcacctcaaaactgtgctcgaggaaaagttggaaaaagaagattttaccagagggaaactgatgagctcgctccatcttaaaaggtactacggaagaatccttcattacctgaaggccaaagaatacagccattgtgcatggactattgtgcgcgtggagattctccgaaacttctactttatcaataggctgaccggttacctgaggaac

SEQ ID NO: 14494 - DNA, 561 bp, synthetic construct
  misc_feature 1..561: note = source = /note="Description of Artificial Sequence: Synthetic coding sequence"
  source 1..561: mol_type = other DNA
atgactaataagtgtctgctgcagatcgccttgctgctgtgcttctcgaccaccgccctcagcatgagctacaacctgctggggttcctgcaacgctcgtcgaatttccagtgtcaaaagttgctttggcagctcaatggccgcctcgaatactgcctgaaggatcggatgaactttgatatcccggaggaaatcaaacagctgcagcaatttcaaaaggaggatgccgcacttactatctatgagatgcttcagaacatcttcgctatcttcagacaggattcgtcgtcgactggatggaacgaaaccattgtggagaacctgcttgccaatgtctaccatcagatcaaccacctcaaaaccgtgctggaagagaaactggagaaggaagattttacgcgcggtaagctgatgtcgtccctgcacctcaagcggtactacggccgcatcctgcattacctgaaggccaaggagtactctcactgcgcctggaccattgtgagggtcgaaattctcagaaacttctacttcatcaatcgcctcacgggatacctgcgcaac

SEQ ID NO: 14495 - DNA, 561 bp, synthetic construct
  misc_feature 1..561: note = source = /note="Description of Artificial Sequence: Synthetic coding sequence"
  source 1..561: mol_type = other DNA
atgactaataagtgcctgctccagatcgcgctcctgctgtgtttctcaaccactgcgctgtccatgtcctacaatctgctcggattcctgcagcgcagctcgaattttcaatgccagaagctgttgtggcaactgaacgggcgcctggaatactgcctgaaggacagaatgaattttgatattccggaagagattaagcaattgcagcaattccaaaaggaggatgccgccctgaccatctacgagatgctgcagaacatcttcgccatcttccgccaggatagctcctccacgggatggaacgaaactatcgtcgaaaatctcctcgccaatgtgtaccaccagatcaaccatctcaagactgtgctcgaggagaaactcgagaaggaagatttcacccggggcaaactgatgagcagtctccatctcaagcggtactacggacgcatcctgcactatctcaaggcgaaggaatactcgcactgcgcatggactatcgtgcgcgtggaaatcctgagaaatttctacttcatcaaccggctgaccggctacctgcggaac

SEQ ID NO: 14496 - DNA, 561 bp, synthetic construct
  misc_feature 1..561: note = source = /note="Description of Artificial Sequence: Synthetic coding sequence"
  source 1..561: mol_type = other DNA
atgaccaataagtgcctgcttcagattgcgctgctcctctgtttctccactaccgcgctctcaatgagctacaacctgcttggatttctgcagcggtcatccaactttcagtgccaaaagctgctgtggcagctgaacgggcgcctcgagtactgcctgaaagatcggatgaatttcgacattcccgaagagataaagcaactccagcaatttcaaaaagaggacgccgccctgaccatttacgaaatgctccagaacatttttgcaatctttaggcaagattcgagctcaactggatggaacgaaactatcgtggaaaaccttctcgcaaatgtgtaccaccagataaatcatcttaagactgttcttgaagaaaagctggaaaaggaggacttcacgcggggtaagctgatgtcgtcccttcatctgaagcggtactacggacgcattttgcactacctgaaggcaaaagaatactcccattgtgcgtggactattgtgcgggtcgagattctgcgaaacttttacttcatcaacagacttaccggatatctgcggaac

SEQ ID NO: 14497 - DNA, 561 bp, synthetic construct
  misc_feature 1..561: note = source = /note="Description of Artificial Sequence: Synthetic coding sequence"
  source 1..561: mol_type = other DNA
atgaccaataagtgcctactacagatcgccttgctgctatgtttttctacaacggcactgagcatgtcttataacctactcggtttcctgcaacgaagttctaatttccaatgccagaagttactgtggcagctgaacggacgcttggaatactgccttaaagacagaatgaattttgacatccctgaggagatcaaacagctgcagcagtttcagaaagaagatgcggcgttgacaatctacgagatgctgcagaatatttttgccatctttcgacaggattcttcctccaccggttggaatgaaaccatcgtggagaacttgttggctaatgtgtaccaccaaattaatcacctaaagacagtgttagaggaaaagctggagaaggaagattttacgcggggtaagttaatgtcaagcctgcatctcaagcgatattacggccgcattctgcattacctcaaagcgaaagagtactcccattgtgcttggacaattgtcagagttgagatcttgcgaaatttttacttcattaacagactgacaggatatctccgcaat

SEQ ID NO: 14498 - DNA, 561 bp, synthetic construct
  misc_feature 1..561: note = source = /note="Description of Artificial Sequence: Synthetic coding sequence"
  source 1..561: mol_type = other DNA
atgaccaataaatgtcttctgcaaatcgcgctgctgctgtgtttcagcactactgcattgagtatgagctacaatttattaggcttccttcagaggtcttccaattttcagtgccagaaactgctttggcagctcaatggtcggctcgagtactgtctcaaggatcgtatgaactttgacatccccgaggagatcaagcaattacagcagtttcaaaaggaggatgccgcgctcaccatctatgagatgttgcagaatatcttcgccattttccgccaggactcgagttccacaggctggaatgagacaattgttgagaatcttctggcgaacgtgtaccaccaaatcaatcatcttaaaactgtgctggaggagaagctggagaaggaggacttcacgcgcggcaagctgatgagctcattgcacctgaaaagatactacggaaggatactgcactacctaaaggctaaagagtatagccactgtgcatggaccatagttcgcgtggagatcctgagaaatttctattttatcaaccggctgaccgggtatctgaggaat

SEQ ID NO: 14499 - DNA, 561 bp, synthetic construct
  misc_feature 1..561: note = source = /note="Description of Artificial Sequence: Synthetic coding sequence"
  source 1..561: mol_type = other DNA
atgacaaacaagtgcctgctccaaattgccttactgttgtgctttagtaccacagccttgagcatgagttacaatctgctcggattcctgcagagatcttctaacttccagtgtcagaaactgctgtggcagttgaacggcagactggagtactgtcttaaggatcgtatgaactttgatatccccgaagaaattaaacagcttcaacaattccagaaagaagacgccgcccttacaatatatgagatgctgcagaatattttcgctatcttcaggcaggattcctcttctaccggctggaatgagaccatcgtcgaaaacctgcttgctaatgtctaccaccagatcaatcatctcaaaacggtcttagaggaaaagctggagaaagaagatttcaccaggggcaaactgatgagcagcctccacctgaagcgctactacgggagaattcttcactatctcaaagctaaagagtattcccattgcgcctggaccattgttagggtggaaatcttgagaaacttctactttattaaccgactaactggataccttcgaaat

SEQ ID NO: 14500 - DNA, 561 bp, synthetic construct
  misc_feature 1..561: note = source = /note="Description of Artificial Sequence: Synthetic coding sequence"
  source 1..561: mol_type = other DNA
atgactaacaagtgcttgctgcaaattgcccttcttctctgcttttcaacaacggcactgtctatgagctataacctgctgggatttttacaaaggtccagcaacttccagtgccaaaaattactttggcagcttaatggaagattagaatactgcttgaaagacagaatgaattttgacattccagaggaaataaaacagctgcaacagttccaaaaggaggatgcggctttaacgatatacgaaatgcttcagaatatcttcgcgatcttcagacaggatagttcatcgacaggctggaacgagacaatcgttgaaaatctcttagcaaacgtttatcatcagattaatcaccttaaaacggtccttgaggagaaattagaaaaagaagatttcacccgtggcaaactgatgagctcgttgcatcttaaacgctattatggccggattcttcattatttgaaagctaaagaatattcacattgcgcatggacaattgttcgagttgagatcttacgcaacttttattttataaatcgtctgacaggctatttaagaaat

SEQ ID NO: 14501 - DNA, 561 bp, synthetic construct
  misc_feature 1..561: note = source = /note="Description of Artificial Sequence: Synthetic coding sequence"
  source 1..561: mol_type = other DNA
atgacaaataaatgtctgctgcagattgcattgctgctgtgtttctctactaccgctttatcaatgtcctacaacttactcgggtttctgcagcggtcgtccaacttccagtgtcagaagttgctctggcagctgaacggaagattggagtactgtctgaaagatcgcatgaacttcgacattcctgaggaaattaagcagctgcagcagtttcagaaagaggacgcagctctgactatctacgaaatgttacagaacattttcgcgatcttccgtcaggactcaagctccactggttggaatgaaaccatcgtcgagaacctgctggctaacgtttatcaccagatcaatcacctgaagactgtactcgaggagaaactggagaaagaggattttaccagaggcaaactgatgtcatcactgcatctgaagcggtattacgggcggatattgcactatctcaaggcaaaggagtatagtcactgcgcttggacaattgtacgggttgagattctcagaaatttctatttcattaacaggctgaccggatatcttagaaat

SEQ ID NO: 14502 - DNA, 561 bp, synthetic construct
  misc_feature 1..561: note = source = /note="Description of Artificial Sequence: Synthetic coding sequence"
  source 1..561: mol_type = other DNA
atgactaataagtgtctgctccagatcgccctgctactctgtttttccactacagcactcagcatgtcatacaatctcttaggattcctgcagagatctagcaatttccagtgtcaaaagctcttgtggcagttgaatgggcgactggagtattgcctgaaagacagaatgaacttcgatatcccagaagagatcaagcagctgcagcagtttcaaaaagaagacgctgccctgaccatttacgaaatgctgcagaacatctttgccatattcaggcaagactcctcatcaaccggttggaacgagaccattgttgaaaatcttctggccaatgtctatcaccagattaaccaccttaaaacagtgttggaagaaaagctggagaaggaggactttacacgaggcaagctcatgagctctctgcatctgaagagatattatggcaggatcttgcattatctgaaagctaaagagtattcacactgcgcatggacaattgtgagagtggaaatcctgcggaacttctacttcatcaatagactgaccggttatttgcgaaat

SEQ ID NO: 14503 - DNA, 561 bp, synthetic construct
  misc_feature 1..561: note = source = /note="Description of Artificial Sequence: Synthetic coding sequence"
  source 1..561: mol_type = other DNA
atgactaacaagtgtctgctacaaatcgccctgctgctctgtttttccacaaccgcgctgagcatgagctacaacctcctggggtttctgcagcggagttccaatttccagtgtcaaaagttgctatggcaattgaatggcagactggagtattgtttgaaggacagaatgaacttcgatatcccagaggaaataaagcaactccagcagttccagaaagaagatgcagcccttacgatctacgagatgctgcagaacatctttgccatttttaggcaagactcctcctcaactgggtggaacgagaccattgttgagaacctgctggcaaacgtttaccaccagatcaatcacctaaaaactgtattggaggaaaagctagagaaggaagatttcacaaggggtaagctgatgtctagcctacatctcaaacgatattacggcaggatccttcattatcttaaggcaaaggaatacagccactgtgcgtggaccattgtgagagtggagatcctgcggaatttttacttcataaacaggctgactggttaccttaggaac

SEQ ID NO: 14504 - DNA, 561 bp, synthetic construct
  misc_feature 1..561: note = source = /note="Description of Artificial Sequence: Synthetic coding sequence"
  source 1..561: mol_type = other DNA
atgactaataagtgccttcttcagattgctctcctgctttgtttttcgactactgcgctctcaatgtcttataacctgctggggtttttgcagcgcagcagcaattttcaatgccaaaaactgctttggcagcttaatggacgattggaatactgtctcaaggatcggatgaactttgacattccagaggaaatcaagcagttgcagcagtttcagaaagaggatgcagcattgaccatatacgagatgctgcaaaacatatttgcgattttccgacaagattcctcttcgaccggctggaacgagacgatcgtcgaaaaccttctcgctaatgtctaccaccaaatcaatcatcttaagaccgttcttgaagagaagctggaaaaggaggacttcacccggggcaaactgatgtcaagcctgcatcttaaacgctactatggtcgcatcttgcactacctcaaagccaaggaatactcgcattgtgcatggaccattgtgagggtggagattctgagaaatttctacttcataaacagactgacgggatacctccgtaac

SEQ ID NO: 14505 - DNA, 561 bp, synthetic construct
  misc_feature 1..561: note = source = /note="Description of Artificial Sequence: Synthetic coding sequence"
  source 1..561: mol_type = other DNA
atgaccaacaaatgtctgctgcagatagccctcctgctgtgcttctctactactgcactgagcatgtcttacaaccttctgggtttcttgcagaggtccagtaacttccaatgccaaaagctgttgtggcagctgaatgggaggctcgagtattgtttgaaagataggatgaacttcgacatcccagaggagataaagcagcttcagcagtttcagaaagaggacgctgccctgacaatttacgagatgctgcagaatatcttcgctatcttccggcaagactcctcaagtacaggatggaacgagacaattgtggagaatctgctggcaaatgtgtatcaccaaattaatcatctgaaaacggtgctggaggagaagctggagaaggaggattttactcgcggtaaactcatgtccagtctccatttgaagcggtactacggccgcattctgcactacctcaaagctaaggagtactcccactgtgcctggacaatcgtgcgagtggagatactgaggaatttttattttataaaccggctgacagggtacctgagaaac

SEQ ID NO: 14506 - DNA, 561 bp, synthetic construct
  misc_feature 1..561: note = source = /note="Description of Artificial Sequence: Synthetic coding sequence"
  source 1..561: mol_type = other DNA
atgacgaataaatgcctcctgcagattgctctcctgctgtgtttctcaacaactgccctgtcaatgagctacaatctgttggggttcctccagagatctagcaacttccagtgccagaagctgctttggcagctgaacggccgcctggagtattgtcttaaggatagaatgaatttcgacatccccgaggagatcaagcagctgcagcagttccaaaaagaggacgctgccctcaccatatatgagatgctgcaaaatatctttgcaatctttagacaggactcatcttctacggggtggaatgaaactatcgtggaaaatctgctcgccaatgtctatcaccagatcaatcatctcaaaactgtgttggaagagaagctcgaaaaggaggactttaccaggggcaagctgatgtcatctcttcacctcaagagatactacggccgtatcctgcactatctgaaggctaaagaatacagtcattgtgcttggactatcgtgcgagtggaaatcctgaggaatttctactttatcaatcgcctgaccggctacttgcggaac

SEQ ID NO: 14507 - DNA, 561 bp, synthetic construct
  misc_feature 1..561: note = source = /note="Description of Artificial Sequence: Synthetic coding sequence"
  source 1..561: mol_type = other DNA
atgactaacaaatgtttgcttcaaatcgccctccttctttgtttcagcaccaccgccctttcgatgtcgtacaatctgctgggctttctgcaaaggagcagcaactttcagtgccagaagttgctttggcagctgaacggacgactcgagtactgcctgaaagaccggatgaacttcgacatccccgaagagattaaacaactgcaacaatttcaaaaggaggatgcggcactgactatttacgaaatgcttcagaacatttttgccatcttcagacaggactcctcctcaactgggtggaacgagactattgtcgaaaacctgctggcaaatgtgtatcatcagatcaaccacctcaagacggtgctcgaggaaaagctggaaaaggaagattttactcggggaaaactgatgagctccctgcatcttaagagatactacggtcgtatcttgcactacctcaaagcgaaggaatactcacattgtgcatggaccattgttcgcgtggagatactccggaacttttacttcataaatcgactgaccggttacctgcgcaac

SEQ ID NO: 14508 - DNA, 561 bp, synthetic construct
  misc_feature 1..561: note = source = /note="Description of Artificial Sequence: Synthetic coding sequence"
  source 1..561: mol_type = other DNA
atgactaacaagtgtctcctgcagatcgccctgctgttgtgcttctcgactacggcactctccatgtcgtacaatctgctgggctttctgcagaggtcgagcaacttccagtgccagaagctcttgtggcaactgaatggacgcctggagtactgcctgaaggatcgcatgaactttgatatccctgaagaaatcaagcagctgcagcaatttcaaaaggaagatgctgcgctgaccatctacgaaatgctgcagaatatcttcgcgattttccgccaggactcttcatcaaccggatggaacgagactatagttgaaaatctcctcgcgaatgtctaccaccaaatcaaccatcttaaaaccgtgctcgaagaaaaacttgaaaaggaggattttactcgcggcaaactgatgagctcgctgcacctcaaacgctactacggccggatcctccactacctgaaagccaaggagtactcacactgcgcatggaccatcgtgcgcgtcgagattctgaggaacttctacttcatcaacaggctcaccggataccttcggaac

SEQ ID NO: 14509 - DNA, 561 bp, synthetic construct
  misc_feature 1..561: note = source = /note="Description of Artificial Sequence: Synthetic coding sequence"
  source 1..561: mol_type = other DNA
atgacgaataagtgcctcctgcagattgctctgctgttgtgcttcagtaccaccgctctgtccatgtcctacaacttgctgggattcctccagaggtcctcgaacttccaatgtcaaaagttgctgtggcaactcaacggacgtttggagtactgccttaaggacaggatgaactttgatataccggaggaaatcaagcagcttcaacagttccagaaagaagatgcagccctcacgatctatgaaatgctccagaatatcttcgcaatcttccggcaggactcctcatcaactggctggaatgaaactattgtcgagaacctcctggcgaatgtttatcaccaaatcaaccatctgaaaactgtgctcgaagaaaagttggaaaaagaggactttacccggggcaaattgatgagtagccttcacctgaagcgctactacgggagaattctgcactaccttaaagcgaaggagtactcgcattgcgcctggactatcgtgcgggtggagatcctgagaaacttctactttatcaatcggctgaccggatacctgagaaac

SEQ ID NO: 14510 - DNA, 561 bp, synthetic construct
  misc_feature 1..561: note = source = /note="Description of Artificial Sequence: Synthetic coding sequence"
  source 1..561: mol_type = other DNA
atgaccaataaatgtctactgcagatcgccttgctcctgtgtttctctacaactgccctctccatgtcttacaacctcttgggattcttgcaaaggagtagcaacttccagtgtcagaaactgctgtggcagctgaatggaaggctggagtactgtctgaaagatcgaatgaactttgatatacctgaggagatcaaacaattgcaacagtttcagaaggaggatgcagcacttacaatctacgagatgttacagaacatcttcgctatatttcggcaggactcctcctccacaggatggaacgaaacgattgtcgagaacctactcgctaacgtgtaccaccagatcaaccatctgaagaccgtccttgaagagaagttggagaaggaggactttacgcgcggtaaactgatgtctagccttcacttgaagcggtattatgggagaatcctgcactatctcaaggctaaagaatacagccactgtgcctggaccatagtgcgggtggaaattctccggaatttctatttcattaacagactcacaggctacttgagaaat

SEQ ID NO: 14511 - DNA, 561 bp, synthetic construct
  misc_feature 1..561: note = source = /note="Description of Artificial Sequence: Synthetic coding sequence"
  source 1..561: mol_type = other DNA
atgacgaacaagtgcctgttgcaaatcgcccttttgctctgcttctccaccaccgcgctttcgatgtcctataacctgctgggattcctccagcggagcagcaacttccaatgccagaagctgctttggcagcttaatggacggctggaatactgtctcaaagatcggatgaattttgacatccctgaagagatcaagcagctccaacagttccagaaggaggacgcagctctgaccatctacgagatgttgcagaacatctttgccatctttcggcaggactcctcaagcaccggatggaacgaaacgatcgtggagaatttgctggcaaatgtgtatcaccaaatcaaccacctgaaaaccgtgctggaagagaagctggaaaaggaagattttactcgcggcaagctgatgagctcccttcatctcaaacggtactacggacgcatcctgcattacctcaaggctaaggaatacagccactgcgcctggaccatcgtcagagtggaaatcctgaggaacttctacttcatcaacagactgaccggctaccttcggaac

SEQ ID NO: 14512 - DNA, 561 bp, synthetic construct
  misc_feature 1..561: note = source = /note="Description of Artificial Sequence: Synthetic coding sequence"
  source 1..561: mol_type = other DNA
atgacaaacaaatgcctgcttcaaatcgctctgctgctctgcttttccacaactgcactgagtatgtcatataacctcctggggttccttcagcgaagctccaacttccaatgccagaagctgctttggcagctcaacgggcggctggagtactgcctcaaagataggatgaacttcgacatccctgaggaaataaaacagctccagcagtttcaaaaggaggacgccgccttgactatctacgagatgctccagaacatcttcgctatatttcgccaggactcctccagcaccggctggaacgagactattgtcgaaaatctgcttgcaaatgtgtaccatcagattaaccacctgaagacagtgctcgaagaaaaactggagaaggaggattttaccagggggaaacttatgtcctctctacatctcaagaggtattacggtcggatcctgcattaccttaaggctaaagaatacagccactgtgcttggactatagtgcgcgtcgaaattctccgtaatttctacttcatcaaccgactgacaggatacctgaggaat

SEQ ID NO: 14513 - DNA, 561 bp, synthetic construct
  misc_feature 1..561: note = source = /note="Description of Artificial Sequence: Synthetic coding sequence"
  source 1..561: mol_type = other DNA
atgactaataagtgcctattacaaatagcattactgctgtgcttttcgaccacagcgctgtccatgagctacaacctgctcggattccttcaacgctcctcaaatttccagtgccagaagctcctctggcagttgaacggacgactggagtattgtcttaaggatcgcatgaacttcgatatccccgaagagattaaacaacttcagcagtttcagaaagaggacgccgcactgacgatttacgagatgctgcagaacatctttgcgatatttagacaagatagttcatctactggatggaacgaaacgatcgtcgagaaccttctggcgaacgtgtatcatcagatcaatcacctcaagacagtcctggaggagaagctagagaaggaagatttcactaggggaaagctcatgtcctcgctacaccttaaaagatattacggacgaatcctccactacctgaaggctaaagaatacagtcactgtgcctggaccatcgtccgagtagagattctaaggaatttctacttcattaacaggctgacagggtatctgcggaat

SEQ ID NO: 14514 - DNA, 561 bp, synthetic construct
  misc_feature 1..561: note = source = /note="Description of Artificial Sequence: Synthetic coding sequence"
  source 1..561: mol_type = other DNA
atgactaacaaatgtctgctccaaattgcgctcctcttgtgtttctcgactaccgcactgtcgatgagctacaacctgctgggattcctgcaacgatcaagcaatttccagtgccaaaagctgctttggcagcttaacggcagacttgaatactgtcttaaggacaggatgaactttgatattccagaggaaatcaagcagttgcagcagtttcaaaaggaagatgcggcattgacgatctatgaaatgttgcagaacatctttgccatattcagacaagattcctcctccaccggctggaacgaaaccatcgtggaaaacctgctggcaaatgtgtatcaccagattaatcatctgaaaaccgtcttggaggaaaagttggagaaggaagatttcactcgtggtaaactcatgtcctcgcttcatctcaaacgttactacggaagaatcctccactaccttaaagccaaagagtacagccattgcgcatggactattgtgcgagtcgaaattctgagaaacttttactttatcaatcggcttaccgggtacctccggaac

SEQ ID NO: 14515 - DNA, 561 bp, synthetic construct
  misc_feature 1..561: note = source = /note="Description of Artificial Sequence: Synthetic coding sequence"
  source 1..561: mol_type = other DNA
atgacgaacaagtgcctgctacagattgccttgctcctgtgctttagcaccacagctctcagtatgtcttacaatttgctgggattcctgcagcggagtagcaactttcagtgccagaaacttctttggcagctgaatggccggcttgaatattgtttgaaggacagaatgaactttgatatacccgaggagatcaaacagctgcagcaatttcagaaggaggatgcggctctgaccatatacgagatgctgcagaatatttttgccatctttcgacaggatagttcctcaaccggctggaatgaaaccatcgtcgagaatctactggctaatgtatatcatcagatcaaccatctcaaaacagtgctggaggagaaattagaaaaggaggatttcacaagaggcaagcttatgtcttctctacacttaaagagatactacggtcgcatcctgcactatctcaaggccaaagagtactcgcactgtgcttggactatagtgcgagtggagatcctgcgaaatttctacttcattaataggctgacagggtacttacggaat

SEQ ID NO: 14516 - DNA, 561 bp, synthetic construct
  misc_feature 1..561: note = source = /note="Description of Artificial Sequence: Synthetic coding sequence"
  source 1..561: mol_type = other DNA
atgaccaacaagtgcttgctgcaaattgccctgctgctctgcttctcgactaccgctctctcgatgtcctacaaccttttgggctttctgcagcggtcctccaacttccagtgccagaagctgctgtggcagctgaatggaagattggagtactgcctgaaagatcgcatgaacttcgacatcccagaagagatcaagcagctgcagcagtttcagaaggaggacgcggccctcactatctacgaaatgctccaaaacatcttcgccatcttccggcaagactcgtcgagcaccgggtggaacgaaactatcgtggaaaatctgctggccaatgtctaccaccagattaaccacctgaaaaccgtcttggaagaaaaactggaaaaagaggacttcactagaggaaaactcatgtcgagcctgcatctgaagcggtactacgggaggattcttcactacctcaaggcgaaggaatactcccattgcgcatggaccattgtcagggtggagatactgcgcaatttctatttcatcaaccgcctcactgggtacctgcgcaac

SEQ ID NO: 14517 - DNA, 561 bp, synthetic construct
  misc_feature 1..561: note = source = /note="Description of Artificial Sequence: Synthetic coding sequence"
  source 1..561: mol_type = other DNA
atgaccaacaaatgtctactgcagatcgcccttctgctctgcttcagcaccactgctctaagcatgtcttataatcttctcggctttctgcagagatcttccaacttccagtgtcagaagctgctttggcaattaaatggcagattagaatattgtcttaaggatagaatgaatttcgatattcctgaggagattaagcagctgcagcagttccagaaagaggatgccgccctgacaatttatgagatgctacagaacatcttcgctatatttcggcaggactcttctagtaccggatggaatgaaaccatcgtggagaatctcctagccaacgtgtaccaccagattaaccacctgaagacagtactcgaagaaaaactggagaaagaggacttcacgcgcggcaaactcatgtcatccctacatttgaaaagatattacggtaggatccttcactatctcaaagcgaaggagtatagccattgcgcctggactattgtcagagttgaaattctcaggaacttctacttcatcaatcgcttgaccgggtatctccggaat

SEQ ID NO: 14518 - DNA, 561 bp, synthetic construct
  misc_feature 1..561: note = source = /note="Description of Artificial Sequence: Synthetic coding sequence"
  source 1..561: mol_type = other DNA
atgactaataaatgtcttctgcagattgcgctcctgctttgtttctctactactgcactgagtatgagctacaatcttcttgggttcctgcagagatccagcaatttccagtgtcagaaacttttgtggcagctcaatggcagactggaatattgcttgaaagatcgcatgaactttgatattccagaggagattaagcaactccagcagtttcagaaagaagatgcagctctgacaatatatgagatgcttcaaaatatcttcgccatctttcgtcaggatagctccagtactggatggaatgagactatcgttgaaaatctcctggcaaatgtttaccaccagatcaatcatctgaaaaccgttttagaggaaaaacttgagaaggaggatttcactcgcggaaagctgatgtctagcctgcacctcaagaggtattatggcaggatcctgcactaccttaaagcgaaagagtactcccattgcgcttggaccatcgtcagagtggaaatcttacggaatttttacttcatcaatagacttacaggttacctgagaaat

SEQ ID NO: 14519 - DNA, 561 bp, synthetic construct
  misc_feature 1..561: note = source = /note="Description of Artificial Sequence: Synthetic coding sequence"
  source 1..561: mol_type = other DNA
atgacaaataaatgcctcctccagatagctcttttgctatgtttcagcactactgccctcagcatgtcctataatctcctcgggtttttacagagatcaagcaatttccaatgtcagaaactgctgtggcagctgaatggccgcctcgagtattgtcttaaggatcgaatgaactttgacatcccagaagagataaagcagctgcagcagttccagaaagaagatgctgcactgacaatctatgagatgctgcagaacattttcgctatcttcagacaggattccagctcaactggctggaatgagacaatcgtggaaaacctgctcgctaacgtctaccaccagataaaccatctaaagactgttttggaggagaagttggagaaggaggactttacccgaggaaagctgatgagcagtttacacctgaaaaggtactacgggcggatcctgcattatttgaaggcgaaggagtacagccattgtgcatggactatagtccgcgtcgagattctgcggaacttttacttcatcaaccgacttactggctacctgcggaac

SEQ ID NO: 14520 - DNA, 561 bp, synthetic construct
  misc_feature 1..561: note = source = /note="Description of Artificial Sequence: Synthetic coding sequence"
  source 1..561: mol_type = other DNA
atgacgaacaagtgtctcctgcagatcgccctcctcttgtgcttctcaactaccgcgctgagcatgtcgtacaatctgctgggattcctccagagatccagcaactttcaatgccaaaaactcctgtggcagttgaatgggcgcctcgagtactgcctcaaggaccggatgaacttcgatatcccggaggaaatcaagcaactgcaacagttccagaaagaggacgcggctcttactatctacgaaatgctgcagaatatttttgcaatcttccggcaggattcgtccagcaccggttggaacgagactatcgtggaaaacctcctggcaaacgtctaccaccagattaaccatctgaaaactgttcttgaggaaaagctcgaaaaggaggactttacccgaggaaagctgatgtcatccctgcatctgaagcgctactacggaaggattcttcactacctgaaggccaaagaatactcgcactgcgcctggaccatcgtgagagtggaaatcttgcggaatttctatttcatcaatcgcctgaccggctacctgcgtaac

SEQ ID NO: 14521 - DNA, 561 bp, synthetic construct
  misc_feature 1..561: note = source = /note="Description of Artificial Sequence: Synthetic coding sequence"
  source 1..561: mol_type = other DNA
atgaccaacaaatgcttactccagatagcgctcttactgtgttttagcaccacggcgcttagcatgagctataacttactgggtttcctgcagaggtcttccaacttccagtgtcagaaactgctctggcagctgaatggtcgcctcgagtactgcctgaaggaccgcatgaactttgatatccccgaggaaattaaacagcttcaacagttccagaaagaagatgccgcactgactatctacgaaatgctgcaaaacatcttcgcaatcttcaggcaagacagcagctctaccggttggaacgagaccatagtggaaaatttgctggcaaatgtttaccatcaaatcaatcatctaaagacagtcctggaggaaaaactggagaaagaggattttacccgtggtaagctgatgagcagccttcatctgaagcgctactatgggcgcatcctgcactatctgaaagcaaaagagtacagccattgtgcatggactattgtcagagttgagatcctgcgaaacttttacttcattaatcgtctgaccgggtacctgcgcaat

SEQ ID NO: 14522 - DNA, 561 bp, synthetic construct
  misc_feature 1..561: note = source = /note="Description of Artificial Sequence: Synthetic coding sequence"
  source 1..561: mol_type = other DNA
atgacgaacaaatgtctcctccagatcgccctgctgctctgttttagtacaactgccttgtccatgagctataatctgttgggttttcttcagagaagcagtaatttccagtgccaaaagttactgtggcagctgaacggccggctggaatactgcctgaaggacaggatgaacttcgatattccggaagagattaaacagctccaacaattccagaaagaagacgcagccctgactatctacgagatgctgcagaatattttcgccatttttagacaggacagtagctccactggctggaacgagacaattgtggagaacctgctggccaacgtctaccaccagattaaccacctcaaaacagtactggaggagaaattggaaaaagaggattttacacgaggtaagctgatgtcatcattacaccttaagcgctattatggccgcattctgcactatttgaaggccaaggaatattcacattgcgcatggaccatcgtgagagtcgaaatcctgcgaaatttctactttattaataggttgactggctaccttcgtaat

SEQ ID NO: 14523 - DNA, 561 bp, synthetic construct
  misc_feature 1..561: note = source = /note="Description of Artificial Sequence: Synthetic coding sequence"
  source 1..561: mol_type = other DNA
atgactaataaatgtctgcttcagattgcgttgctgctgtgcttctcaacaaccgcgctgagtatgtcctataacctactcggttttcttcagcgctcctccaattttcagtgtcagaagctgctttggcagttgaacggaagattagagtattgcctgaaggaccgcatgaatttcgatattccggaggaaatcaagcagttgcagcagtttcaaaaggaggatgccgccctgaccatctacgaaatgcttcagaatatatttgctatcttccgacaagatagcagctccacagggtggaatgaaacgattgttgagaacctgctcgcaaatgtctatcatcaaatcaaccacctgaaaaccgttttggaggagaagctggagaaagaagacttcacacgtggaaagctcatgagcagtctccatctgaaacgttactatggccggattcttcattacctcaaggcaaaggagtacagtcactgcgcctggacaattgttcgggtagaaatcctacggaacttttacttcattaacaggttgacagggtacttacggaat

SEQ ID NO: 14524 - DNA, 561 bp, synthetic construct
  misc_feature 1..561: note = source = /note="Description of Artificial Sequence: Synthetic coding sequence"
  source 1..561: mol_type = other DNA
atgactaataagtgtctccttcagattgcgctgctcctgtgcttttcaactactgcgctttcgatgtcttataacctgctgggatttctccaaagatcgtccaactttcagtgtcaaaagctgctctggcaactgaacggcagactggagtactgcctgaaggacaggatgaactttgatattccggaggaaatcaagcagcttcagcaattccagaaggaggacgcagcccttacgatctacgaaatgcttcaaaacatttttgcaatctttagacaagattcctcctcaaccggctggaatgaaaccatcgtggaaaatctgctggcaaacgtctaccatcaaatcaaccatctgaaaaccgtgcttgaagaaaagctggaaaaagaggattttacgcgcggtaaactgatgagctcactgcacctcaaaagatactacggtcgcatcctgcattacctcaaggccaaggagtattcgcattgcgcatggaccattgtcagagttgagattcttagaaacttttacttcataaacagactcaccgggtacctgcggaat

SEQ ID NO: 14525 - DNA, 561 bp, synthetic construct
  misc_feature 1..561: note = source = /note="Description of Artificial Sequence: Synthetic coding sequence"
  source 1..561: mol_type = other DNA
atgactaacaagtgtctgcttcagatcgcactccttctgtgtttttccaccactgcactgtccatgtcatacaacctgcttggttttctccagcggagctctaactttcagtgtcagaaactcctttggcagttgaacgggagactcgaatactgtctcaaagatcgcatgaactttgacattccagaggagataaagcaattgcagcaatttcaaaaggaagatgcggcgcttacgatttacgaaatgcttcagaatatcttcgcaatattccgccaggattccagctcgacgggctggaatgaaaccatcgtggagaatctgcttgcaaacgtgtatcatcagattaatcatcttaaaactgtccttgaagaaaagctcgaaaaggaagattttaccagaggcaagttgatgtcgtcgcttcatctgaaacggtattacgggagaatcctccattacctcaaggcaaaggagtactcgcactgcgcctggaccattgtgagagtggaaatcctccggaacttctacttcatcaatcggcttactggttacttgagaaac

SEQ ID NO: 14526 - DNA, 561 bp, synthetic construct
  misc_feature 1..561: note = source = /note="Description of Artificial Sequence: Synthetic coding sequence"
  source 1..561: mol_type = other DNA
atgactaacaaatgcctgctgcaaattgcactgctcttgtgcttttccacgaccgccctttctatgagctacaatctgctcggctttttgcaacgcagctcaaatttccagtgccaaaaactgctgtggcagttgaacggcagactggagtactgcttgaaggacaggatgaacttcgatattcccgaggagatcaagcagctgcaacagttccagaaggaagatgccgcgcttaccatatatgagatgttgcagaacatcttcgctatctttaggcaggacagctctagtacaggatggaacgaaaccatcgttgagaacctgctggcaaatgtgtaccaccagatcaaccatttgaagacagtgctggaggagaaactcgagaaagaggacttcactcgcggaaagctgatgagctcacttcaccttaagcgctattatggcagaatcttgcattatcttaaggccaaggaatacagccactgcgcatggactatcgtgcgcgttgaaatcctcaggaacttctacttcattaatcgcttgacaggatatctgagaaac

SEQ ID NO: 14527 - DNA, 561 bp, synthetic construct
  misc_feature 1..561: note = source = /note="Description of Artificial Sequence: Synthetic coding sequence"
  source 1..561: mol_type = other DNA
atgaccaacaaatgtctcctgcagatagcactcctcctgtgcttctcaactactgccctgagcatgtcgtacaacttgctgggatttttgcaacggtcatcgaatttccagtgccagaaactgctctggcagctgaatggcagactggaatactgcctcaaggaccggatgaactttgacatcccggaagagatcaagcaactgcagcaattccagaaggaggacgccgccctgactatctatgaaatgctccagaatatcttcgccatcttccgccaggacagctcgtccactggatggaacgaaaccatcgtcgagaacctcctggccaacgtgtaccaccagatcaaccacctcaagaccgtcctggaggagaaactcgagaaggaggacttcactcgcggcaaacttatgagctcgttgcacctgaaacgctactacggcagaatccttcattacctgaaagcgaaggaatactcccactgcgcgtggaccatcgtgcgcgttgaaattctccggaatttctacttcatcaaccggctgaccgggtacctgcggaac

SEQ ID NO: 14528 - DNA, 561 bp, synthetic construct
  misc_feature 1..561: note = source = /note="Description of Artificial Sequence: Synthetic coding sequence"
  source 1..561: mol_type = other DNA
atgaccaacaagtgcctgctccagattgctcttttgctgtgcttctctactacggctctttcgatgagctacaacttgctcggattcttgcaaagaagctctaacttccagtgccaaaagctcctctggcaattgaacggacgccttgaatactgcctcaaggatcgtatgaactttgatatccctgaggaaattaagcagctgcagcagttccagaaggaggatgcagccctgaccatctatgagatgctccaaaacatctttgccatcttccgccaggacagctcctcgacggggtggaatgaaactatcgtcgagaacctcttggcgaacgtataccatcagatcaaccacctgaaaactgtgctcgaagagaagcttgagaaggaagacttcactcgaggcaaactcatgagctccctccacctcaagcggtactacggccgcatcttgcactatctgaaggccaaggagtactcgcactgtgcgtggactattgtccgtgtcgagatcctcagaaatttctacttcatcaatcgtctgacaggctaccttcgcaac

SEQ ID NO: 14529 - DNA, 561 bp, synthetic construct
  misc_feature 1..561: note = source = /note="Description of Artificial Sequence: Synthetic coding sequence"
  source 1..561: mol_type = other DNA
atgaccaacaagtgccttctccagatcgccctgctcctgtgcttctccaccaccgctctgtcgatgtcgtacaatctgttgggcttcctccaaagatcttcaaacttccagtgtcagaaactgctgtggcagcttaatggaaggctggagtactgcctgaaggatcgcatgaattttgacatcccagaagagatcaagcagctccaacagttccaaaaggaggacgcagcactcacgatctacgagatgctgcagaacatctttgccatcttccggcaggactcatccagcaccggctggaacgagactatcgtcgaaaatctcctggcgaatgtgtatcatcagatcaatcatctgaaaacggtgttggaggaaaagctggagaaagaagatttcactagaggaaagctgatgtcatcgctgcacctcaaaagatactacggtcggatcctgcattaccttaaggcgaaggagtactcgcactgcgcttggaccattgttagagtggaaattctgcggaatttctatttcattaaccggctcactggctacctgagaaac

SEQ ID NO: 14530 - DNA, 561 bp, synthetic construct
  misc_feature 1..561: note = source = /note="Description of Artificial Sequence: Synthetic coding sequence"
  source 1..561: mol_type = other DNA
atgaccaataagtgcttgcttcaaatcgccctgctgctctgcttttcaactactgccctctccatgtcgtacaatctgctcggcttcctgcaaagatcatcgaactttcagtgtcagaagctgctgtggcagctcaacggccgcctggagtactgcttgaaggatagaatgaacttcgacatcccagaggagatcaagcagctgcagcagtttcaaaaagaggacgccgccctgaccatctacgaaatgctgcagaatatcttcgcgatcttcaggcaggattcctcatcgactggctggaacgaaactattgtggagaacttgctcgctaacgtgtaccatcaaatcaatcaccttaagacggttcttgaggaaaagctggaaaaggaggactttaccagaggaaaactgatgagtagcctgcatctgaagagatactacggacgcatactccattacctgaaggcgaaagagtactcacactgcgcctggaccatcgtgcgtgtggaaattctgcgcaacttttacttcatcaatagactgacgggttacctgcgcaac

SEQ ID NO: 14531 - DNA, 561 bp, synthetic construct
  misc_feature 1..561: note = source = /note="Description of Artificial Sequence: Synthetic coding sequence"
  source 1..561: mol_type = other DNA
atgaccaacaagtgcctgctgcagattgcccttctgctgtgcttcagcacgactgccctctcgatgtcctacaacctgctgggattcctccaacgctcctcgaatttccagtgtcaaaagctgctgtggcaacttaacggcagactggaatactgcctcaaggaccggatgaacttcgacatcccggaggaaatcaaacaactgcagcagttccagaaggaagatgccgccctgactatctatgaaatgctgcagaatatcttcgcgatcttccgccaggactcgtcgtccacgggatggaacgaaaccatcgtggagaatctgctggcgaacgtctaccaccagatcaaccacctcaaaaccgtccttgaggagaagttggaaaaggaagattttactaggggaaaactcatgtcctctctgcacctgaaacggtactacggccgcatcctgcattacctgaaggccaaagaatactcgcactgcgcttggacgatcgtgcgcgttgaaatcctccgcaacttttacttcatcaaccggctgaccggttacctccggaac

SEQ ID NO: 14532 - DNA, 561 bp, synthetic construct
  misc_feature 1..561: note = source = /note="Description of Artificial Sequence: Synthetic coding sequence"
  source 1..561: mol_type = other DNA
atgaccaacaagtgccttctgcaaatcgcccttctcctttgtttttcaaccactgcgctctcaatgtcctacaatctgctgggctttctccagaggagcagcaatttccagtgtcagaaattgctttggcaactcaacggacgcctcgaatactgtctcaaagataggatgaatttcgacatccccgaggagattaagcagctccaacagtttcaaaaggaggacgcagcactgaccatctacgaaatgctgcagaatatctttgcaatctttcgtcaagattcgtcgtcaaccggctggaacgaaaccattgtggagaatctgttggccaacgtgtatcaccaaatcaaccatctcaagactgtcctggaagaaaaacttgagaaggaggattttacccgtggtaaacttatgtcatctcttcatctgaaacggtactacggtagaatccttcattacctgaaggcaaaagagtactcccattgtgcatggactatcgtgagagtggaaattctgagaaacttctactttatcaacagattgaccggttatctccggaat

SEQ ID NO: 14533 - DNA, 561 bp, synthetic construct
  misc_feature 1..561: note = source = /note="Description of Artificial Sequence: Synthetic coding sequence"
  source 1..561: mol_type = other DNA
atgactaacaagtgcctccttcaaattgcactgcttctctgtttttccaccacggccctctcgatgtcctacaaccttcttggttttttgcagcggagctcgaattttcaatgccagaagctgttgtggcagttgaatggacgccttgaatattgcttgaaggatcggatgaactttgatattcccgaggagatcaagcagctgcaacagttccagaaggaggacgcagcgctcactatctatgagatgctgcagaatatcttcgcgatctttcggcaggactctagctcgaccggttggaacgagactatcgtcgaaaatctcttggctaatgtgtaccatcaaatcaaccacctcaagacggtcctcgaagaaaaacttgaaaaggaagattttactagaggcaaacttatgtcgtccctccatctgaaacgttactacgggcgcattctgcattacctgaaggctaaggagtattcccattgtgcctggaccattgttagggtggaaatacttaggaatttctacttcataaaccgacttactggataccttcgtaat

SEQ ID NO: 14534 - DNA, 561 bp, synthetic construct
  misc_feature 1..561: note = source = /note="Description of Artificial Sequence: Synthetic coding sequence"
  source 1..561: mol_type = other DNA
atgaccaacaagtgtctgctccagattgctctgctgctctgcttctctactacagcactctcgatgtcatacaacctgttggggttcctgcagaggtcctcaaactttcaatgccaaaagctgctgtggcagctcaacggcagactcgagtactgccttaaagatagaatgaacttcgatatcccagaggaaatcaagcaattacagcaattccagaaagaggacgctgccctgactatctacgaaatgctgcaaaacatttttgccatcttccgccaagacagctcctcaactggatggaacgagactattgtcgaaaatctgcttgcaaacgtgtaccatcaaatcaatcatctcaaaacagttctggaggagaagctggagaaggaggattttacgagaggtaagctaatgagttctctccacttaaaacgctactacggaagaatcctgcattacctcaaggccaaagagtacagtcactgtgcctggacgatcgtcagagtcgaaatcttgcggaacttctattttatcaaccgtctgacaggctacctaagaaac

SEQ ID NO: 14535 - DNA, 561 bp, synthetic construct
  misc_feature 1..561: note = source = /note="Description of Artificial Sequence: Synthetic coding sequence"
  source 1..561: mol_type = other DNA
atgactaataagtgtcttctgcagatcgctttgctgttgtgcttcagcaccaccgcgctgtccatgtcctacaatctgcttggtttcctgcagcgaagttctaatttccagtgtcaaaaacttctgtggcagcttaatggtcggctagagtactgcctgaaagacagaatgaactttgatatcccagaggagatcaagcagctgcagcagttccagaaagaggatgccgccctgaccatctacgaaatgctgcagaacatctttgcaatctttagacaggatagctcttccacagggtggaacgagacaattgtggagaatctcctggccaatgtgtatcaccagatcaatcatttaaagaccgtcttggaggaaaagctcgagaaagaagactttacaaggggcaagctcatgtccagcctgcacctgaaaaggtattatggccggattctgcactacctaaaagcgaaggagtactctcattgtgcatggacgatcgtgagggtggaaatacttcgcaatttctacttcatcaacagactcacaggttacttacggaat

SEQ ID NO: 14536 - DNA, 561 bp, synthetic construct
  misc_feature 1..561: note = source = /note="Description of Artificial Sequence: Synthetic coding sequence"
  source 1..561: mol_type = other DNA
atgaccaacaaatgccttttgcagatcgccctgctcctttgcttctccaccaccgcactaagtatgtcttataaccttcttggctttctgcaacggagttcgaactttcagtgtcagaagctgctgtggcagctgaatgggagactggagtactgtttgaaggatcgcatgaatttcgacattcccgaggagatcaagcagctccagcagttccagaaagaggatgctgccctgacaatctacgagatgctccagaacatctttgcaatttttcgccaggacagctctagcacgggctggaatgagacaatcgtggagaacttgctcgccaatgtctatcaccagatcaatcacctgaagacagtgctggaggagaaactggaaaaggaggatttcactcgtggaaagctgatgagctctctccacttaaaaaggtactacgggagaatcctgcattacctcaaagccaaggaatacagccattgcgcgtggacaatcgtccgtgtggagatccttcgaaacttttactttatcaatcgactcaccggctacctcaggaat

SEQ ID NO: 14537 - DNA, 561 bp, synthetic construct
  misc_feature 1..561: note = source = /note="Description of Artificial Sequence: Synthetic coding sequence"
  source 1..561: mol_type = other DNA
atgacgaataaatgtctcctgcaaattgccttgcttttgtgtttctccacgacagccctatcaatgtcctataatttgctggggttcctgcaacgtagctccaattttcagtgtcagaaattgctttggcagctcaatggtcggctggagtattgcttaaaggacaggatgaattttgatatacctgaggaaatcaagcaattgcagcaatttcagaaagaagatgccgccctcaccatctacgaaatgttgcaaaacatctttgctatttttcgacaagatagctcgtctactgggtggaatgaaactatcgtcgagaacctgctcgcgaatgtgtaccatcagataaaccaccttaagacggtattggaagagaagctcgaaaaggaggactttacgcgggggaagcttatgtcgtctctgcatctaaagcgatactatggacggattctccactacttgaaggctaaagaatactctcactgtgcctggacaattgtacgagtggagatacttcgtaatttctactttataaaccggttaactggctatctcaggaac

SEQ ID NO: 14538 - DNA, 561 bp, synthetic construct
  misc_feature 1..561: note = source = /note="Description of Artificial Sequence: Synthetic coding sequence"
  source 1..561: mol_type = other DNA
atgactaacaaatgtctgctgcagatagcactgttgctgtgcttttcgacaaccgcgctgtccatgtcatacaacttactcgggttcttgcagcgctcatctaacttccaatgtcagaagcttctgtggcagctaaacgggaggctggagtactgcctaaaagaccggatgaacttcgatataccggaggagatcaaacagttacaacaattccaaaaggaagatgctgcccttactatctacgaaatgctccagaatatctttgcaatattcagacaggatagcagttccaccggctggaacgagaccatcgtggaaaatttgttagcgaacgtgtaccatcagatcaatcacctgaaaactgtgctggaggagaaactggagaaggaagattttaccagggggaagctgatgagctcccttcacttgaaaagatattacggcagaatcctgcattatctaaaagctaaagaatatagccactgcgcttggacgatcgtaagggtggagatcctaagaaatttttacttcattaacaggctgaccggctatctgagaaac

SEQ ID NO: 14539 - DNA, 561 bp, synthetic construct
  misc_feature 1..561: note = source = /note="Description of Artificial Sequence: Synthetic coding sequence"
  source 1..561: mol_type = other DNA
atgacaaataaatgtctcctgcagatcgcactgctgctgtgtttttccacgactgcacttagcatgtcctataatctgctcggcttccttcaacgttcttcgaatttccagtgccagaaactgctgtggcagctcaatgggaggctggagtactgcctcaaggatcggatgaattttgatatcccagaagagattaagcagttgcagcaatttcagaaggaggacgctgcgcttacaatttacgagatgttgcagaacatattcgccatctttaggcaggactcttcctccaccggatggaatgaaaccattgtagagaatcttctggccaatgtctaccatcagatcaatcatctgaaaactgtcctggaggagaagctcgaaaaggaagactttacgcggggaaagcttatgtcctcccttcatctgaagcgatactatggtaggattttgcattatctaaaagcgaaagagtactctcactgtgcatggacgattgtgcgggtcgagatcttgaggaacttttacttcattaataggttgacaggctacttgcggaat

SEQ ID NO: 14540 - DNA, 561 bp, synthetic construct
  misc_feature 1..561: note = source = /note="Description of Artificial Sequence: Synthetic coding sequence"
  source 1..561: mol_type = other DNA
atgacgaacaagtgcctcctgcaaatcgcgctgctgctgtgcttcagcaccaccgccctgagcatgagctacaacctcctgggcttcctccagaggtccagcaactttcaatgtcaaaaactgttgtggcagctgaatggaaggctcgagtactgtctgaaggacagaatgaatttcgacatcccagaggagatcaagcagcttcagcagttccagaaagaagacgccgcgctcaccatttacgagatgcttcagaatatcttcgccatctttagacaggattcctcgtccaccgggtggaatgaaaccatcgtcgaaaacctgctcgccaacgtctaccatcagatcaaccacctcaaaactgtgctcgaagaaaaactcgagaaggaggacttcactcgcggaaagctgatgtcgtctctgcatttgaagcggtactacggaaggatcctgcactacctgaaagccaaggagtacagccattgcgcctggactatcgtgagagtggagatcctgcggaacttctacttcatcaatcggctgaccgggtatctgcgaaac

SEQ ID NO: 14541 - DNA, 561 bp, synthetic construct
  misc_feature 1..561: note = source = /note="Description of Artificial Sequence: Synthetic coding sequence"
  source 1..561: mol_type = other DNA
atgaccaataaatgcctgcttcagattgccctgctgctctgcttctccacgaccgctttgtctatgtcttataatcttcttgggttcttgcaacggagtagtaatttccagtgccagaagctactttggcagctgaatggcaggctggaatactgcctgaaggacagaatgaatttcgatatacccgaggagatcaaacagttgcaacagttccagaaagaggacgccgccctgacaatttacgagatgctgcagaatatttttgcaattttcagacaggactcttcttctacgggctggaatgagaccatcgtggagaaccttctcgcaaatgtttaccaccagattaatcacctgaagaccgtgttggaggagaagctggaaaaggaggacttcaccagggggaagctgatgtcgagtttgcacttgaaacggtactacggaagaattctgcactatctgaaggccaaagagtactcacattgtgcatggacaattgtgagagtggaaatactgaggaacttctacttcattaatcgcttaactggctatctgaggaac

SEQ ID NO: 14542 - DNA, 561 bp, synthetic construct
  misc_feature 1..561: note = source = /note="Description of Artificial Sequence: Synthetic coding sequence"
  source 1..561: mol_type = other DNA
atgacgaataaatgtttactacaaatagcgttactattatgtttttcgacgacggcgttatcgatgtcgtataatttattaggttttctacaacgttcgtcgaattttcaatgtcaaaaattattatggcaactaaatggtcgtttagaatattgtctaaaagatcgaatgaattttgatataccggaagaaataaaacaattacaacaatttcaaaaagaagatgcggcgttaacgatatatgaaatgttacaaaatatatttgcgatatttcgtcaagattcgtcgtcgacgggttggaatgaaacgatagtagaaaatctattagcgaatgtatatcatcaaataaatcatctaaaaacggtattagaagaaaaactagaaaaagaagattttacgcgtggtaaattaatgtcgtcgctacatctaaaacgttattatggtcgaatattacattatctaaaagcgaaagaatattcgcattgtgcgtggacgatagtacgtgtagaaatactacgtaatttttattttataaatcgtctaacgggttatttacgtaat

SEQ ID NO: 14543 - DNA, 561 bp, synthetic construct
  misc_feature 1..561: note = source = /note="Description of Artificial Sequence: Synthetic coding sequence"
  source 1..561: mol_type = other DNA
atgactaacaagtgtctccttcagattgctctgctcctgtgttttagcactaccgctctctctatgagttacaatctgctgggtttcctccaaagatcttcaaactttcaatgtcagaagctgctttggcagctgaacggcagactggagtactgccttaaggacaggatgaacttcgacatcccagaagagattaagcagttgcagcaattccagaaagaagatgcagcccttacaatttatgaaatgttgcagaatatttttgccatctttaggcaagactcctcatcaaccggttggaacgaaactattgtcgaaaacttgctggccaacgtatatcaccagattaaccacctcaagaccgttctggaggagaaactggagaaagaagacttcacccgcggaaaactgatgagttccctccatcttaaacgttactacggtcgtatactgcattatcttaaagccaaggagtattctcattgcgcatggaccattgtcagggtggagattttgcgcaacttctactttattaacaggcttactggctacttgcgtaac

SEQ ID NO: 14544 - DNA, 561 bp, synthetic construct
  misc_feature 1..561: note = source = /note="Description of Artificial Sequence: Synthetic coding sequence"
  source 1..561: mol_type = other DNA
atgacaaataagtgcctactacagatagctttgctcctttgctttagtacaaccgcactttctatgtcatataatttgttgggctttttgcagagaagttctaacttccaatgccaaaagttgttgtggcagttgaacggacgactcgaatattgtttgaaagatagaatgaactttgacataccagaagaaatcaaacaattgcaacagttccagaaagaggatgcagctttaactatctatgaaatgcttcagaatatctttgcaatattcagacaggattcttcttctaccggctggaatgaaacaattgtcgaaaaccttttggctaatgtttatcaccaaattaaccacttaaaaactgtgttagaagagaaactcgaaaaagaagatttcactagaggaaaattgatgtcttcacttcaccttaaacgttattacggacgtattttgcactacttgaaggcgaaggaatattcccattgcgcctggaccatagtcagagtagagattcttagaaatttctatttcatcaataggttgactgggtacctaagaaac

SEQ ID NO: 14545 - DNA, 561 bp, synthetic construct
  misc_feature 1..561: note = source = /note="Description of Artificial Sequence: Synthetic coding sequence"
  source 1..561: mol_type = other DNA
atgacaaacaagtgcctccttcagatcgcactcctgttgtgcttctccacaaccgccctctccatgtcatacaacctgctgggcttcctgcagcgcagtagtaactttcagtgccagaagcttctgtggcagctgaatggacgtctcgagtattgcctgaaggaccgaatgaattttgatatcccagaggagatcaagcagctgcagcagttccagaaggaggacgcggccctgactatctatgagatgttacaaaatatttttgctatcttccgccaggactcctccagcaccggatggaatgaaaccattgttgaaaaccttctggccaacgtgtatcaccagatcaatcatctgaagaccgtcctcgaggaaaaacttgagaaggaggacttcacacgaggaaagctgatgagtagcctgcatttgaaaagatattacggacgtatcctccactatctgaaagcaaaggagtatagtcattgcgcatggactatcgtgagagtggaaattctaaggaatttctactttattaatcgcttgaccggctacctgcgcaat

SEQ ID NO: 14546 - DNA, 561 bp, synthetic construct
  misc_feature 1..561: note = source = /note="Description of Artificial Sequence: Synthetic coding sequence"
  source 1..561: mol_type = other DNA
atgaccaacaagtgtttgctgcaaatcgcccttctgctgtgtttcagcaccactgccctgtcaatgtcatacaacctccttggatttctgcaacgatcgtcgaattttcagtgtcagaaactcctttggcagctcaacggtcgcctggaatactgcctgaaggaccgtatgaattttgatattcccgaagagattaagcaactgcaacaattccaaaaagaggatgcagccctgacgatttacgagatgcttcagaatatctttgccatttttcggcaagattccagctcgactggttggaacgagacgattgtggaaaatctccttgccaatgtgtaccatcagattaaccacctcaaaactgtgcttgaggaaaagctcgagaaggaagattttactagaggtaaacttatgagctcactgcacctgaagcgctactacggacggattctgcattaccttaaggcgaaggaatactcacattgtgcatggaccatcgtgcgagtggaaattctgagaaacttttactttatcaatcggttgactgggtacctgagaaac

SEQ ID NO: 14547 - DNA, 561 bp, synthetic construct; identical to SEQ ID NO: 14515
  misc_feature 1..561: note = source = /note="Description of Artificial Sequence: Synthetic coding sequence"
  source 1..561: mol_type = other DNA

SEQ ID NO: 14548 - DNA, 534 bp, synthetic construct
  misc_feature 1..534: note = source = /note="Description of Artificial Sequence: Synthetic coding sequence"
  source 1..534: mol_type = other DNA
atgcattcctccgctctcctgtgctgcctagtacttctcaccggagtccgggctagcccaggtcagggcactcagtctgagaattcatgtacacacttccctggcaatctccctaacatgcttcgtgacttgagagacgccttctcccgggtcaagacattctttcagatgaaggaccagttagacaaccttctcttaaaggaatcgctgctcgaggacttcaaagggtacctgggatgtcaggcgcttagtgaaatgatacagttttatcttgaagaggtcatgccacaggccgaaaaccaggaccccgacattaaagctcacgtcaattcactgggcgaaaatctgaaaacccttcggctgagacttcggaggtgccacagatttctgccatgcgagaataagtccaaggctgtggagcaagttaagaatgccttcaataagctgcaggagaagggcatctacaaggccatgtctgaatttgatattttcatcaactacatagaagcctatatgacgatgaagatccggaac

SEQ ID NO: 14549 - DNA, 534 bp, synthetic construct
  misc_feature 1..534: note = source = /note="Description of Artificial Sequence: Synthetic coding sequence"
  source 1..534: mol_type = other DNA
atgcatagtagcgcactattgtgctgcctcgtcctgttgacaggagttcgcgctagccctggccaaggcactcagtcagaaaattcttgtacgcactttccggggaatctaccgaacatgttacgcgaccttcgagatgcgttctcgagggttaaaacgttctttcaaatgaaggatcaattggacaacctacttcttaaagaaagtcttttagaagactttaagggttacttagggtgtcaggcgctgtctgaaatgatccaattttatttggaggaagtaatgccacaagcggaaaatcaggatcctgacataaaagctcatgttaactctctgggcgagaatctaaaaacattgcgtttaaggttgagacgttgccaccgttttctaccctgcgagaataaaagcaaagctgttgaacaagtaaagaacgccttcaacaagttgcaagaaaagggaatttataaagcaatgtcagagtttgatattttcattaactacattgaagcgtacatgacgatgaagataagaaat

SEQ ID NO: 14550 - DNA, 534 bp, synthetic construct
  misc_feature 1..534: note = source = /note="Description of Artificial Sequence: Synthetic coding sequence"
  source 1..534: mol_type = other DNA
atgcactcatcggcgctcctttgctgcttagttcttcttacgggtgttcgcgcctcgcccggtcagggaactcaatcagagaactcttgcacacattttccgggtaatcttcctaatatgttgagagatcttcgcgatgcattctcgcgggtcaaaacctttttccaaatgaaagaccagctagacaaccttctgttgaaagaatcgctgctcgaagatttcaagggctacctgggttgccaggccctatcagagatgatccaattttatctcgaagaagtgatgccgcaggctgaaaatcaggatccggatatcaaagcccatgtaaactccctgggggaaaacctgaaaacactgcgtctgcgtctgcgaagatgccatcgatttctgccctgtgagaacaaatctaaagccgttgaacaggtgaagaatgcattcaacaaattgcaggagaaaggcatctacaaagcgatgtcggaattcgatatctttattaattacatagaagcttacatgacaatgaaaatccgcaac

SEQ ID NO: 14551 - DNA, 534 bp, synthetic construct
  misc_feature 1..534: note = source = /note="Description of Artificial Sequence: Synthetic coding sequence"
  source 1..534: mol_type = other DNA
atgcactcaagtgccctattatgttgtcttgtccttcttacaggagtacgggccagtcccgggcagggaactcaatctgaaaattcatgcacacattttcctgggaacctccccaatatgttgagagatctccgggatgccttctctagagtgaaaacatttttccagatgaaggatcagcttgataacctactactgaaagaatcccttctggaggattttaaaggatacttagggtgccaggctctatctgaaatgatacagttttacctggaagaagtgatgcctcaggcggaaaatcaggatcccgatatcaaagcccatgtcaatagtctaggggaaaacctgaaaacgttgaggctgcgactccgccgttgccatcggttcctaccctgtgaaaataagtctaaggcagtcgaacaggtgaaaaatgccttcaataaattgcaggagaaagggatttataaggctatgagtgaatttgatatattcatcaattatatcgaagcttatatgacaatgaaaattcggaat

SEQ ID NO: 14552 - DNA, 534 bp, synthetic construct
  misc_feature 1..534: note = source = /note="Description of Artificial Sequence: Synthetic coding sequence"
  source 1..534: mol_type = other DNA
atgcattcgtcggcgttattatgttgtttagtattactaacgggtgttcgtgcgtcgccgggtcaaggtacgcaatcggaaaattcgtgtacgcattttccgggtaatctaccgaatatgctacgagatctacgagatgcgttttcgcgagtaaaaacgttttttcaaatgaaagatcaattagataatctattactaaaagaatcgttactagaagattttaaaggttatttaggttgtcaagcgctatcggaaatgatacaattttatttagaagaagttatgccgcaagcggaaaatcaagatccggatataaaagcgcatgttaattcgctaggtgaaaatctaaaaacgctacgattacgtctacgacgttgtcatcgatttctaccgtgtgaaaataaatcgaaagcggtagaacaagtaaaaaatgcgtttaataaattacaagaaaaaggtatatataaagcgatgtcggaatttgatatatttataaattatatagaagcgtatatgacgatgaaaatacgtaat

SEQ ID NO: 14553 - DNA, 534 bp, synthetic construct
  misc_feature 1..534: note = source = /note="Description of Artificial Sequence: Synthetic coding sequence"
  source 1..534: mol_type = other DNA
atgcatagcagtgcgctgctgtgttgcttagtgttgctgactggggtcagagcatctcctggacagggaactcagtcagaaaactcctgtactcacttccctgggaatctgccaaatatgctcagggacctacgcgacgctttttcccgagtgaagaccttctttcagatgaaggaccagttagacaatctgctgttgaaggagagtctccttgaggacttcaagggctatctggggtgtcaggcactgtctgaaatgatacagttctatcttgaagaagtgatgccgcaggccgagaatcaggacccagacataaaggcccatgtcaacagtctcggagagaatctcaagacactgagattgcggctgcgccgatgccaccgctttctgccatgcgagaacaaatctaaggctgtagagcaggtgaagaatgcattcaacaagcttcaggaaaaaggtatatacaaagctatgtccgaattcgatatcttcataaactacatcgaggcatacatgacgatgaagatcaggaac

SEQ ID NO: 14554 - DNA, 534 bp, synthetic construct
  misc_feature 1..534: note = source = /note="Description of Artificial Sequence: Synthetic coding sequence"
  source 1..534: mol_type = other DNA
atgcattcatcggcacttctctgttgccttgtccttcttaccggagtgcgggcatcgcctggacaaggaacccagtccgagaacagctgtactcattttcctggtaacctgcctaacatgctcagggatctgcgcgacgcgttctcgcgggtgaaaacgttctttcaaatgaaggatcagctggacaatctgctgctgaaggagtcactgctggaggactttaaaggctacctggggtgccaggctcttagcgagatgatacagttttacttggaagaagttatgccccaagccgaaaatcaagacccggacattaaggcacacgttaattcccttggcgagaacctcaagactcttcgcttgagacttcgacgttgtcaccgattcctgccgtgtgaaaacaagtcgaaggcagtagaacaagtgaaaaacgcattcaataagctccaagaaaaaggtatctacaaggccatgtccgagtttgacattttcatcaactacattgaggcttatatgaccatgaagattagaaac

SEQ ID NO: 14555 - DNA, 534 bp, synthetic construct
  misc_feature 1..534: note = source = /note="Description of Artificial Sequence: Synthetic coding sequence"
  source 1..534: mol_type = other DNA
atgcatagcagtgccctcctgtgttgcctcgtcctcttgaccggtgtgcgagctagccctggtcaaggtacgcaatctgagaactcatgcacccatttccccggcaaccttcctaatatgctgcgcgaccttagggatgcgttttcccgtgtcaagactttctttcagatgaaggatcaactcgacaacctccttttgaaggaatcactgctggaagatttcaaaggataccttggctgtcaggcactgtcggaaatgattcagttttacctggaagaagtcatgccccaagcagaaaatcaagatcctgacatcaaggcacacgtgaactcactgggagagaacctcaagacccttcggctgagacttagacgatgtcaccggtttctcccatgtgagaacaaaagtaaggccgtggagcaagtgaaaaatgcattcaataagctccaggaaaagggtatttacaaagctatgtcggaatttgacatcttcataaactacattgaggcatacatgactatgaagattcgaaac

SEQ ID NO: 14556 - DNA, 534 bp, synthetic construct
  misc_feature 1..534: note = source = /note="Description of Artificial Sequence: Synthetic coding sequence"
  source 1..534: mol_type = other DNA
atgcattcgagtgccttactttgttgcctcgtactactcacgggagttagggcatcgccaggccagggaacccagagcgagaacagttgtacacactttcccggtaacttgcccaatatgttgagggatcttcgggacgctttcagcagagtcaagactttcttccagatgaaagaccagttggacaatctgctgctgaaagaatctttgctggaggatttcaaaggatacttgggctgccaagcattaagcgaaatgatccagttctatttagaggaagtgatgccccaggcagagaaccaagacccagatataaaggcccatgtgaactccctgggcgaaaacctgaagacacttaggcttcggctgcgtcgctgccaccggtttcttccctgtgaaaacaagagtaaagccgtcgagcaggtcaagaatgcatttaataaacttcaggagaagggtatttacaaagccatgagtgagttcgatatctttataaattatatagaagcatatatgaccatgaaaatcagaaat

SEQ ID NO: 14557 - DNA, 534 bp, synthetic construct
  misc_feature 1..534: note = source = /note="Description of Artificial Sequence: Synthetic coding sequence"
  source 1..534: mol_type = other DNA
atgcactcttcagcgcttttgtgctgtctcgtgttactcacgggcgtgcgtgccagcccgggacagggaacccaatccgaaaactcatgtactcatttcccgggaaacctgcccaacatgctcagggacctcagagacgcttttagtcgggtgaagaccttttttcagatgaaagatcagctggacaatctattactaaaagagagcttactggaggattttaagggatatctcgggtgccaagccctctccgagatgattcagttttatctcgaggaggtaatgccacaggcggaaaaccaggacccggacattaaggcgcacgtcaactcgctgggagagaatttgaaaacactacggctgcgactcaggaggtgccatcggttcctcccatgcgagaacaaaagcaaggccgtggagcaggtgaagaacgcgttcaataagttgcaagaaaaggggatttacaaggccatgtctgaatttgacattttcataaactatatagaggcctatatgactatgaagatccgtaat

SEQ ID NO: 14558 - DNA, 534 bp, synthetic construct
  misc_feature 1..534: note = source = /note="Description of Artificial Sequence: Synthetic coding sequence"
  source 1..534: mol_type = other DNA
atgcactcgtctgctcttctctgttgccttgtgctgttgacgggggtgcgagcttcgccaggtcaaggaacgcaatcggagaacagctgtacacacttcccaggtaatttaccaaacatgttaagagatctacgtgacgcattttcaagggtcaaaacgttttttcagatgaaagatcagctagacaacctgcttcttaaggagtccttactggaagatttcaagggatacttaggatgtcaagcactatcagaaatgatccaattctacctggaggaagtcatgccacaagctgaaaatcaagatcctgatataaaagctcatgtcaacagccttggagaaaatctgaaaacgctcagattacggcttagaagatgtcaccgatttctgccatgtgaaaataagtctaaagcagtagaacaggtcaaaaatgcctttaataagttgcaagaaaaaggaatttataaagcgatgtcagaatttgacatttttattaattacattgaggcctacatgacaatgaagatccgaaat

SEQ ID NO: 14559 - DNA, 534 bp, synthetic construct
  misc_feature 1..534: note = source = /note="Description of Artificial Sequence: Synthetic coding sequence"
  source 1..534: mol_type = other DNA
atgcatagtagcgctctcctttgctgtcttgtgctgctcaccggagtgcgagccagccccggtcagggcactcagtcggagaattcctgcactcacttcccggggaacctgccgaacatgctgagggacctcagagacgcattttcacgcgtcaaaacgttcttccagatgaaagaccaactcgataacctgctccttaaggaatcgctgctggaagatttcaagggatacctggggtgtcaagcgctcagtgaaatgatccagttctacctcgaagaggttatgccacaggcggagaaccaggatccagacatcaaggcccacgtcaattcacttggtgaaaatctgaaaaccctgcggctccgcttgcgccgctgccaccgctttctcccgtgcgaaaacaagtctaaggctgtggaacaagtgaagaacgctttcaacaagctccaggagaagggaatctataaggccatgtcggagtttgatatctttatcaactacattgaagcatacatgaccatgaagatccggaac

SEQ ID NO: 14560 - DNA, 534 bp, synthetic construct
  misc_feature 1..534: note = source = /note="Description of Artificial Sequence: Synthetic coding sequence"
  source 1..534: mol_type = other DNA
atgcattcaagcgctctcctttgttgtctggtgctcctcactggagtgagagcaagccctggtcagggaacgcaatcagagaacagctgtactcatttccctggaaacctgcccaatatgctgagagacttgcgcgatgccttctcgcgagtcaagaccttcttccaaatgaaggaccaacttgacaacctgctgctgaaggaatcgctgcttgaggactttaaaggctacctgggttgccaagctctgtcggagatgattcaattctaccttgaagaggtcatgccacaggcggaaaatcaagatcctgacataaaggcacatgtcaacagccttggagaaaatcttaagaccctgcgccttcgcctccgccgctgtcatcgttttctcccctgcgaaaacaagtccaaagcggtggaacaagtgaagaacgcatttaacaaacttcaggagaagggaatttacaaggccatgtcagagtttgacatattcattaactacattgaagcatacatgactatgaagatccggaac

SEQ ID NO: 14561 - DNA, 534 bp, synthetic construct
  misc_feature 1..534: note = source = /note="Description of Artificial Sequence: Synthetic coding sequence"
  source 1..534: mol_type = other DNA
atgcactcctccgcgctgctgtgctgcctggttctcctgaccggagtccgggcctcgccgggccaggggacccagtcagagaattcgtgtactcacttcccaggaaatctccctaacatgctgagagatctccgcgacgccttctcaagagtgaaaacttttttccaaatgaaggaccagctcgacaatctgctgctgaaggaatcgctgctcgaggacttcaagggatacctgggctgccaggcactgtctgagatgatccagttttatctcgaggaggtcatgcctcaagctgaaaatcaggacccggatatcaaggcacatgtcaactccctgggagagaatctgaaaacgctgcgcctcagactccggcgctgtcatcgctttttgccgtgcgagaacaagagcaaggccgtggagcaagttaagaatgcgttcaacaaacttcaggaaaagggcatatacaaggccatgtctgaattcgacatcttcatcaactacattgaagcctacatgaccatgaagatcagaaac

SEQ ID NO: 14562 - DNA, 534 bp, synthetic construct
  misc_feature 1..534: note = source = /note="Description of Artificial Sequence: Synthetic coding sequence"
  source 1..534: mol_type = other DNA
atgcactcctcggcactgctctgttgcttggtcctccttaccggagtcagggcgtcaccaggccaaggtacgcagtccgaaaactcatgcacccacttcccagggaatttgcctaatatgctgcgggacctgagggacgcgttttcgcgcgtgaaaacgttttttcagatgaaggatcaactggacaaccttctgcttaaggaatcactgctggaagatttcaagggttacctcggatgtcaagctctttccgaaatgattcaattctaccttgaggaagtgatgcctcaggccgaaaaccaagatcccgatatcaaagcacatgtgaattccctcggcgaaaacttgaaaacgttgcggttgcgattgaggagatgccatcgttttctcccatgtgaaaacaagagcaaggcagtcgagcaagtcaagaacgcattcaataaactccaggagaaaggcatttacaaggcaatgtcggagtttgacatctttatcaactatattgaagcctacatgaccatgaagatccgcaac

SEQ ID NO: 14563 - DNA, 534 bp, synthetic construct
  misc_feature 1..534: note = source = /note="Description of Artificial Sequence: Synthetic coding sequence"
  source 1..534: mol_type = other DNA
atgcattcctccgccttgctctgttgcctggtgttgctgacaggtgtgcgcgcttccccaggacagggaacccagagtgagaacagctgcacgcatttccctggtaacctccctaatatgttgagagatctccgcgacgctttcagccgggtgaagactttcttccagatgaaagaccagttggacaacctcctgctgaaagaaagtttgctggaggacttcaagggttacctgggatgtcaggccctgtctgagatgattcagttctacctggaagaggtgatgccacaagcagagaaccaggacccagacatcaaagcccatgtgaacagcctcggcgagaatctcaagactttgcggctgcggctgagacgatgccaccggtttctgccttgcgagaataaatccaaagccgtggagcaggttaaaaatgccttcaataagctccaagagaagggaatttataaggctatgagcgaatttgatattttcataaattatatagaggcctacatgaccatgaagatcaggaac

SEQ ID NO: 14564 - DNA, 534 bp, synthetic construct
  misc_feature 1..534: note = source = /note="Description of Artificial Sequence: Synthetic coding sequence"
  source 1..534: mol_type = other DNA
atgcacagctcggccttgctgtgctgcctggtgctgcttaccggagtcagagcatcccccggtcaaggcactcaatcggagaactcttgtacccacttccccgggaatctgccaaacatgctgcgtgacttacgagatgccttttctcgcgtgaaaacgttctttcagatgaaagatcagctggacaatctgttgctgaaagagtctttgcttgaggactttaaggggtacctggggtgccaggcccttagtgaaatgatccagttttatcttgaagaggtgatgccgcaggccgaaaatcaggacccggatataaaggcccatgtgaattcacttggggaaaatttgaaaacactgaggttgcgccttcgccgctgtcatagattcctgccttgtgaaaataagagtaaagctgttgagcaggtaaaaaacgcgtttaacaagttgcaggagaaggggatctacaaggcaatgagtgagttcgatatcttcatcaattatattgaggcatatatgactatgaagatacgcaat

SEQ ID NO: 14565 - DNA, 534 bp, synthetic construct
  misc_feature 1..534: note = source = /note="Description of Artificial Sequence: Synthetic coding sequence"
  source 1..534: mol_type = other DNA
atgcactcctctgccctcttgtgttgtctggtgcttctgactggggttagggctagccctggacagggtacccagagtgagaattcttgcacacacttcccgggaaatctccccaacatgttgagagacctgcgggatgccttcagtcgagtgaaaacatttttccaaatgaaggatcagctggacaacctgctgctgaaagagtcactgttagaagactttaaaggatacctgggttgccaggccctttctgagatgatccagttctaccttgaggaggtgatgccccaggccgagaaccaggaccccgatatcaaggcgcatgttaactcactcggggagaatctaaagaccctgcgtctgcggctacgtcgctgccatcgtttcctgccctgcgagaataaatccaaggcagtggaacaggttaaaaacgcattcaacaagctgcaggagaagggaatatacaaagccatgtccgagtttgatatttttatcaattatatcgaggcttatatgactatgaaaatccggaat

SEQ ID NO: 14566 - DNA, 534 bp, synthetic construct
  misc_feature 1..534: note = source = /note="Description of Artificial Sequence: Synthetic coding sequence"
  source 1..534: mol_type = other DNA
atgcactcctcggccttgttgtgttgtctggtgctccttactggtgtgcgggcgtcacccggacagggaactcaatccgaaaatagctgtactcattttccaggaaatctccctaacatgctgcgggacctgcgtgatgcattttctagggtcaaaacgttctttcaaatgaaggatcagctcgacaacctccttctgaaggaaagccttcttgaagatttcaaaggctacttgggctgccaagcgcttagcgagatgattcagttttaccttgaggaagtaatgcctcaggccgagaaccaagatccagacattaaggcacacgtcaattctctcggggaaaatctgaaaactctgagacttcgactgaggcgctgccatagatttcttccttgtgaaaacaagtccaaagcagtggaacaagtgaagaacgccttcaataagttgcaagagaaaggaatctacaaggcaatgtcggaatttgacatattcatcaactacatagaggcttatatgacgatgaaaattcgaaac

SEQ ID NO: 14567 - DNA, 534 bp, synthetic construct
  misc_feature 1..534: note = source = /note="Description of Artificial Sequence: Synthetic coding sequence"
  source 1..534: mol_type = other DNA
atgcatagcagcgccctgctgtgttgtctggtgctcctgaccggggtgagagcctccccgggccagggtactcaatccgaaaattcctgcacacatttccccggcaaccttccgaacatgttgcgcgatctcagagatgcctttagcagggtgaagacattcttccagatgaaggatcagcttgacaacttgctgctgaaagagtctctgcttgaggatttcaagggatacctgggatgtcaagcactgagtgagatgatccagttttacctcgaggaggtgatgccccaagcagagaatcaggaccctgacataaaagctcatgtaaattccctgggcgagaacttgaagacactgaggttgcgcctgcgaaggtgtcacagattccttccatgcgagaataaaagcaaggccgtggaacaagtgaaaaacgcatttaacaagctgcaggagaaggggatctacaaagccatgtctgagtttgatattttcatcaattatattgaggcctatatgaccatgaaaattaggaac

SEQ ID NO: 14568 - DNA, 534 bp, synthetic construct
  misc_feature 1..534: note = source = /note="Description of Artificial Sequence: Synthetic coding sequence"
  source 1..534: mol_type = other DNA
atgcatagcagtgctttgttgtgctgtctggtgttgctgacgggcgtgcgtgcctctcccggtcagggcacccaatcagaaaactcttgtacacattttccaggcaacctgccaaacatgctgcgcgacctacgcgatgcattctcgcgcgtaaagacttttttccagatgaaagaccagctagataacctgctcttgaaggagtcgcttctggaggacttcaagggatatctggggtgccaggctcttagcgaaatgatacaattttacctggaggaggttatgccccaggcggagaaccaggatcccgacattaaagctcatgtgaatagccttggcgagaaccttaagaccctgaggttaaggttgagacgttgccaccgctttctaccatgcgagaacaagtccaaggccgtggaacaggtgaagaacgcgttcaacaagctccaggaaaaaggaatctacaaggccatgagcgaatttgatatttttattaactatatcgaggcttacatgactatgaaaatacgcaat

SEQ ID NO: 14569 - DNA, 534 bp, synthetic construct
  misc_feature 1..534: note = source = /note="Description of Artificial Sequence: Synthetic coding sequence"
  source 1..534: mol_type = other DNA
atgcattccagcgcactcttgtgttgcctggtgctgctcaccggtgtccgggcctccccggggcagggaacccagagcgaaaactcgtgcactcacttcccaggaaatctgcccaatatgctccgcgacctgagggacgcgttctcccgggtgaaaaccttcttccaaatgaaggaccaacttgataaccttctgctcaaggagtcgctgctggaggatttcaagggatacctcggctgtcaggctttgtctgaaatgatccagttctacttggaggaagtgatgccgcaagccgagaaccaggacccggatatcaaggcacacgtcaactcgctcggcgaaaacctgaaaacgctgcgcctgagactgagacgatgccatcggtttctcccttgcgaaaacaagtcaaaggctgtggaacaagttaaaaacgcctttaataagctgcaggagaagggaatctataaggccatgtcagagttcgacatttttatcaattacatcgaagcgtacatgactatgaaaatccgcaac

SEQ ID NO: 14570 - DNA, 534 bp, synthetic construct
  misc_feature 1..534: note = source = /note="Description of Artificial Sequence: Synthetic coding sequence"
  source 1..534: mol_type = other DNA
atgcattcttccgcgctgctgtgctgtttggttctgttgacaggagtgcgggcgtcccctggccagggcacccaatctgaaaactcatgtacacattttcccgggaacttgccaaatatgctccgagacctgcgggacgccttttcccgggttaagaccttcttccagatgaaagatcagctagacaaccttctactgaaggagtctctactcgaggacttcaagggctacttgggctgtcaggccctgtcagagatgattcagttttacctggaggaggttatgccccaggcagaaaatcaggaccccgacatcaaagctcatgttaattcgttgggagagaacctgaagactttaaggctcaggctacggcgctgtcatcggttcctgccatgcgagaacaagtcgaaggccgtggagcaggtgaaaaatgcattcaataagctgcaggagaagggcatctacaaggctatgagcgagtttgacatcttcatcaactacatagaagcatacatgactatgaaaattcggaac

SEQ ID NO: 14571 - DNA, 534 bp, synthetic construct; identical to SEQ ID NO: 14556
  misc_feature 1..534: note = source = /note="Description of Artificial Sequence: Synthetic coding sequence"
  source 1..534: mol_type = other DNA

SEQ ID NO: 14572 - DNA, 534 bp, synthetic construct
  misc_feature 1..534: note = source = /note="Description of Artificial Sequence: Synthetic coding sequence"
  source 1..534: mol_type = other DNA
atgcattcctccgctctgctgtgctgcctagtactcttgactggagttcgggcctccccaggacagggaacacagagtgaaaattcatgcacacacttccccgggaatctccctaatatgctgagggacctgcgggatgccttcagtcgcgtcaagactttctttcagatgaaagatcagctagataacctccttctaaaagaaagtctactagaagattttaaaggatacctggggtgccaggctctgtctgagatgatacagttttatctagaagaggtgatgccacaagctgaaaatcaggatccagatataaaagctcacgttaatagtctgggagaaaatcttaagactcttagactgcgcctcaggagatgccaccggttcctgccttgtgaaaacaaatccaaagccgtggagcaggttaagaatgccttcaacaaactgcaggaaaaagggatttataaagctatgtctgagtttgatatattcattaattacatcgaagcatatatgacaatgaagattcgaaac

SEQ ID NO: 14573 - DNA, 534 bp, synthetic construct
  misc_feature 1..534: note = source = /note="Description of Artificial Sequence: Synthetic coding sequence"
  source 1..534: mol_type = other DNA
atgcattcgtccgcactgctttgttgtcttgtgctgcttactggcgtccgggcgagccctgggcaaggaacccaatcggaaaatagctgcacccattttcctggtaacttgccaaatatgcttcgcgatcttagggatgctttcagtcgagtcaagacttttttccaaatgaaggatcagctcgataatctgcttcttaaagagtcgctccttgaagatttcaagggttacctgggttgtcaggcactcagcgaaatgatacagttttatcttgaggaagtcatgcctcaggcggaaaaccaagatccagacattaaggcccatgtgaactcgctcggcgaaaacctgaaaaccctcagacttaggctgcggcgctgtcaccgatttctgccctgcgagaacaagtctaaggctgtggagcaagtgaaaaatgccttcaataaacttcaggaaaagggtatctacaaagctatgagcgaatttgacattttcattaactacatcgaagcatacatgacgatgaagattcggaat

SEQ ID NO: 14574 - DNA, 534 bp, synthetic construct
  misc_feature 1..534: note = source = /note="Description of Artificial Sequence: Synthetic coding sequence"
  source 1..534: mol_type = other DNA
atgcactcatcagccctcctgtgctgcctcgtgctgctcaccggtgtgcgggcatctcctgggcagggaactcagagcgaaaactcctgtacccacttcccaggcaatctgccgaatatgctgcgcgatctgcgcgatgccttctcgcgggtgaaaaccttcttccagatgaaggaccaactggacaacctgttgctcaaggaatctctcctcgaagatttcaaaggttacctgggatgtcaggcactttcggaaatgatccagttttacctggaggaggtgatgccacaagccgaaaaccaagacccagatatcaaagcccatgtcaattccctcggggagaaccttaagaccctgcggctgcgattgcgcagatgccacaggttcctgccgtgcgagaacaagagcaaagcagtggaacaggtgaaaaatgccttcaacaagctccaggagaaaggaatctacaaggcgatgtccgagtttgatatcttcattaactatatcgaagcctacatgactatgaaaatcagaaac

SEQ ID NO: 14575 - DNA, 534 bp, synthetic construct
  misc_feature 1..534: note = source = /note="Description of Artificial Sequence: Synthetic coding sequence"
  source 1..534: mol_type = other DNA
atgcatagttctgcccttctgtgctgtctggtgctgctgactggggtccgcgcaagtcctggccagggcactcagtcggaaaattcttgtacccatttccccgggaacttgccaaacatgctgagggacctccgggatgctttctcccgggtcaagacttttttccagatgaaggaccagctggacaacctgctacttaaggaatctctccttgaggactttaagggctatctcggatgtcaagcactgtctgaaatgattcaattctatctagaggaagttatgccacaagcagaaaaccaggatcccgatattaaggctcacgtgaactccttgggagagaatctgaaaacattgaggttgagactgagaaggtgtcatcgatttctcccatgcgagaacaaatcaaaggcggtggagcaggtgaagaatgctttcaataaactgcaggaaaaaggcatttataaggccatgagtgaattcgatatcttcattaattacatcgaggcctacatgacgatgaagatcaggaat

SEQ ID NO: 14576 - DNA, 534 bp, synthetic construct
  misc_feature 1..534: note = source = /note="Description of Artificial Sequence: Synthetic coding sequence"
  source 1..534: mol_type = other DNA
atgcactcgtcagcactgctttgctgtctcgtgcttttgacgggagttcgtgcatccccaggccaagggactcaatccgagaattcctgtactcattttcctggaaacctgccaaacatgctccgggatctgcgggatgcgttcagcagggtcaagaccttctttcaaatgaaggatcagctggacaatcttctgcttaaggaatcgctgctcgaagatttcaaaggttacttgggatgtcaggcacttagcgaaatgatccaattctaccttgaagaagtgatgccccaagccgaaaaccaagatccagacattaaggcccacgtcaacagccttggcgagaatctgaaaaccttgcgtctcagacttcgcagatgtcatcgcttcctgccttgcgaaaacaagagcaaggcagtggagcaggtgaaaaatgcctttaacaaactccaagagaagggtatttacaaggcgatgtccgaatttgacatcttcataaactatattgaggcttatatgaccatgaagatccgcaat

SEQ ID NO: 14577 - DNA, 534 bp, synthetic construct
  misc_feature 1..534: note = source = /note="Description of Artificial Sequence: Synthetic coding sequence"
  source 1..534: mol_type = other DNA
atgcacagttccgccctgctgtgctgtctcgtcctcctgacgggggtgagggcctctcctggccagggcacacagagcgagaattcctgcacgcacttccccgggaatctgcccaacatgttacgggatctgagagacgcattctcccgagtcaaaacatttttccagatgaaagaccagctcgacaacttactgctgaaggaaagcttgctggaggacttcaaggggtacctaggctgccaagctcttagtgagatgatccagttttatctggaggaggttatgccgcaggcggaaaaccaagatcccgacattaaagcacatgtaaattctttgggcgagaacttaaaaactctcagactgcgtttacgaagatgtcacagattcttgccgtgcgagaataaatccaaggcagttgagcaggtgaaaaacgcttttaataagttacaggagaaggggatctacaaggctatgagtgaattcgacatcttcatcaattacatcgaggcctatatgaccatgaagatcaggaac

SEQ ID NO: 14578 - DNA, 534 bp, synthetic construct
  misc_feature 1..534: note = source = /note="Description of Artificial Sequence: Synthetic coding sequence"
  source 1..534: mol_type = other DNA
atgcatagctctgcgctcctgtgctgcttggtgctgctgaccggagttcgcgcctcccccggacagggtacccagtcagagaatagctgtactcacttcccgggcaaccttccaaacatgctccgtgacctgcgggatgccttctcgcgcgtcaaaacctttttccaaatgaaggaccaactcgacaacctgcttctgaaggaatctcttctggaggatttcaagggttacttggggtgccaagccttgagcgaaatgatccagttttacctggaagaagtgatgcctcaggcagaaaaccaagacccagacatcaaagctcatgtgaactcacttggagagaatctgaaaactctgcgcctgcggttgcgaaggtgtcacagattcttgccgtgcgagaacaaatcgaaagcagtcgagcaggtgaagaatgctttcaataagttgcaggaaaagggaatatacaaggctatgtccgagttcgatatcttcatcaactatatcgaagcctacatgacgatgaagattcgcaac

SEQ ID NO: 14579 - DNA, 534 bp, synthetic construct
  misc_feature 1..534: note = source = /note="Description of Artificial Sequence: Synthetic coding sequence"
  source 1..534: mol_type = other DNA
atgcatagttccgccctcttgtgctgcctggtgctcctgaccggcgtgcgagcttcgccgggccaagggacccagagcgagaattcgtgcacgcacttccctggcaatcttcccaatatgcttagggacctccgagatgccttctcgcgcgtcaagaccttctttcagatgaaggatcaactggataatctgctgctgaaggagagcttgctcgaggacttcaaagggtacctcggttgtcaagcgctgagtgaaatgattcagttttacctggaggaggtcatgccacaagcagaaaatcaggaccccgatatcaaagcgcacgtcaacagtctgggagagaatcttaagacgctgcgcctgcgcttacgccgatgtcacagattccttccgtgcgaaaacaagtcgaaagctgtagaacaggtgaagaacgcattcaataagctgcaggaaaagggaatctataaggctatgtctgagtttgacattttcatcaactacatagaggcctatatgactatgaaaatccggaac

SEQ ID NO: 14580 - DNA, 534 bp, synthetic construct
  misc_feature 1..534: note = source = /note="Description of Artificial Sequence: Synthetic coding sequence"
  source 1..534: mol_type = other DNA
atgcactcttcagccctcctgtgctgtctcgtgctcctcactggagttcgcgcgagcccaggacaaggtacacagtctgaaaattcttgtacccattttccagggaaccttcccaacatgctcagagacctgagagatgcatttagccgcgtgaagacctttttccaaatgaaggatcaactcgataacctgctgctgaaagaatccctcctcgaagattttaaaggttacctcggttgccaggcattgtccgaaatgatccaattctacctggaagaagtgatgccccaggctgagaaccaagatcctgatatcaaggcacatgttaactcgctgggcgagaacctaaagacattgaggctgcgcctgagacgctgccatcgttttctcccttgcgaaaacaagagcaaggccgtggagcaggtaaagaatgcttttaacaagctccaggaaaaaggtatttacaaagccatgagtgagttcgacatttttatcaattatatagaggcgtacatgactatgaaaatccggaac

SEQ ID NO: 14581 - DNA, 534 bp, synthetic construct
  misc_feature 1..534: note = source = /note="Description of Artificial Sequence: Synthetic coding sequence"
  source 1..534: mol_type = other DNA
atgcattcctccgctctcctgtgctgccttgtgctgctgacaggagttcgggcatctccaggccagggaacacaaagtgaaaactcttgcacacacttcccaggcaaccttccaaacatgctgcgcgacttgcgggacgccttttcgcgggtgaagaccttcttccaaatgaaggaccagctcgacaacctgcttctaaaggagtccttgctcgaagactttaaggggtacctcgggtgtcaggctctttccgagatgatccagttctacttagaggaggttatgcctcaggctgaaaaccaggaccctgacattaaagctcatgtcaattcactgggagaaaatctcaagacactgcgactgcgtttgagaagatgtcaccggttcctgccttgtgaaaacaagagcaaagctgttgagcaggtcaagaatgcttttaacaaactgcaggagaaaggaatatacaaagcaatgtcagagttcgacatttttattaactatattgaagcgtatatgacaatgaagatacggaat

SEQ ID NO: 14582 - DNA, 534 bp, synthetic construct
  misc_feature 1..534: note = source = /note="Description of Artificial Sequence: Synthetic coding sequence"
  source 1..534: mol_type = other DNA
atgcactccagtgctctgctgtgttgtttggtgctactaaccggcgttcgggcttctccagggcagggcacccaaagtgagaactcctgcacccatttccctggcaacctgcctaacatgctgagagacttgagagatgccttcagtagagtcaagactttcttccagatgaaggaccagctggacaatctgctgctcaaggaatcactgctcgaagatttcaagggctacttaggatgccaagctctgtccgagatgattcagttttatctcgaggaggtgatgccacaggccgaaaaccaagaccccgacataaaggcccacgtaaactctctaggtgaaaacttgaaaaccctgcgactccgccttcgccggtgccataggtttctgccttgcgaaaacaagagcaaggcagtggaacaagtcaagaacgcctttaacaaattgcaggagaagggaatttataaggccatgagcgagtttgacatctttatcaactacatcgaagcttacatgaccatgaaaattagaaat

SEQ ID NO: 14583 - DNA, 534 bp, synthetic construct
  misc_feature 1..534: note = source = /note="Description of Artificial Sequence: Synthetic coding sequence"
  source 1..534: mol_type = other DNA
atgcacagcagcgcattgctgtgttgtctggtgctgctgaccggcgtcagggcgagcccaggtcaaggtactcagagcgagaacagctgtacccattttccgggcaacttgccaaatatgttgcgcgatctacgggacgcattttcacgtgttaaaactttttttcaaatgaaagaccaactcgacaacctgttgctcaaagagtctctgcttgaagactttaagggctatctgggttgccaagcgctgagcgagatgatccagttctatcttgaggaggtgatgccgcaagcagaaaaccaggacccggacatcaaagcccatgtgaatagcttaggtgagaacctgaagaccctgcgcttgcgcctgcgtcgctgccatcgattcctcccttgtgagaataagtctaaagcggtagagcaagtgaaaaacgcgtttaacaagctgcaggagaaaggtatttacaaagcgatgagtgaattcgatatcttcatcaactatattgaagcgtacatgaccatgaagatacgcaat

SEQ ID NO: 14584 - DNA, 534 bp, synthetic construct
  misc_feature 1..534: note = source = /note="Description of Artificial Sequence: Synthetic coding sequence"
  source 1..534: mol_type = other DNA
atgcattcatcggcacttctttgttgtttggtgcttcttactggagtccgggccagccctggtcaaggaactcaaagtgagaactcgtgtacccattttccaggcaacctgccaaacatgctccgggatctgcgtgatgcattttcgcgcgtcaagacctttttccagatgaaggaccagcttgacaatcttctcctgaaggaatcgctgttggaggatttcaaaggctacttgggttgtcaggcactcagcgagatgatccaattctacctggaagaagtgatgccccaggcagagaatcaggatccagacattaaagcacacgttaactcgttgggggaaaatctcaagactcttcgccttcgtcttagaagatgccacagattccttccatgcgagaacaaatctaaagccgtggaacaagtgaagaatgcgttcaataagttgcaagaaaagggaatctacaaggcgatgtccgaatttgacatattcatcaactatatcgaagcatacatgactatgaagattcgcaat

SEQ ID NO: 14585 - DNA, 534 bp, synthetic construct
  misc_feature 1..534: note = source = /note="Description of Artificial Sequence: Synthetic coding sequence"
  source 1..534: mol_type = other DNA
atgcattcttccgcccttctgtgctgtcttgtgctgctgaccggagttcgtgctagccctggccaggggacccagagcgagaactcatgcacccacttccctggcaatttgcctaatatgctccgagacctgcgtgatgcttttagtcgcgtgaaaactttttttcaaatgaaggaccagcttgacaacctgcttctcaaggaaagcctgctggaggacttcaagggatacctggggtgtcaggcgcttagcgaaatgattcaattctacctcgaggaagtaatgccgcaggcagagaaccaggatccagatattaaagctcacgtgaacagtctgggggagaatctgaagaccctacgcctgcgcctgcggagatgccaccgttttttgccctgtgagaacaagtccaaagctgtggagcaggtgaagaatgcctttaacaagcttcaggagaagggcatctataaggcaatgtcagaattcgacatcttcatcaattacatcgaggcctacatgaccatgaaaatcaggaac

SEQ ID NO: 14586 - DNA, 534 bp, synthetic construct
  misc_feature 1..534: note = source = /note="Description of Artificial Sequence: Synthetic coding sequence"
  source 1..534: mol_type = other DNA
atgcattccagcgctttgttgtgctgcctcgttctcctgaccggagtccgtgcgagccccgggcaggggacccaaagtgagaattcctgtacccactttcctggcaacctccctaacatgctccgagacttacgcgatgccttctctcgggtaaagactttttttcaaatgaaagaccagctagacaatttacttcttaaggaaagcctgctcgaggacttcaaaggttaccttgggtgtcaggcgctatctgaaatgatccaattttacttggaggaagtcatgccccaggcggagaatcaggacccagatatcaaggctcacgtgaattccttgggggagaatcttaagaccctgcggctgcgcttgagaagatgtcatcggttcctgccttgcgagaacaagagtaaagctgtggagcaagtgaaaaatgccttcaacaaacttcaggagaagggaatctacaaagccatgagtgaattcgatatctttataaactatattgaggcatacatgacaatgaaaatcaggaat

SEQ ID NO: 14587 - DNA, 534 bp, synthetic construct
  misc_feature 1..534: note = source = /note="Description of Artificial Sequence: Synthetic coding sequence"
  source 1..534: mol_type = other DNA
atgcatagcagcgctctgctctgctgcctggtgttgctgaccggcgtgagggcatctccggggcaagggacacagagcgagaattcttgtactcattttcccggcaatctgccaaacatgctccgagacctgcgcgatgcgttctctcgtgtcaagacttttttccaaatgaaagatcagttggacaatctccttttaaaagaatccctgctggaagattttaagggctacctggggtgccaagccctgtctgaaatgattcaattctatctggaagaggtaatgccacaggcggagaatcaggaccccgatatcaaagctcacgtgaactcccttggggaaaatctcaaaactctgcggctaaggttgcgacgttgccatcgcttcctgccctgcgaaaacaaaagtaaagccgtcgaacaggttaaaaacgcgtttaataagctgcaggagaagggtatctataaagccatgagcgaattcgacatttttattaactatatcgaggcgtatatgacgatgaaaatccgcaat

SEQ ID NO: 14588 - DNA, 534 bp, synthetic construct
  misc_feature 1..534: note = source = /note="Description of Artificial Sequence: Synthetic coding sequence"
  source 1..534: mol_type = other DNA
atgcattctagcgctctcctctgttgcctagtgctgcttacgggagtgagagcgtctcctgggcagggcactcagtctgaaaatagctgtacccactttcccgggaaccttcctaatatgttgagggacctgcgggatgcattctctagggtgaagaccttcttccaaatgaaggaccagttagacaacttgctcttgaaagaatcccttcttgaagactttaaaggttaccttggctgccaggccctctccgagatgatacagttctatctggaagaagtgatgccccaggccgaaaatcaggatcccgacatcaaagctcacgttaacagcctgggtgaaaacttgaaaaccctgcgcctcaggctcagacgatgtcacagatttctgccctgtgagaacaagtctaaagccgttgagcaggtcaaaaatgcatttaacaaactccaggagaaaggaatttacaaggcaatgagcgaattcgacatttttatcaattacatcgaggcctatatgaccatgaagatacgcaac

SEQ ID NO: 14589 - DNA, 534 bp, synthetic construct
  misc_feature 1..534: note = source = /note="Description of Artificial Sequence: Synthetic coding sequence"
  source 1..534: mol_type = other DNA
atgcattcaagcgcactcctgtgttgccttgtcctgctgacgggggtgagggcatcccccggtcagggcactcaatcggagaactcttgtacgcatttccccgggaatctcccaaacatgctgcgggacctcagagatgctttctcccgggtcaagaccttttttcaaatgaaggatcaactggataatctgctgttgaaagagtccctgcttgaggactttaagggatatcttggttgtcaggcactttcggagatgatccaattctaccttgaagaagtcatgccccaggcagagaaccaagatcctgacatcaaggcccatgtgaactcgcttggagagaatctcaagactctgcgcttgcgtctgagacgatgtcatcggttcctcccatgtgagaataagtcaaaggcagtggaacaagtgaagaacgcgtttaacaaacttcaggaaaagggaatttacaaggcaatgtcggagttcgacatcttcatcaactatattgaagcatacatgaccatgaagattagaaac

SEQ ID NO: 14590 - DNA, 534 bp, synthetic construct
  misc_feature 1..534: note = source = /note="Description of Artificial Sequence: Synthetic coding sequence"
  source 1..534: mol_type = other DNA
atgcactcgtctgcacttctctgctgtttggtattactgaccggggttcgagcatcccccggacaggggacccagtccgagaactcatgcacacattttcctggtaacctgcccaacatgttacgcgacctgcgcgatgcgttttcaagggtgaagaccttcttccagatgaaggatcagttagacaacctgctcttgaaagaaagtttgctcgaagattttaagggatacctcggctgccaggccttgtcagaaatgattcagttttacctcgaagaggttatgccacaggccgagaaccaagatcccgacataaaagctcacgtaaactcgttaggggaaaacctgaaaacattgcggcttagactaaggagatgccatcggttcctgccatgcgagaacaagagcaaagcggtcgagcaagtcaagaacgcctttaataaacttcaagagaagggtatttataaagctatgagtgagtttgacatattcatcaattacatagaagcgtatatgacaatgaaaatcagaaac

SEQ ID NO: 14591 - DNA, 534 bp, synthetic construct
  misc_feature 1..534: note = source = /note="Description of Artificial Sequence: Synthetic coding sequence"
  source 1..534: mol_type = other DNA
atgcactcaagcgcactcctttgttgcctcgtcctgctgacaggcgtgcgggcttctcccgggcaaggaacacagtctgaaaattcttgtacacactttccaggcaaccttccaaacatgttgagagatctgcgtgacgcttttagcagggtcaaaacttttttccagatgaaagatcagctggataaccttttgctaaaggagtccctactggaagactttaagggctatttaggatgtcaggcactgagtgagatgattcagttttacctggaggaagtgatgcctcaggctgagaatcaagatcccgatataaaggcacatgtaaacagtctcggcgagaacctgaagacactgcgtctgcggctgcggaggtgccatcggttcctaccatgcgaaaataagagtaaggctgtggagcaggtgaagaacgccttcaacaaattgcaggagaagggcatctataaagcgatgtctgaatttgatatctttatcaattatattgaagcttatatgacaatgaaaatacgcaat

SEQ ID NO: 14592 - DNA, 534 bp, synthetic construct
  misc_feature 1..534: note = source = /note="Description of Artificial Sequence: Synthetic coding sequence"
  source 1..534: mol_type = other DNA
atgcattcttctgctttattatgttgtcttgttcttttgacgggagttcgagcatctccaggacaaggaactcaatctgaaaattcatgtacacattttccaggaaatctaccaaacatgttaagggaccttagagatgcatttagtcgagttaaaacattttttcaaatgaaagatcaattagataatttattattgaaagaatcattacttgaagactttaagggatatcttggttgtcaggctttatctgaaatgatacaattttatttagaagaagttatgccacaagctgaaaatcaggatccagatattaaagcacatgttaatagtttaggagagaatttaaaaacacttagattaagattaagaagatgtcatagatttttaccatgtgaaaataaatctaaagctgttgaacaagttaaaaatgcttttaataaattacaagaaaaaggaatttataaagctatgagtgaattcgatatctttatcaattatatagaagcatatatgacaatgaaaattagaaat

SEQ ID NO: 14593 - DNA, 534 bp, synthetic construct
  misc_feature 1..534: note = source = /note="Description of Artificial Sequence: Synthetic coding sequence"
  source 1..534: mol_type = other DNA
atgcattcctcggcactgctttgttgtctcgtgctgctgactggggtccgcgcatcgccaggacagggaacgcagtccgaaaacagctgcacccattttcccggaaatctgccgaatatgcttagagatctgcgagatgctttttcccgcgttaagacttttttccagatgaaggaccaattggacaatcttttgcttaaagagtcgcttctggaggactttaaaggctacctgggatgtcaagccctttcagaaatgattcagttctatctggaagaggtgatgccccaggcagaaaaccaagatcctgatatcaaggcacatgtcaattccctgggtgaaaatctgaaaaccttgaggcttcggcttcggcggtgccacagatttcttccttgcgaaaacaagtcgaaggcggtggaacaggtgaaaaacgcgttcaataagctgcaggagaagggcatctacaaggcaatgtctgaattcgacattttcatcaattacatcgaggcctacatgaccatgaagattagaaac

SEQ ID NO: 14594 - DNA, 534 bp, synthetic construct
  misc_feature 1..534: note = source = /note="Description of Artificial Sequence: Synthetic coding sequence"
  source 1..534: mol_type = other DNA
atgcattcatctgcccttctttgttgcctcgtgctactaacaggtgtgagagcctcgccaggtcaggggacacagtcagagaactcatgtacgcacttccctggtaacctgcctaacatgctgcgtgatctgcgggacgcttttagtagagttaaaacctttttccaaatgaaagatcagctggacaatttgctgctaaaagagagtctgttggaagactttaaaggctatctgggctgccaggcattgtccgagatgattcagttctatctggaggaagtgatgccgcaggccgaaaaccaggatccagatattaaagctcacgtgaatagtctgggtgagaatttaaaaaccctgcggctgagattgaggaggtgtcatcgatttcttccttgcgaaaataaatctaaggctgtggagcaggtcaagaatgcctttaacaagctgcaagaaaaggggatttacaaagctatgagcgagtttgacatttttatcaactacattgaggcctatatgactatgaaaattcgcaat

SEQ ID NO: 14595 - DNA, 534 bp, synthetic construct
  misc_feature 1..534: note = source = /note="Description of Artificial Sequence: Synthetic coding sequence"
  source 1..534: mol_type = other DNA
atgcactcgagcgccctgctttgctgcctcgtgttgctcacaggggtgagagccagccctgggcaggggacccagagtgaaaattcctgtacgcacttccccgggaatctgcccaacatgctgcgggacttaagagatgcctttagtcgcgtcaagaccttcttccaaatgaaagatcagctggacaacctgctgcttaaagaatcactcctcgaagatttcaaagggtatctaggctgccaagccctgtcagagatgattcagttttatctcgaggaagtaatgcctcaggccgagaatcaggacccagatataaaagcgcacgtcaacagcctgggggagaacttgaaaactctgcgcttacgcctaagacgttgtcatcgcttccttccgtgcgagaacaaaagcaaagcagttgagcaggtaaagaacgcattcaacaagttgcaggagaagggcatctataaggcaatgtctgagtttgacatatttatcaactacatcgaggcatatatgaccatgaaaattcgcaac

SEQ ID NO: 14596 - DNA, 534 bp, synthetic construct
  misc_feature 1..534: note = source = /note="Description of Artificial Sequence: Synthetic coding sequence"
  source 1..534: mol_type = other DNA
atgcattcatccgccctgctgtgctgcctggtccttctcacgggagtgcgggcttctcccggccaggggactcagtcagagaattcgtgcacccatttccctggaaacctgccgaacatgctgagggacttgcgcgacgccttttcaagagtgaaaacttttttccaaatgaaagaccaactggacaatctgttgctcaaagaatccctgttggaggacttcaagggatacttgggatgccaggcgctgtcagagatgatccagttttacctcgaagaggtgatgccacaggcggaaaaccaagacccagacatcaaggcacacgtcaatagcctgggggaaaatcttaagaccctgcgcctccgcctgcggcgctgccaccgctttctgccgtgcgaaaacaaatcaaaagctgtggagcaggtgaagaacgcctttaacaagctccaggaaaagggaatctacaaggccatgtcggaattcgacattttcatcaactatattgaggcgtatatgacgatgaaaatccggaac

SEQ ID NO: 14597 - DNA, 534 bp, synthetic construct
  misc_feature 1..534: note = source = /note="Description of Artificial Sequence: Synthetic coding sequence"
  source 1..534: mol_type = other DNA
atgcactcaagtgccctgctgtgctgccttgtgctgctgaccggggtgcgcgctagccctggacaaggcacacaatccgagaacagctgcacacactttcccggtaatctgcccaacatgttaagagaccttagggatgctttttctcgcgtgaagaccttctttcagatgaaagaccagcttgacaatctgctgctgaaagagtctctcttggaagattttaaagggtaccttggttgccaggctctgtctgaaatgatccaattctacctggaggaggtgatgccccaggcggaaaatcaggatcccgacatcaaggcccacgtcaacagtttgggcgagaacctgaagacactgcggcttcgacttcgcagatgtcacagatttctgccgtgtgaaaacaagtcaaaagctgtggaacaggtcaagaacgcatttaacaagctgcaggagaagggtatttataaagctatgagtgagtttgacatctttataaactacatagaggcatacatgactatgaagattcgtaac

SEQ ID NO: 14598 - DNA, 534 bp, synthetic construct
  misc_feature 1..534: note = source = /note="Description of Artificial Sequence: Synthetic coding sequence"
  source 1..534: mol_type = other DNA
atgcactcatctgcactgctgtgctgtctcgtcctgttgacaggcgttagagcgagcccaggacagggaactcagagcgagaattcatgcacacatttcccgggcaacctgccaaacatgctaagagacctgcgggatgccttctctagagttaagactttctttcagatgaaagatcagctggacaaccttttgcttaaggagagtttgctggaggacttcaaaggttatctaggctgtcaagccctctccgaaatgatccagttctatctggaagaggtgatgccacaggcagagaatcaggaccctgatattaaagcgcacgtcaactccttaggagaaaatctgaaaacactccgattgaggctgcgccggtgtcaccggtttctcccatgtgagaacaaatccaaggctgtggaacaagtgaaaaatgcctttaacaagctgcaagagaagggaatctacaaggccatgagcgagtttgacatttttattaattatatcgaggcgtatatgactatgaaaatccgtaat

SEQ ID NO: 14599 - DNA, 534 bp, synthetic construct
  misc_feature 1..534: note = source = /note="Description of Artificial Sequence: Synthetic coding sequence"
  source 1..534: mol_type = other DNA
atgcattcctccgcccttctctgttgcttggtgctcctgactggagtcagggcatcgcctggtcagggcacccaatccgagaattcctgcactcattttcccggcaacctccctaacatgctgcgagatcttcgcgatgcattttcaagagtcaagaccttttttcagatgaaggatcagctcgataaccttctccttaaagaatccctgctggaggactttaagggttacctgggttgtcaggccctctcggaaatgatccagttttatctggaagaagtgatgcctcaagcagaaaaccaggatccagacataaaggcacacgtgaactctctgggcgagaatctgaaaacccttagattgcgccttagaaggtgtcatagattcctgccttgtgagaacaagtccaaagccgtggaacaggtcaagaacgcattcaacaaacttcaagaaaaaggaatctacaaggccatgtcggagtttgacattttcattaactacattgaagcatacatgaccatgaagatccgtaac

SEQ ID NO: 14600 - DNA, 534 bp, synthetic construct
  misc_feature 1..534: note = source = /note="Description of Artificial Sequence: Synthetic coding sequence"
  source 1..534: mol_type = other DNA
atgcactcttccgctctgctgtgctgcctggtcttgctaacgggcgtacgggcctccccgggtcagggcacgcaatctgaaaattcgtgcacccatttccccggcaacctgcccaacatgctccgtgacctgcgtgacgctttttctcgggtgaagaccttcttccagatgaaggaccaattggacaacctcctgcttaaggaaagtctgttggaagatttcaaggggtatctgggatgccaggcactatctgagatgatacagttctacctcgaggaggttatgccgcaggcagagaaccaagaccccgacattaaagcccacgtcaactcgctgggagagaatctaaagacgctgcgcctccgcctgcgcaggtgccaccgattcctgccatgcgagaacaagtccaaggcggttgaacaggtgaaaaacgccttcaataaattgcaggagaaaggcatttacaaggccatgtccgagttcgatattttcatcaattatatcgaggcctatatgaccatgaagatcagaaat

SEQ ID NO: 14601 - DNA, 534 bp, synthetic construct
  misc_feature 1..534: note = source = /note="Description of Artificial Sequence: Synthetic coding sequence"
  source 1..534: mol_type = other DNA
atgcactcttccgccttgctgtgctgccttgtgttactcacaggagtgcgggcatctcccgggcagggcactcagtccgagaacagctgtactcacttccctggcaatctccccaacatgctgagagacctgagggacgctttctcaagggtaaagaccttctttcagatgaaggatcagctggacaacctcctgctgaaggagagcctgctcgaggactttaaaggctacctgggctgccaggctctgtccgagatgattcagttctatttagaagaggttatgcctcaagcggagaatcaggacccagacatcaaagctcacgtcaacagtcttggcgagaatctgaagactctgagactccgcctgcgacggtgtcatcgcttcctgccatgcgaaaataagtcaaaggccgtcgaacaagtaaagaatgcctttaacaagctgcaggagaaaggcatctataaggcaatgtctgaattcgacatatttataaattatattgaggcctacatgacaatgaagatacgcaat

SEQ ID NO: 14602 - DNA, 534 bp, synthetic construct
  misc_feature 1..534: note = source = /note="Description of Artificial Sequence: Synthetic coding sequence"
  source 1..534: mol_type = other DNA
atgcatagctcggcattgctctgttgcctcgtgctgctgaccggggtccgcgcgtcccctggtcaaggaactcaatccgaaaactcctgcactcattttcctggtaacctcccaaacatgctgagggatctgcgcgacgcattttccagggttaagacctttttccagatgaaggatcagctggataatctcctgctgaaggaatcgcttctggaggacttcaagggatacttgggttgccaggcactcagcgaaatgatccagttttacctcgaagaagtcatgccccaagctgagaaccaagaccccgatatcaaggcccatgtcaactcacttggagaaaacctcaagacccttagacttaggttgaggagatgtcacagatttctcccttgtgagaacaagtcaaaggcagtggagcaagtgaaaaatgcttttaacaaactccaagaaaaggggatttacaaagccatgagcgaatttgacattttcatcaattacatcgaagcctacatgactatgaaaatcaggaac

SEQ ID NO: 14603 - DNA, 534 bp, synthetic construct
  misc_feature 1..534: note = source = /note="Description of Artificial Sequence: Synthetic coding sequence"
  source 1..534: mol_type = other DNA
atgcattccagtgccctgctctgctgccttgtcctcctgaccggtgtgcgggcgtcgccgggtcaagggacgcagagcgaaaactcctgtactcactttccgggtaatctgcctaatatgcttcgggacttgagggatgcgttctcccgtgtgaaaaccttctttcaaatgaaagatcaactcgataaccttctcctgaaggaatcattgctggaggatttcaagggatacctgggatgccaggcgctctccgaaatgattcagttctaccttgaagaggttatgccacaggcagaaaatcaagaccccgacatcaaggcccacgtgaattcgctgggagagaatttgaaaaccctgcgcctgcgactgagacgctgccatagattcctgccgtgtgagaacaaatcgaaggccgtggaacaggtgaaaaacgctttcaacaagctgcaggagaaagggatctataaggcgatgtcggaattcgacattttcatcaactacatcgaggcttacatgactatgaaaatccggaac

SEQ ID NO: 14604 - DNA, 534 bp, synthetic construct
  misc_feature 1..534: note = source = /note="Description of Artificial Sequence: Synthetic coding sequence"
  source 1..534: mol_type = other DNA
atgcactcgtcggcgctcctttgctgtctcgttctgctgaccggagtgagagcgtcaccaggacagggcacccaatctgagaactcatgcactcacttcccgggaaatctccccaatatgctgcgcgatctgcgcgacgccttttcgcgcgtcaaaaccttcttccagatgaaggaccaactggataacctgcttttgaaggagtcgctgttggaggacttcaagggctacctgggatgtcaggccctcagcgagatgattcagttttatcttgaagaagtgatgcctcaggccgaaaaccaagaccccgatatcaaggcacatgtgaattcactgggcgaaaatctgaaaaccctcagactgcgactgcggcgctgccatcgctttcttccgtgcgagaacaagtcaaaggccgtggagcaagtcaagaacgccttcaataagctccaggaaaaaggaatttacaaagctatgtccgaattcgacatcttcataaactacatcgaagcatacatgactatgaaaatccggaac

SEQ ID NO: 14605 - DNA, 534 bp, synthetic construct
  misc_feature 1..534: note = source = /note="Description of Artificial Sequence: Synthetic coding sequence"
  source 1..534: mol_type = other DNA
atgcatagttctgccctgctgtgttgtctagtgttgctgacaggagtgcgcgcttctcctggtcaaggcactcaatccgagaattcctgtactcattttcccggcaatctgcctaatatgcttcgggatctacgagacgctttctcgcgggttaagacgttcttccaaatgaaagatcaactagacaatctgctcctcaaggagtcgctgctggaagatttcaaggggtatctgggctgtcaggcacttagtgagatgatccagttctacctggaggaagtaatgccccaagcggaaaatcaggatcccgatatcaaggcacatgtgaacagcctaggagaaaacctcaaaaccctgcggttaagattgcgtcgctgtcacaggtttctaccgtgcgagaataagagtaaggccgtcgagcaagtgaaaaatgcctttaacaagctgcaggaaaaaggaatctataaagccatgtccgagtttgacatcttcatcaactacatcgaggcttatatgaccatgaagattcggaat

SEQ ID NO: 14606 - DNA, 534 bp, synthetic construct
  misc_feature 1..534: note = source = /note="Description of Artificial Sequence: Synthetic coding sequence"
  source 1..534: mol_type = other DNA
atgcacagcagcgctctcctgtgctgtctggttctgctgaccggagtccgcgcatcgccaggtcaaggtactcaaagcgaaaactcttgcacccactttccgggaaacctgcctaacatgctgcgggatctgcgggatgctttctcccgagtaaagacgttcttccaaatgaaagatcagctggacaacctgctcctgaaagagtcgctgctggaggactttaagggatacctgggctgtcaggccctctccgaaatgatccagttctacctcgaagaggtgatgccgcaggccgaaaatcaagacccggacatcaaggcccacgtcaactcactgggagaaaacttgaaaactctgcggctccgcttgaggagatgccaccggtttctcccctgcgaaaacaagtccaaagcggtggagcaggtgaaaaacgccttcaacaagctccaggagaagggaatctacaaagcgatgtcggaattcgacatcttcatcaattacattgaggcctacatgactatgaaaatcaggaat

SEQ ID NO: 14607 - DNA, 534 bp, synthetic construct
  misc_feature 1..534: note = source = /note="Description of Artificial Sequence: Synthetic coding sequence"
  source 1..534: mol_type = other DNA
atgcattcgtctgctttgttgtgttgtctcgtgttgctaaccggggtgagggcatcccctggacagggtacacagtcagagaattcctgcacacatttcccaggaaacctccctaatatgttaagggacctccgagatgctttcagtcgagtgaagaccttttttcaaatgaaagatcagcttgataatctgcttcttaaagaatctctcttggaagatttcaagggatacttgggatgtcaagctctttcagagatgattcagttctatttagaagaggtgatgccacaagcggagaatcaagatccagacattaaggcgcatgtaaactccttgggtgaaaatttaaagactctcaggcttagacttcgaaggtgtcatcgattccttccttgcgagaacaaatccaaagctgttgaacaggtcaagaatgctttcaacaagctccaagagaagggcatttataaggctatgtctgaattcgatatctttatcaactatatcgaagcttatatgacgatgaagattcggaat

SEQ ID NO: 14608 - DNA, 534 bp, synthetic construct
  misc_feature 1..534: note = source = /note="Description of Artificial Sequence: Synthetic coding sequence"
  source 1..534: mol_type = other DNA
atgcattcgtcagctcttctttgttgcctggtgttgttgactggcgtgcgcgcatctccaggacaaggaactcagagcgagaactcatgtacccatttccccggtaatcttccaaatatgctgagagatctgcgtgacgcgttctcaagagtcaagaccttttttcaaatgaaggatcaacttgataacctcttgctgaaggaaagccttttggaagatttcaagggttacctggggtgccaggccttgtcagaaatgatccaattctacctggaggaagtcatgccacaagcggagaaccaggatccggacattaaggctcatgtcaactccctgggagaaaatcttaagactctcagactgcgcctgcggcgttgccacagatttctgccctgtgagaacaagtccaaggccgtggaacaagtgaaaaacgcgttcaataagctgcaggagaaggggatatacaaggcaatgtccgaatttgacattttcattaactacatagaagcatacatgactatgaagatccggaac

SEQ ID NO: 14609 - DNA, 534 bp, synthetic construct
  misc_feature 1..534: note = source = /note="Description of Artificial Sequence: Synthetic coding sequence"
  source 1..534: mol_type = other DNA
atgcattctagcgctctgctctgctgtctcgtgctgttgactggagtccgcgcatccccaggacagggtacccagagcgaaaacagctgcacccacttcccaggaaatcttcccaacatgctgcgtgatctgcgcgatgctttttcccgcgtgaagacttttttccagatgaaggaccaactggataatttgctgcttaaggagtccctcctcgaggactttaagggttatctgggatgtcaagccctgagcgagatgattcagttttacctggaggaggttatgcctcaggctgagaatcaggacccagatatcaaggctcacgtaaattctcttggcgagaatctgaagactctgaggctcaggctcagaagatgtcaccgctttctcccttgcgagaacaaaagtaaggctgtagagcaagtcaaaaatgctttcaacaagttgcaggagaagggaatctacaaagccatgtctgaatttgatatttttattaactacattgaagcttacatgactatgaagataaggaat

SEQ ID NO: 14610 - DNA, 534 bp, synthetic construct
  misc_feature 1..534: note = source = /note="Description of Artificial Sequence: Synthetic coding sequence"
  source 1..534: mol_type = other DNA
atgcattcttcagcgctgctgtgctgccttgtgctgctgaccggtgtgagagcctcccctggacagggaacacaaagtgagaattcatgtactcactttccaggaaatctgccgaacatgctgcgtgacttgcgcgatgcgttttctagagttaaaacctttttccagatgaaagatcaattggacaatctgctcctgaaggaatcacttctggaggactttaaagggtacctgggttgtcaagctttgtccgagatgatccagttttacctcgaggaagtgatgccacaagcagagaaccaggaccccgatattaaggctcacgttaacagtctgggggagaaccttaagaccctgcgtctgcgcctccggaggtgccaccggtttctgccatgcgagaacaaatcaaaggccgttgaacaggttaaaaacgcattcaataaactacaagaaaaggggatttacaaggccatgtccgaattcgacattttcatcaactatattgaggcatacatgactatgaagattcgcaat

SEQ ID NO: 14611 - DNA, 534 bp, synthetic construct
  misc_feature 1..534: note = source = /note="Description of Artificial Sequence: Synthetic coding sequence"
  source 1..534: mol_type = other DNA
atgcattcctccgcgttgctgtgctgcctcgtgttgctcactggcgtgcgcgcgtcgcctggccagggtactcaaagcgaaaattcctgtactcactttccggggaacctcccgaacatgctgcgtgacctccgggacgccttcagccgcgtgaaaaccttcttccagatgaaggatcagttggacaacttgcttttgaaggagtcacttctggaagatttcaagggatacctgggatgccaagccctgtcagaaatgatccagttttacttggaggaagtgatgccacaggcggaaaatcaggatccggacatcaaagcccatgttaactcgctgggggagaatctcaaaactctgagacttcgcctgcggcggtgtcacagattcctgccatgcgagaacaagtcaaaggctgtcgagcaggtgaaaaacgcctttaacaagctgcaagaaaaggggatctacaaggcaatgtcggaattcgatatctttatcaattacatcgaagcatacatgaccatgaagattcggaac

SEQ ID NO: 14612 - DNA, 534 bp, synthetic construct
  misc_feature 1..534: note = source = /note="Description of Artificial Sequence: Synthetic coding sequence"
  source 1..534: mol_type = other DNA
atgcactcatctgccctcctatgttgcttggtgcttcttactggagtacgagcaagccctgggcagggtactcagtccgagaactcatgcacccacttcccaggaaacctccctaacatgctgagagacctccgcgacgcattttcgagagtgaagactttttttcagatgaaggaccagctggacaacctcctactgaaggagtccctactggaagactttaagggctacctaggatgtcaggccctaagcgagatgatccagttctacctggaggaagttatgccacaggcagagaaccaagatccagacatcaaagcacacgtgaacagcctgggggaaaatcttaagaccctacggttgagactgcgcagatgtcaccgattcctcccttgtgaaaataagagcaaggccgtcgagcaggtcaagaacgcattcaataaactgcaggagaaagggatatataaagccatgagtgaattcgacatattcatcaactacatcgaggcttatatgaccatgaaaattagaaat

SEQ ID NO: 14613 - DNA, 534 bp, synthetic construct
  misc_feature 1..534: note = source = /note="Description of Artificial Sequence: Synthetic coding sequence"
  source 1..534: mol_type = other DNA
atgcatagctcggccctgctgtgttgtctcgtcttgctcacgggcgtccgcgctagtcctggacaaggtactcaatctgagaattcgtgcacgcatttccccggtaatttgcctaacatgcttagggacctccgggatgcctttagcagggtgaagactttcttccagatgaaagaccaactcgacaatcttctgctaaaagaatctctgttggaagattttaaaggttacctgggttgccaggctttgtccgaaatgatacagttttacttagaggaagtcatgccccaggccgaaaaccaggaccccgatatcaaggcccacgtgaattcacttggcgagaacctgaagacgcttcgactgcgactgaggcgttgccatcgattccttccttgcgaaaacaagtcaaaggccgtggaacaggtcaagaatgcgtttaacaaactccaagagaaaggtatatataaagctatgtcggaatttgatattttcataaactacattgaagcttacatgacaatgaaaataagaaat

SEQ ID NO: 14614 - DNA, 534 bp, synthetic construct
  misc_feature 1..534: note = source = /note="Description of Artificial Sequence: Synthetic coding sequence"
  source 1..534: mol_type = other DNA
atgcattcgtccgcactcctctgctgcctggtgctcctcactggtgtacgcgcaagccctggccaaggtacccagagcgagaactcctgcactcacttcccgggaaacctcccaaacatgttgcgcgatctgcgggacgctttctccagggtcaagacgttcttccaaatgaaggatcagctcgacaatttgctgctgaaggaatcactgctcgaggactttaagggctacttgggatgccaggctttgtcagagatgatacaattctatcttgaagaagtgatgccccaagcggagaatcaggacccagatatcaaggcccacgtcaacagcctgggagaaaatctgaaaaccctgcggctccgtttgcgcagatgtcatagattcctgccgtgtgaaaacaaatcgaaagcagttgaacaggtgaagaacgccttcaacaagttgcaggagaagggaatttacaaagcgatgtcagaatttgatatctttatcaactacatcgaggcatacatgactatgaaaatccggaat

SEQ ID NO: 14615 - DNA, 534 bp, synthetic construct
  misc_feature 1..534: note = source = /note="Description of Artificial Sequence: Synthetic coding sequence"
  source 1..534: mol_type = other DNA
atgcattcatccgcactgctttgttgtcttgtgctgctcaccggtgtgagagcatcgccagggcagggtacccagtcggaaaactcatgcacccattttcctggaaaccttccaaacatgcttagagatttgcgggacgcattttcgagagttaagactttctttcagatgaaggaccagctggataaccttctgcttaaggaaagcctgctggaggatttcaagggttacctcggatgccaggccctctcggagatgattcagttctacctcgaagaagtcatgccgcaagccgaaaaccaagatcctgatatcaaggctcacgtgaattcgcttggagagaacctgaaaacgctgcggttgcgtttgcgccgctgtcatcggtttcttccatgcgagaataagtccaaggctgtcgaacaggtgaagaatgcattcaacaaactccaggagaaaggaatttacaaagcaatgtcggaatttgatatctttatcaactacattgaggcatacatgactatgaagatacggaac

SEQ ID NO: 14616 - DNA, 534 bp, synthetic construct
  misc_feature 1..534: note = source = /note="Description of Artificial Sequence: Synthetic coding sequence"
  source 1..534: mol_type = other DNA
atgcactcctcggcactcctgtgctgcctggtcctgctcactggtgtccgcgcctcccctggtcaaggaactcagtcggagaattcctgcacccacttcccgggcaatctgccaaatatgctgcgcgacctgcgggatgccttcagcagagtcaagactttcttccagatgaaggaccagctggacaacctgcttctgaaggaatcactcctcgaagatttcaagggatacctcgggtgccaggccctgagcgagatgatccagttctacctggaagaagtcatgccgcaagctgagaaccaggacccagacattaaggctcatgtcaattcgcttggagagaacctcaagacgttgagactgcgtctgagacggtgccatcgcttcctgccgtgcgaaaacaagtcaaaggcggtggaacaggtgaagaacgctttcaacaagctgcaggagaaaggaatctacaaagcgatgagcgagtttgacattttcattaactacatcgaggcatacatgaccatgaagatccgcaac

SEQ ID NO: 14617 - DNA, 534 bp, synthetic construct
  misc_feature 1..534: note = source = /note="Description of Artificial Sequence: Synthetic coding sequence"
  source 1..534: mol_type = other DNA
atgcattcctccgctctgctctgctgtcttgtgcttctgaccggagtgcgtgcctcacctgggcagggcacccaatccgagaactcttgcactcactttccgggaaacctgccaaacatgctgcgcgatctgcgggacgcgttctcgagagttaagactttctttcagatgaaggaccagcttgataatctgctcttgaaagagtcgctgctcgaagatttcaaaggatacctggggtgccaggcactgtcggaaatgatacagttctatttggaagaggtgatgccacaagccgagaaccaagatcctgacatcaaggcccatgtaaactcactgggtgaaaacctcaagacgctgcggctgcgattgcgccggtgtcacagattcctgccctgtgaaaacaaatcgaaggcagtcgaacaggtgaaaaatgctttcaataagctccaagagaaaggaatctacaaggctatgtcagaattcgacatcttcatcaattacattgaggcctacatgaccatgaagattcgcaac

SEQ ID NO: 14618 - DNA, 534 bp, synthetic construct
  misc_feature 1..534: note = source = /note="Description of Artificial Sequence: Synthetic coding sequence"
  source 1..534: mol_type = other DNA
atgcatagctcggcattgctctgctgcctcgtgctcctcaccggagtcagagcatcaccgggacaaggtactcaatcggaaaactcatgtacccattttccaggcaatctgccaaatatgcttagggacctgagagatgccttttcccgcgtcaaaacgtttttccaaatgaaggatcaactggacaatctgctccttaaagagtccctcctcgaagatttcaagggttacctgggatgccaggccctctcggaaatgattcaattctacttggaagaagtgatgcctcaggcggaaaaccaggatccggatatcaaagcacacgtcaacagcctgggggaaaatcttaaaactttgcgcctgcgcctgcgtaggtgccatcggtttctgccgtgtgagaataagtccaaggcggttgaacaggtcaagaatgccttcaacaagctccaagaaaaaggcatctacaaggcaatgtcggagtttgacatcttcattaactacattgaagcgtacatgaccatgaagatccggaac

SEQ ID NO: 14619 - DNA, 534 bp, synthetic construct
  misc_feature 1..534: note = source = /note="Description of Artificial Sequence: Synthetic coding sequence"
  source 1..534: mol_type = other DNA
atgcatagctccgctttgctgtgctgcctggttctgttgactggcgtgcgagccagccctgggcaaggaactcagtctgaaaacagctgtacccattttcctgggaacctgcccaatatgttaagggatctgcgtgacgccttcagccgcgttaagaccttttttcagatgaaggaccagctggacaatctcctgctgaaagagagtctgctggaagactttaaaggctacctgggctgccaggccctgtccgaaatgattcagttctacctggaggaagtgatgccccaagccgagaatcaggatcctgatatcaaggcgcacgtgaattccctaggcgaaaacctcaaaacgttgcggcttcgtttaagacgttgccaccggttcctgccctgtgagaataagtccaaagccgttgaacaggttaaaaacgccttcaacaagctgcaagagaaggggatctacaaagcaatgagtgaattcgatatctttataaattatatcgaagcatacatgaccatgaaaatcagaaat

SEQ ID NO: 14620 - DNA, 534 bp, synthetic construct
  misc_feature 1..534: note = source = /note="Description of Artificial Sequence: Synthetic coding sequence"
  source 1..534: mol_type = other DNA
atgcattcctccgccctgctttgctgtctggtgttgctgacgggagtgagggcaagccctggccaagggacgcagtcggagaactcatgtactcattttcctggaaaccttcctaatatgctcagagatctgcgtgatgcattttcccgggtcaagaccttctttcaaatgaaagatcagctggataaccttctgcttaaggagtctttgctcgaagatttcaagggatatctcggttgtcaagcactcagcgaaatgattcaattctaccttgaagaagttatgccacaagcagaaaaccaggacccagatatcaaagcacatgttaactcgctgggtgaaaatctgaaaaccttgcgccttaggctccggcggtgtcatcggtttctcccttgcgaaaacaaatcaaaggccgtggagcaagtcaagaacgcgttcaataaactgcaggagaagggtatttacaaagccatgtccgagttcgacatcttcatcaattacattgaagcgtacatgaccatgaagatcaggaac

SEQ ID NO: 14621 - DNA, 534 bp, synthetic construct
  misc_feature 1..534: note = source = /note="Description of Artificial Sequence: Synthetic coding sequence"
  source 1..534: mol_type = other DNA
atgcatagctccgctctgctttgttgtcttgtgctgttgacaggggtgagggcttcaccaggccagggtacacaaagtgagaacagttgcacgcatttccctggcaatttgcctaatatgctgagagatctgagagacgcattttctagagtgaagacattctttcagatgaaggatcagctcgacaacttgctgcttaaggagtcccttttagaagacttcaaaggttatctcgggtgccaggcccttagcgagatgattcagttttatttggaggaagtcatgccccaggccgagaatcaggatcctgatatcaaagcacatgtgaatagcctcggcgaaaatttgaaaacactaagactgcgactgagaagatgtcaccgatttcttccatgtgagaacaagtccaaagccgtggaacaagttaagaatgcattcaataagttgcaggaaaaggggatctacaaggccatgtcggaattcgacattttcatcaactatatagaagcctatatgacaatgaagatcagaaac

SEQ ID NO: 14622 - DNA, 534 bp, synthetic construct
  misc_feature 1..534: note = source = /note="Description of Artificial Sequence: Synthetic coding sequence"
  source 1..534: mol_type = other DNA
atgcattcgtctgctctgctgtgctgccttgtccttctgacgggcgtccgagcttccccggggcagggcacccaaagcgagaattcctgcacgcactttccaggtaatcttcccaacatgttaagagatcttcgggatgcttttagcagggtgaaaacctttttccaaatgaaggatcagctggacaatttgctccttaaagaaagccttctcgaggacttcaaaggctatctggggtgtcaggccctgtcagaaatgatacagttctacctggaagaggtgatgccacaggccgagaaccaggaccctgacatcaaagctcatgtgaattccctgggcgagaacctgaagactctccgcttgcggctgaggcggtgccaccggtttctgccttgcgagaataagagtaaagctgtcgagcaagtcaaaaacgcattcaacaagctgcaggagaaaggcatttataaggccatgagtgaattcgacatttttattaactacatcgaagcttacatgacaatgaaaatacgaaac

SEQ ID NO: 14623 - DNA, 534 bp, synthetic construct
  misc_feature 1..534: note = source = /note="Description of Artificial Sequence: Synthetic coding sequence"
  source 1..534: mol_type = other DNA
atgcactcctctgctctcttgtgctgcttagtcctcttaactggggtgcgagctagtccaggacagggaacacaatccgagaactcctgcacacacttcccaggcaatcttcccaacatgctcagggacttgcgggacgccttcagccgggtgaagaccttctttcagatgaaggaccagttagacaatttattactcaaggagtcactccttgaagatttcaaaggctacttaggctgccaggccctgagtgaaatgatccaattttacctggaggaggtaatgccacaggcagaaaaccaagacccggacattaaagcacatgtaaactcccttggcgagaatctgaagacactgcgattacggctgaggaggtgtcacaggttcctgccctgcgagaacaaaagcaaggccgtggagcaggtcaaaaacgcatttaataaacttcaggagaagggaatttataaggcaatgtccgaattcgacatttttattaattacatcgaagcttacatgaccatgaaaatccgcaac

SEQ ID NO: 14624 - DNA, 534 bp, synthetic construct
  misc_feature 1..534: note = source = /note="Description of Artificial Sequence: Synthetic coding sequence"
  source 1..534: mol_type = other DNA
atgcactcttcagctctgctgtgctgccttgtactgctgactggagtacgcgctagccctggccaaggaacacaatccgagaattcttgcacacacttcccaggcaaccttccaaacatgcttcgcgatctgcgcgacgcctttagtcgcgtgaaaaccttcttccaaatgaaggaccagctcgacaacctgcttttgaaggagtccctgctcgaggattttaagggatatctgggatgtcaagccctctcagagatgatccaattttacttggaggaagtaatgccccaagccgaaaaccaagacccggacatcaaagcccacgtcaattcactcggcgaaaatctcaagacattgagactgcgcctgcgcagatgccaccgctttctgccctgcgaaaataagtcaaaagcggtagaacaggtaaagaacgccttcaacaagctgcaggagaaaggcatatacaaggccatgtctgagttcgatatcttcattaactacatcgaagcctacatgactatgaagatccgcaac

SEQ ID NO: 14625 - DNA, 534 bp, synthetic construct
  misc_feature 1..534: note = source = /note="Description of Artificial Sequence: Synthetic coding sequence"
  source 1..534: mol_type = other DNA
atgcattcgtcagcccttctttgttgtctcgttcttctcacgggagtgagagcttcgccaggccaaggtacgcaaagcgaaaattcctgcactcactttcctggtaaccttcctaatatgttgcgtgaccttagggacgccttctcgcgggtgaaaacttttttccagatgaaagaccaactggacaaccttctgttgaaggaatcgctgcttgaggatttcaagggatatcttgggtgtcaggccctgagcgaaatgatccagttttacctcgaagaggtgatgcctcaagcagaaaatcaagatccagacattaaggcacacgtcaactcactcggtgaaaaccttaagaccttgcgccttcggctgcgacgctgtcatagatttcttccttgtgagaataagtccaaggcagtcgagcaggtgaagaacgcgtttaacaaactccaggagaaaggaatctacaaagccatgagcgaatttgatatcttcatcaattacattgaggcatacatgaccatgaaaatcagaaac

SEQ ID NO: 14626 - DNA, 534 bp, synthetic construct
  misc_feature 1..534: note = source = /note="Description of Artificial Sequence: Synthetic coding sequence"
  source 1..534: mol_type = other DNA
atgcactcgagcgcactgctgtgttgcctggtccttctcacgggcgtcagggcctccccgggacagggtacccagtcagagaattcctgcactcatttcccgggtaatctgcctaacatgctgcgggacctcagagatgcgtttagccgcgtcaagaccttcttccaaatgaaggaccaattggataacctgctgttgaaggaatccctcctggaggacttcaaaggttacctgggatgccaggctctctcggagatgatccagttttacctggaggaagtgatgccacaagcagaaaatcaagatccagacatcaaagcccacgtgaatagtctgggagagaacctgaaaacgctgcggctcagattgagacgctgccaccggttcctgccgtgtgaaaacaagtcgaaggcagttgagcaggttaagaacgccttcaacaagctgcaggaaaaaggcatatacaaggcgatgtctgaattcgatatctttatcaactatatcgaggcgtacatgaccatgaagattcggaat

SEQ ID NO: 14627 - DNA, 534 bp, synthetic construct
  misc_feature 1..534: note = source = /note="Description of Artificial Sequence: Synthetic coding sequence"
  source 1..534: mol_type = other DNA
atgcattcctccgccctcctgtgctgcctcgtcttgctcaccggcgtgcgggcatcacctggtcaaggaacgcagtccgaaaacagctgtacccactttcccgggaatctcccgaacatgttgagggacctgagagacgccttctctcgggttaagacgttcttccagatgaaggaccagctggataatctgctgctcaaggagtcgctgctcgaagatttcaaagggtacttggggtgccaggcactgtccgaaatgattcagttctacttggaagaggtgatgcctcaagcggaaaaccaggacccagatatcaaggcgcatgtgaactcgctgggagaaaacctgaaaaccctcagactcaggctgagacggtgccatcggttcctcccgtgcgaaaacaagtcgaaagccgtggaacaggtgaagaatgccttcaacaaacttcaggaaaagggtatctacaaagccatgtcggagttcgatatctttatcaattacatcgaggcctacatgaccatgaaaatccgcaat

SEQ ID NO: 14628 - DNA, 534 bp, synthetic construct
  misc_feature 1..534: note = source = /note="Description of Artificial Sequence: Synthetic coding sequence"
  source 1..534: mol_type = other DNA
atgcactcctccgcactcttgtgctgtctggtgctgcttacgggcgtcagagcatcgcctgggcaaggtactcagtccgagaattcgtgtacgcattttcccggcaatctgcccaacatgcttcgtgacctgcgcgatgcattctcaagggtgaaaaccttttttcaaatgaaggatcaactcgacaatctgctgctgaaggagtccctccttgaggacttcaagggatacttgggctgtcaagcccttagcgaaatgatccagttctacctcgaagaggtgatgcctcaagcagagaatcaggatccagacataaaggctcatgtgaattcgcttggagaaaatctcaaaaccctgaggcttagattgcggaggtgtcatcgatttttgccatgcgaaaacaagagcaaggctgtggagcaagtgaagaatgcatttaacaagctgcaggaaaagggtatctacaaggcaatgtccgaattcgatatcttcatcaattacatcgaagcgtacatgactatgaagattaggaac

SEQ ID NO: 14629 - DNA, 534 bp, synthetic construct
  misc_feature 1..534: note = source = /note="Description of Artificial Sequence: Synthetic coding sequence"
  source 1..534: mol_type = other DNA
atgcattcatccgctctcctgtgttgcttggtgctgctgaccggagtgagggcgtccccgggtcagggaacccaatcagaaaacagttgcacccacttcccgggcaatctgccaaatatgctgcgggatctgagagacgcattctcacgtgtcaagactttcttccaaatgaaagatcagttggataacctgctccttaaagaatcactgctcgaggacttcaagggatacttgggatgccaagcgctgtcagagatgatccagttttacctggaggaggtcatgccgcaggcggagaaccaggaccccgatatcaaggcccacgtgaacagcctgggtgagaatttgaaaactctgcggctccgcctgagaagatgccatcgatttctcccatgcgaaaacaagtcgaaggcagtggagcaggtcaaaaatgcctttaacaagctgcaagaaaagggaatctacaaggccatgagcgagttcgatatcttcatcaattacattgaagcgtacatgactatgaagatccgcaac

SEQ ID NO: 14630 - DNA, 534 bp, synthetic construct
  misc_feature 1..534: note = source = /note="Description of Artificial Sequence: Synthetic coding sequence"
  source 1..534: mol_type = other DNA
atgcacagttcagcccttctgtgctgtctggtactcctgactggcgtccgggccagcccaggccaagggactcagagcgagaattcctgtacccattttcctggtaacctgcctaatatgttgcgggacctccgagacgcattcagtcgggttaagacattcttccagatgaaagatcagctggacaacctactgctgaaggaatccttactagaggactttaaaggctacctcggctgtcaggccctctcagagatgatccagttttatctcgaggaggtgatgccacaggccgaaaatcaggacccagatattaaggcacacgtgaactccctgggggagaatctgaagacactgcgactacgtctgaggagatgtcaccgctttctgccttgtgaaaataagtctaaagcagtggaacaagtgaaaaacgcttttaacaagctgcaggagaagggcatttataaagctatgagcgagtttgacattttcatcaactatattgaagcttacatgactatgaagattcggaat

SEQ ID NO: 14631 - DNA, 534 bp, synthetic construct
  misc_feature 1..534: note = source = /note="Description of Artificial Sequence: Synthetic coding sequence"
  source 1..534: mol_type = other DNA
atgcactcgtcggcactcctgtgttgccttgtgctgctgactggcgtgagagcctctccaggacagggaactcaatcggagaactcgtgtacccacttcccggggaacctcccgaacatgttgcgcgacctccgggacgctttctcccgcgtcaagacgttcttccaaatgaaggatcagctggacaacctcctgctcaaggagagccttcttgaagatttcaagggttacctcggatgccaggccctgtcggagatgatccagttctacctggaggaagtgatgccgcaagccgagaatcaggatccagatatcaaggcccatgtgaactcacttggagagaatctgaaaactctgaggcttcggctgaggagatgccaccgcttcctcccgtgcgagaataagtcaaaggccgtggagcaggtcaaaaatgccttcaataagctccaagaaaagggaatctataaggctatgtccgaattcgacatcttcatcaactacattgaggcttacatgactatgaagatccgaaat

SEQ ID NO: 14632 - DNA, 534 bp, synthetic construct
  misc_feature 1..534: note = source = /note="Description of Artificial Sequence: Synthetic coding sequence"
  source 1..534: mol_type = other DNA
atgcacagctccgccctgctgtgttgcctcgtgctgttgaccggagttagggcctcaccaggccaagggacccaatctgaaaatagctgcactcattttcccggcaatctgcccaacatgctaagggacctaagagatgccttctctcgggtgaaaacctttttccagatgaaggaccaactggacaatttgctgcttaaagaatctctcctcgaagactttaaggggtacctggggtgtcaagccctgtctgaaatgatccagttttatcttgaggaggttatgccacaggctgagaaccaagatcctgatatcaaggcccatgtgaacagcctgggagaaaacctgaaaaccctcaggcttcgattacgacgctgccaccgcttcctgccatgtgaaaacaagagtaaggctgtggagcaagttaagaatgccttcaacaaattacaggagaagggcatctacaaggcgatgtccgagtttgatatttttatcaattacatcgaggcctatatgacaatgaagattcggaac

SEQ ID NO: 14633 - DNA, 534 bp, synthetic construct
  misc_feature 1..534: note = source = /note="Description of Artificial Sequence: Synthetic coding sequence"
  source 1..534: mol_type = other DNA
atgcacagctccgctctgctgtgctgcctcgttctcctgactggagtgagggcgagtcccggccaggggacgcagtcagaaaactcctgcactcacttcccaggtaatctgccaaacatgctgagagatcttagagacgctttctccagggtcaaaacctttttccagatgaaggatcaactcgataatctgcttctgaaagaatctctccttgaggacttcaaaggataccttggctgccaggcactgtctgagatgatacaattttatctggaggaagtgatgcctcaggctgagaatcaggatcccgacatcaaggcgcacgtgaactccttgggcgaaaatctgaaaacactgagactcaggcttcgaagatgccacagattcttgccctgtgagaataaaagtaaagctgtggagcaagtgaagaacgcctttaataagcttcaagaaaaggggatttacaaggctatgagcgaattcgatatcttcattaattacatcgaggcctatatgactatgaagatccggaat

SEQ ID NO: 14634 - DNA, 534 bp, synthetic construct
  misc_feature 1..534: note = source = /note="Description of Artificial Sequence: Synthetic coding sequence"
  source 1..534: mol_type = other DNA
atgcactcgtcggcgctgctgtgctgcctggtgctccttactggagtgcgcgcatcccccggccaaggaactcagagtgagaactcctgcactcacttcccgggcaacctcccgaacatgctgcgggatctgcgggacgccttctcacgcgtaaagaccttcttccaaatgaaggaccagctggacaatctgctcctcaaggaatcactcctggaagatttcaaggggtacctgggctgccaggcgctttcggagatgatccagttctacctcgaggaggtcatgccgcaggcggaaaaccaggatcctgacataaaagctcacgtcaatagcctcggagaaaacctcaagacgctccgactgcggctgcgaagatgtcaccgcttcctgccgtgtgagaacaaatcgaaggcagtggaacaagtcaagaatgccttcaacaagctccaagagaaaggcatttacaaagccatgagcgaatttgatatctttatcaactatatcgaggcttacatgaccatgaagatccgcaat

SEQ ID NO: 14635 - DNA, 486 bp, synthetic construct
  misc_feature 1..486: note = source = /note="Description of Artificial Sequence: Synthetic coding sequence"
  source 1..486: mol_type = other DNA
atgcgatcctcacctggcaacatggagaggatcgtgatctgccttatggtgatttttctggggacactggtccacaaaagcagctctcagggtcaagaccgccatatgattcgaatgaggcagcttattgacatagttgatcaacttaagaattatgtcaatgacctcgtccccgaattcctgcctgctcctgaggacgtggagacaaattgcgagtggagtgctttttcttgctttcaaaaggcacagctgaagtccgccaataccggcaacaacgaacggatcataaacgtctcaatcaaaaaactgaagcgaaaaccgccgtcaaccaatgcgggtcggcgacagaagcatcggctcacatgccctagctgcgactcctacgagaagaagccgccaaaggagttcctggaacggttcaagtcccttctgcagaaaatgatccatcaacacctgagttccaggactcacggctccgaagatagt

SEQ ID NO: 14636 - DNA, 486 bp, synthetic construct
  misc_feature 1..486: note = source = /note="Description of Artificial Sequence: Synthetic coding sequence"
  source 1..486: mol_type = other DNA
atgcgaagctcgccaggcaacatggaacgaattgtgatttgtctgatggtgatctttctggggactttggtccataaatcgtcctcgcagggtcaagataggcatatgatccgcatgcggcaacttatcgacatcgtggatcaactgaagaactacgtgaacgatcttgtgcctgaattcctgccggccccagaggacgtcgaaaccaactgtgaatggtcagccttttcgtgctttcagaaggcacaactgaagtcggcgaatactggtaacaacgagagaatcatcaacgtgtcaataaagaaacttaagaggaagcccccatccaccaacgcaggacgtagacaaaaacatcgactcacttgtccctcgtgcgattcgtacgagaagaaacctcccaaagaatttctggagcggttcaagtcgctgctgcaaaagatgatacatcagcacttgtcctccaggacccatggttccgaagattcc

SEQ ID NO: 14637 - DNA, 486 bp, synthetic construct
  misc_feature 1..486: note = source = /note="Description of Artificial Sequence: Synthetic coding sequence"
  source 1..486: mol_type = other DNA
atgaggagttcacccggtaacatggaacgcattgtgatttgtctgatggtcatattcttgggcacactggttcacaaatccagctcccaaggccaggatcggcatatgataaggatgagacagttaatcgacattgttgaccagttgaaaaattacgtaaacgatctggtgcccgagtttctgcctgcacctgaagacgtagagaccaactgcgaatggtctgcgttctcatgtttccagaaggcccagctaaaatcagctaacacaggcaacaatgaacgaatcatcaacgtcagcatcaagaagctgaaaagaaagcctccctctacaaatgctgggcgaagacagaaacatcgtctcacttgtccctcctgcgattcgtacgaaaaaaagccaccaaaagagttcctagaacgatttaaatcgctcctgcagaagatgatccaccagcatctaagctcccgcacccacggttccgaggattct

SEQ ID NO: 14638 - DNA, 486 bp, synthetic construct
  misc_feature 1..486: note = source = /note="Description of Artificial Sequence: Synthetic coding sequence"
  source 1..486: mol_type = other DNA
atgcggagcagcccgggtaacatggagagaatcgtgatctgcctgatggtgatctttctggggactctggtgcacaagtcctcgtcgcagggacaagatcggcacatgatccggatgcggcaattgatcgatatcgtggatcaattgaagaattacgtcaacgatttggtgccagaattcctgccagcccccgaggacgttgaaaccaactgcgaatggtccgcattctcctgttttcaaaaggcccaacttaagtcagcaaacaccggcaacaacgaacgaatcatcaatgtgtcgatcaaaaaactgaagcgcaagcctccatctactaacgcgggacggaggcagaagcaccgccttacttgcccgtcctgcgactcatacgagaagaagccgcctaaagagttcctcgagcgatttaagagcctcctccagaagatgattcatcagcacctgtcgtcgcgcactcatgggtccgaagattcg

SEQ ID NO: 14639 - DNA, 486 bp, synthetic construct
  misc_feature 1..486: note = source = /note="Description of Artificial Sequence: Synthetic coding sequence"
  source 1..486: mol_type = other DNA
atgcgttcaagtccgggcaatatggaacgcatcgtaatatgcctgatggtgatcttcctggggactctggttcacaaaagctcctcgcaggggcaagaccggcacatgatccggatgcggcagctgatagatatcgtggaccaactgaagaattatgtaaacgacctggtgcccgaattcctaccagctcccgaggacgttgaaactaactgcgagtggagcgcttttagttgctttcagaaggctcagcttaagtctgctaacacggggaataacgaacgtattattaacgtgtccataaagaaactcaaaagaaagcccccatcaactaacgccggaaggcggcaaaaacacaggctcacatgccccagttgcgattcttacgaaaagaaaccaccaaaggagtttctggagcggtttaagtccctgcttcagaaaatgatccaccagcacctgtcgtcccgcactcacggcagcgaggactca

SEQ ID NO: 14640 - DNA, 486 bp, synthetic construct
  misc_feature 1..486: note = source = /note="Description of Artificial Sequence: Synthetic coding sequence"
  source 1..486: mol_type = other DNA
atgcgctcgtcaccgggaaatatggaacggatcgtgatctgtctcatggttatcttcttgggtaccctggtccacaagtccagcagccagggacaagaccggcatatgattcggatgaggcaacttatcgatatcgttgatcagctgaagaactacgtcaacgacctcgtgccggaattcctgccagcgccggaagatgtggaaacgaattgcgaatggagcgcattctcatgcttccaaaaggcccaacttaaaagcgccaacaccggcaacaacgaacgcatcattaacgtgtcaatcaaaaagctcaagcgcaagccaccttcgaccaatgcagggcgtcgccagaaacaccgactgacctgcccgtcctgcgactcgtacgaaaagaagccccccaaggagttcctggagcggttcaagtccctgctccaaaagatgattcatcagcacctctcaagcaggactcatggctcggaggattcc

SEQ ID NO: 14641 - DNA, 486 bp, synthetic construct
  misc_feature 1..486: note = source = /note="Description of Artificial Sequence: Synthetic coding sequence"
  source 1..486: mol_type = other DNA
atgaggagtagtcccggtaacatggagaggattgtaatttgtttgatggtcatttttctggggacactggtccacaaaagtagttctcagggacaggacaggcacatgatccggatgcgccagctaatagatattgtagaccagttgaagaactacgtgaatgacttagtgcctgaatttttgcccgctcccgaagacgttgagacaaactgcgaatggagcgccttctcctgttttcaaaaggctcagctgaagagtgccaacactggcaacaatgaaaggattataaatgtgagtattaagaagctgaaacggaagccaccctccactaatgctggacgccggcagaaacacaggcttacatgtccttcctgcgactcctacgagaagaaacctcccaaagaatttctggagcgatttaagtcgctgctccagaagatgatccaccagcacctgagtagcaggactcatggctccgaggacagt

SEQ ID NO: 14642 - DNA, 486 bp, synthetic construct
  misc_feature 1..486: note = source = /note="Description of Artificial Sequence: Synthetic coding sequence"
  source 1..486: mol_type = other DNA
atgcgatcttctccgggaaatatggaaaggatcgtaatttgtcttatggttatttttctaggtacgctagtgcataagtcatctagccagggtcaggaccgtcatatgatcagaatgcgtcagctgatcgatatcgtagaccaactgaagaactacgtgaatgatcttgtgcctgagtttctcccagcgccagaagatgtcgagacgaactgtgaatggtcagcattctcctgcttccagaaagcgcaactcaagtccgccaacaccgggaacaacgagcgtataattaacgtgagtatcaagaagttgaagcgcaagccaccgtcaactaacgcaggccggagacaaaagcaccgccttacatgcccttcatgtgactcgtacgagaagaagccacctaaagaattcctcgaacggttcaagtccctactgcagaaaatgattcaccagcatcttagctctcggacccatggatctgaggattca

SEQ ID NO: 14643 - DNA, 486 bp, synthetic construct
  misc_feature 1..486: note = source = /note="Description of Artificial Sequence: Synthetic coding sequence"
  source 1..486: mol_type = other DNA
atgcggtcgagccctgggaatatggaaagaattgtgatctgtctcatggtgatcttcttgggcactcttgtgcataaatcttcgtcccaaggacaagataggcacatgattagaatgaggcagctgattgatatagtggatcaactgaagaactacgtcaatgatctggtgccggagtttcttcctgcacccgaggacgtggaaaccaattgtgaatggagcgcattttcgtgcttccaaaaggctcaactcaagtcggctaacaccggaaataacgaaagaatcattaacgtgtcgattaagaagctcaagagaaagcctccatccaccaacgcaggtagacggcagaagcaccgtctcacctgtccttcgtgcgatagctacgagaaaaagccacctaaggaatttctcgaaagatttaagtcacttctccagaagatgattcaccaacatctttcgtcgagaactcatgggtccgaagatagc

SEQ ID NO: 14644 - DNA, 486 bp, synthetic construct
  misc_feature 1..486: note = source = /note="Description of Artificial Sequence: Synthetic coding sequence"
  source 1..486: mol_type = other DNA
atgagatcgtcgccagggaatatggaaaggatcgtgatatgtcttatggtcatctttctcggcactctggtgcacaagtcatcatcacaaggtcaggatagacacatgattagaatgcgacaacttattgacatcgttgatcaacttaagaattacgtgaacgatctggtgcctgaattcctgccggccccagaagatgtggagactaactgtgaatggagcgcgttctcttgctttcaaaaggcacagctgaagagcgcaaataccggcaacaatgagcggatcataaacgtgtcgatcaagaagctgaaaagaaagcccccgtcgactaacgcagggagaaggcagaaacaccgactgacctgtccttcgtgcgattcatacgagaagaagccacctaaggaattcttggagcgtttcaaaagccttctccagaagatgattcatcaacatctgtcatccagaacccacggttcggaggactcc

SEQ ID NO: 14645 - DNA, 486 bp, synthetic construct
  misc_feature 1..486: note = source = /note="Description of Artificial Sequence: Synthetic coding sequence"
  source 1..486: mol_type = other DNA
atgcgctcgtcaccgggcaacatggaacggatcgtgatctgcctgatggtcattttcctcggcacgttggtgcataagtcgtcttcccagggtcaggaccggcacatgatccgcatgcgccaactgatcgatatcgttgaccagctcaaaaactacgtgaacgaccttgtgccggaattccttccggcacctgaggacgtcgagactaattgcgagtggtctgccttctcgtgcttccagaaggctcaactcaagtcagcgaacactggaaataacgagcggatcatcaacgtgagcataaagaagctgaagcgcaagccaccctcgactaatgcagggcgtaggcagaagcaccggttgacttgtccatcctgtgattcgtacgagaaaaagcctccaaaggaattcttggaacgctttaagtcgctcttgcagaaaatgatccaccagcacctgtcgtcgaggacccatggctcggaagatagc

SEQ ID NO: 14646 - DNA, 486 bp, synthetic construct
  misc_feature 1..486: note = source = /note="Description of Artificial Sequence: Synthetic coding sequence"
  source 1..486: mol_type = other DNA
atgcgctccagcccaggaaacatggagcgcattgtaatttgcctgatggtaatcttcctgggcactctcgtacacaagagttcctctcagggccaagacagacatatgatccgaatgcgccagctgattgatatagtcgaccagctcaaaaattacgtaaatgatctggtgccggaatttctgccagcgccggaggacgtggaaacgaactgcgagtggtccgcgttcagttgttttcaaaaagctcagctgaaatccgcaaacaccggaaacaacgaacgtataataaacgtctctatcaagaagctgaagagaaagcccccatccaccaatgctgggcgacgccagaagcacaggctgacctgcccctcgtgtgattcttatgagaagaaaccacccaaagaatttttggaacgcttcaagtccttgctgcaaaaaatgattcatcaacacctgagcagtagaacacacggatctgaggactca

SEQ ID NO: 14647 - DNA, 486 bp, synthetic construct
  misc_feature 1..486: note = source = /note="Description of Artificial Sequence: Synthetic coding sequence"
  source 1..486: mol_type = other DNA
atgcgctctagtcccgggaacatggaacggatcgtgatctgcctgatggtgatctttcttgggacacttgtacacaaaagttcttctcaaggacaggatagacatatgatacgaatgcgccagttgatagatatcgttgatcaactcaagaactatgtcaacgatctagttcctgagttcctgcccgcccccgaagatgtggaaacaaactgtgagtggtcagcattctcgtgctttcaaaaagcgcagttaaaatccgccaacacagggaacaatgaaaggatcataaacgtctctataaaaaagcttaaaagaaagcccccttcgactaacgccggacggcggcaaaaacacagactcacatgcccttcttgtgactcttatgaaaagaaaccacctaaagagttcctagaaagatttaaaagtcttctgcagaaaatgatccaccagcacctttcatcgaggacacatgggtcagaagattcc

SEQ ID NO: 14648 - DNA, 486 bp, synthetic construct
  misc_feature 1..486: note = source = /note="Description of Artificial Sequence: Synthetic coding sequence"
  source 1..486: mol_type = other DNA
atgcggtcaagcccggggaacatggagcgcatcgttatctgcctgatggtgattttcttgggtaccctcgtgcacaagtcctcgtcacagggacaggataggcacatgattcgcatgcgccagctgatcgatatcgtggaccaacttaagaattatgtgaatgacctcgtccctgagtttctgccagcgccagaagatgtggaaaccaactgcgaatggtcagccttcagctgcttccagaaggcgcagctgaaatcggccaataccggaaataacgaacggatcattaacgtctccatcaagaagctgaagcggaagcctccaagcactaacgccggacgcagacagaagcaccgtcttacttgcccaagctgtgattcgtacgagaagaagccgccgaaggagttcctcgaaaggtttaagtccctgctgcagaaaatgatccaccagcatctgagctcaagaacccacggatcagaggactca

SEQ ID NO: 14649 - DNA, 486 bp, synthetic construct
  misc_feature 1..486: note = source = /note="Description of Artificial Sequence: Synthetic coding sequence"
  source 1..486: mol_type = other DNA
atgcggagcagtcccggaaatatggagagaattgtaatctgcctgatggtgatatttttaggcaccctcgtgcataaatcctccagccaggggcaagataggcatatgattagaatgagacagctaatcgatatcgtggaccagcttaaaaactatgtgaacgatctcgtcccggaattcttaccagcccctgaggacgttgaaaccaattgcgaatggtccgcattttcatgcttccagaaggcccagctgaagtctgctaatactgggaacaacgaacggatcatcaatgtatctattaagaagttaaagcggaaaccgccttccaccaatgcaggacggagacaaaagcatcgtctgacctgcccctcttgcgacagctacgaaaaaaagccacctaaggagtttctggaacgattcaaatccctattgcagaaaatgatccatcagcacctgagttcccgcacgcacgggtcggaagatagt

SEQ ID NO: 14650 - DNA, 486 bp, synthetic construct
  misc_feature 1..486: note = source = /note="Description of Artificial Sequence: Synthetic coding sequence"
  source 1..486: mol_type = other DNA
atgagatcctcacctggcaacatggagaggatcgtcatttgcttgatggtgatcttcctgggtaccctggtccacaagagctcctcccaggggcaagaccgtcatatgatccgaatgcggcagcttatagatatcgtggaccaacttaagaactatgtgaacgacctggtgccagaatttcttcccgctccagaggacgtcgaaaccaactgtgaatggtccgcgtttagttgctttcagaaggcacaactgaaatccgcaaacaccggcaataatgagaggattatcaacgtgtcgattaagaagctcaaacggaaacctccttccactaatgcaggtcggagacaaaagcatcgcctgacctgtccctcgtgtgactcgtacgagaagaagcctcctaaagagttccttgaacgctttaagtcactgctccagaagatgatccaccagcatttgtctagtcgaactcatggatcggaagatagc

SEQ ID NO: 14651 - DNA, 486 bp, synthetic construct
  misc_feature 1..486: note = source = /note="Description of Artificial Sequence: Synthetic coding sequence"
  source 1..486: mol_type = other DNA
atgcggtcgtcgcctggtaatatggaaagaattgtgatttgtctgatggtgattttccttggcactcttgtgcataagtcatcatcgcaaggtcaagatcggcacatgatcaggatgcgacaacttatcgatatcgtggatcaactcaagaactacgtcaatgatcttgtcccagagtttttgcctgctccagaagatgtcgagactaactgtgagtggtcagcatttagctgttttcagaaggcacagctgaagtctgcaaacacgggaaataacgaacgtattatcaacgtgagcatcaagaaattgaaaagaaagccaccctcgaccaacgccgggcggcgccagaagcatagactgacttgtccatcgtgcgattcatatgagaaaaagccccctaaggaatttcttgagagatttaagtcccttctccaaaagatgattcatcaacacctctcatcgcggacccatggatcggaggactca

SEQ ID NO: 14652 - DNA, 486 bp, synthetic construct
  misc_feature 1..486: note = source = /note="Description of Artificial Sequence: Synthetic coding sequence"
  source 1..486: mol_type = other DNA
atgcgctcctctccaggcaatatggaaaggatcgtaatatgtttgatggtaatcttcctaggaacattagtgcacaaatcatcgtcccagggtcaggatcgtcatatgattcgaatgcgacagctgatcgatattgtagatcagttgaagaattatgtgaacgatctggtccccgaattcttacccgcgcctgaagacgtcgaaaccaactgtgaatggtctgcattctcttgcttccagaaggcgcagctaaaatcagcaaataccggcaataatgaaaggattatcaatgtgagcattaagaagctgaaaagaaaaccccccagtacaaacgccggacggagacaaaaacacaggctcacctgtccctcctgcgacagctacgaaaaaaagccaccaaaggaattcctggaacgttttaaaagcctcctgcagaagatgatccaccagcatctctcctccaggacgcacggatcagaggacagt

SEQ ID NO: 14653 - DNA, 486 bp, synthetic construct
  misc_feature 1..486: note = source = /note="Description of Artificial Sequence: Synthetic coding sequence"
  source 1..486: mol_type = other DNA
atgaggtcatctccgggcaatatggagcggatcgtcatttgcttgatggtcattttcctgggaacattggttcataaatcttccagtcaggggcaggaccgtcacatgatcaggatgaggcagctgattgatatcgttgatcaactgaagaattacgtgaatgacctcgtacctgagttcttgccggccccggaggatgtggagaccaactgcgagtggtctgcgttttcatgcttccagaaggctcaactgaagtccgccaacaccgggaacaacgagcggatcatcaatgtctcgatcaaaaagctgaagcggaaacctccatcaactaacgctgggaggaggcaaaaacaccgactaacatgcccttcgtgcgacagctatgagaagaaacccccaaaagaatttttggaaagatttaagtctttacttcaaaaaatgattcaccaacatctatccagtaggactcacggtagtgaagacagc

SEQ ID NO: 14654 - DNA, 486 bp, synthetic construct
  misc_feature 1..486: note = source = /note="Description of Artificial Sequence: Synthetic coding sequence"
  source 1..486: mol_type = other DNA
atgcgctcgagtcctggtaatatggagcgcatcgtgatttgcctgatggtcattttcttaggaactttagttcataaaagcagcagccaggggcaggatcggcacatgatccgcatgaggcagctcatagatattgtcgaccaattgaaaaattacgtgaatgacctagtgcccgagttcctccctgctcccgaagatgtagagacaaattgcgagtggtcagctttctcttgtttccagaaggcacagctcaagagtgcaaatacagggaacaatgagaggatcataaatgtatccatcaaaaagctaaagcgtaaacctccatcaactaatgctggcagaagacagaagcacagacttacttgtccaagttgtgactcgtatgaaaagaagccgcccaaggagttcctagagcgctttaagtccttactgcaaaagatgatccaccagcacctatcatcaaggacacatggatcagaggattct

SEQ ID NO: 14655 - DNA, 486 bp, synthetic construct
  misc_feature 1..486: note = source = /note="Description of Artificial Sequence: Synthetic coding sequence"
  source 1..486: mol_type = other DNA
atgcgcagcagcccgggcaatatggagagaatcgttatctgcctgatggttatcttcctgggcacactggttcataaatctagcagtcagggccaggatagacacatgataagaatgcgccagctgatcgacattgttgaccagctgaagaattatgttaacgatctggtgcctgaatttctgccagcgccagaagacgtggaaacaaactgtgagtggagcgccttttcatgctttcagaaagcccagcttaagagtgcaaatacaggtaataatgagcgaatcatcaacgtgagcatcaaaaaactgaaacgaaagcccccatccacaaacgccggcaggcgccagaaacacagattgacatgcccttcctgtgactcctacgagaagaaacctcccaaggagtttcttgagcgattcaaatctctgctccagaaaatgatacatcagcacctgagttctagaacccatgggagcgaagatagc

SEQ ID NO: 14656 - DNA, 486 bp, synthetic construct
  misc_feature 1..486: note = source = /note="Description of Artificial Sequence: Synthetic coding sequence"
  source 1..486: mol_type = other DNA
atgaggagctccccagggaacatggaaagaattgtcatttgcctgatggtcatcttccttggaacgctggtgcacaaatccagtagtcaaggccaagatcgccatatgatcaggatgcgtcagttaattgatatcgttgaccagctcaaaaattatgttaatgatctggtcccagagttccttcctgcccccgaagatgtagagacgaactgcgaatggagcgctttcagctgcttccagaaggctcagctgaaatccgccaacaccgggaacaacgaaaggattattaacgtgagcatcaaaaagttgaagaggaaacctccatcaaccaatgctggtagacgccagaagcaccgactcacatgcccctcgtgcgatagctacgaaaaaaaaccccccaaagagtttctagaacgttttaagtctctgctccagaagatgatacaccagcatttgagctcgagaacacatggtagcgaggattcc

SEQ ID NO: 14657 - DNA, 486 bp, synthetic construct
  misc_feature 1..486: note = source = /note="Description of Artificial Sequence: Synthetic coding sequence"
  source 1..486: mol_type = other DNA
atgcgctcgagccccggtaacatggaacgtatagtcatatgcctgatggtaatctttctaggcacgctggtccacaagagcagttcgcaaggacaggatcgccacatgatccggatgcgccagttgatcgatattgtcgatcagctcaagaattatgtgaatgatttggtaccggaattcctgccggccccggaagatgtggagaccaactgcgagtggtcggccttctcatgcttccaaaaagcccaactcaagtctgcgaacactggcaataacgagcgcatcattaacgtgagcatcaagaagctcaagcgcaagccgccgtccacaaatgcaggccgccgccagaagcataggttaacatgcccatcctgcgacagttacgagaagaagccgccgaaagagttcttggagcggtttaagagcttgctccagaagatgatccaccagcatttgagcagcagaactcatggatcggaggattcc

SEQ ID NO: 14658 - DNA, 486 bp, synthetic construct
  misc_feature 1..486: note = source = /note="Description of Artificial Sequence: Synthetic coding sequence"
  source 1..486: mol_type = other DNA
atgaggtcatcaccaggcaatatggaaagaatagtaatatgtctcatggttatattcctcggcactttggtgcataagtcttcttcccagggccaggaccgacatatgatcagaatgagacagttgatagacatagtggaccagctcaagaactatgtcaacgacctggtgccggagttcctgcctgctccagaggacgtggagaccaattgtgaatggagtgccttttcctgttttcagaaggcccagctgaaaagtgccaacaccggcaacaatgagaggatcattaacgtgtctataaagaaattaaagcgtaagcctccaagcacgaatgctgggagaagacagaaacaccgattaacatgcccttcttgtgattcatatgagaagaagccccctaaggagttcctggaaagatttaagtcactgctgcaaaaaatgatccatcagcatctctcgtctcggacacatggttccgaagattcc

SEQ ID NO: 14659 - DNA, 486 bp, synthetic construct
  misc_feature 1..486: note = source = /note="Description of Artificial Sequence: Synthetic coding sequence"
  source 1..486: mol_type = other DNA
atgagatcaagtcccggcaacatggagcgcatcgtcatttgcctcatggtcatatttctcgggaccctggttcacaaatcgtcatctcagggccaggaccgccacatgatacgaatgcgccagctcatcgatattgtggatcagctgaaaaactatgtgaatgaccttgtccctgagttcttgcctgctccagaggatgtggagacaaattgtgaatggagcgcgttttcctgtttccagaaggcccagctgaaatccgcaaataccggaaacaatgagaggataataaacgtgtccatcaaaaagctgaaacgcaagcccccaagtacaaacgcaggaagaaggcaaaaacacagactcacgtgtccaagctgcgatagctacgagaaaaaaccaccaaaggagttcctggagagattcaaatctctgctgcagaaaatgattcaccagcatctgtccagtagaacccacgggtcagaggattcc

SEQ ID NO: 14660 - DNA, 486 bp, synthetic construct
  misc_feature 1..486: note = source = /note="Description of Artificial Sequence: Synthetic coding sequence"
  source 1..486: mol_type = other DNA
atgcgatcgtccccgggtaatatggagaggattgtgatatgtctgatggtgatatttcttggtaccctggtgcataaatcctcaagccagggacaagatcggcatatgatccggatgagacaactgatagatatcgtcgaccaactcaagaattacgtgaacgacctcgtgcctgagtttttgccagcgcccgaggacgtggaaaccaactgcgaatggtccgcattctcgtgtttccagaaggcacagcttaagtccgcgaacacgggcaacaacgagcggatcatcaatgtctccataaagaagctgaaaagaaagcccccatcaactaatgctggaaggagacaaaagcatcgtctgacttgtccatcctgcgattcctacgagaagaagcctcctaaagagtttctcgaacgattcaagtccctgctccagaagatgatccatcaacacttgagcagtcgaacccacggaagcgaagatagc

SEQ ID NO: 14661 - DNA, 486 bp, synthetic construct
  misc_feature 1..486: note = source = /note="Description of Artificial Sequence: Synthetic coding sequence"
  source 1..486: mol_type = other DNA
atgaggtcctcacctgggaacatggaaaggatcgtgatatgtcttatggtcatctttctaggcactctggtccacaagtcttcttctcagggacaagatagacacatgattagaatgcggcagcttatagacatcgtggatcaactcaagaactacgttaatgatctggtgccagagtttcttcccgccccagaggatgttgaaacgaattgcgagtggagcgcatttagctgttttcagaaggcccagttaaagagcgcgaatacaggtaacaatgagcggataatcaacgtgtctatcaagaaactaaaaaggaagccgccctctacaaatgctggacgaaggcagaagcatagactgacctgtcctagctgcgattcctatgagaagaagcctccgaaggaattcctggagagattcaagtcactgctccagaaaatgatccatcagcacctctccagtcggacccacggttctgaagattct

SEQ ID NO: 14662 - DNA, 486 bp, synthetic construct
  misc_feature 1..486: note = source = /note="Description of Artificial Sequence: Synthetic coding sequence"
  source 1..486: mol_type = other DNA
atgcggagctcccctggtaatatggagaggatcgtgatatgccttatggtgatatttctgggaaccttggtgcataagtcctcatcccaagggcaggatcggcatatgatacgaatgaggcaactgattgatatcgtggaccaactcaagaattatgttaatgatctggtcccagaatttcttccagctccagaagatgtggaaaccaattgtgaatggtccgcattttcctgttttcagaaagcacaacttaaatcagcaaacaccggcaataacgagcgaatcatcaacgtgtcaattaagaagctgaaacggaagccaccctcaaccaacgccggaagaaggcagaagcaccggctcacctgtccctcatgtgatagctacgagaagaagccaccaaaggaattcctggaaagattcaagtcgctgctgcagaagatgattcatcagcacctctcgtcgcggactcatggatcggaagattcg

SEQ ID NO: 14663 - DNA, 486 bp, synthetic construct
  misc_feature 1..486: note = source = /note="Description of Artificial Sequence: Synthetic coding sequence"
  source 1..486: mol_type = other DNA
atgcgctcatccccgggtaacatggaacggatagtcatctgccttatggtcatctttctcggaaccctggtgcacaaaagcagctcccaaggccaggaccgccatatgattcggatgagacaactcatagacattgtcgaccagctcaagaattacgtgaacgacctggtcccggaattcctgccggcaccggaagatgtggagactaactgcgagtggtcggcgttcagctgttttcagaaggcccaacttaaaagcgccaataccggaaacaacgagcggatcatcaatgtgtcgatcaagaagctcaagcgcaagcccccaagtaccaacgcgggccgtcggcagaagcacaggctgacttgcccatcttgcgattcctacgagaagaaaccgcccaaagagttccttgaaaggttcaagagcctgttgcagaaaatgatccatcagcacctgagcagccgaactcatgggagcgaagattcc

SEQ ID NO: 14664 - DNA, 486 bp, synthetic construct
  misc_feature 1..486: note = source = /note="Description of Artificial Sequence: Synthetic coding sequence"
  source 1..486: mol_type = other DNA
atgcgctcaagccctggaaacatggaacggattgtgatatgcttgatggtcatctttctgggaactctggtccataaatcctcgagccagggacaagacaggcacatgattcggatgcggcaactcattgatattgtggaccaactgaaaaactacgtgaacgatctggtgcctgaatttctgccagcccctgaagatgtcgagactaattgcgaatggtccgccttcagctgttttcagaaagcccaactgaaatcggcaaatacggggaacaacgaacgtatcattaacgtgtcgataaagaagctgaagcgtaaacccccttccactaatgcagggagaaggcaaaagcaccgcctcacttgcccttcctgcgattcctacgagaaaaaaccacctaaggaatttcttgaacgattcaaatcactgcttcaaaagatgattcatcagcacctttcatcccggacccatggtagcgaagattcg

SEQ ID NO: 14665 - DNA, 486 bp, synthetic construct
  misc_feature 1..486: note = source = /note="Description of Artificial Sequence: Synthetic coding sequence"
  source 1..486: mol_type = other DNA
atgcggtcctctcccggaaacatggaacgaatagtgatatgccttatggtgatttttctcggcaccctcgtgcataagagcagcagccagggtcaagatcggcatatgatcagaatgagacagctgatagacatagtggaccagctgaaaaactacgtcaacgaccttgtgccagaattccttcctgcacccgaggacgtggaaactaattgcgagtggagcgccttcagctgtttccaaaaggcacaattgaagtcagcaaatactggaaataacgaacggattatcaacgtctctattaagaagctgaaaagaaagccaccgagcaccaacgctggacgtcgtcaaaagcatcggcttacttgcccttcctgtgactcgtacgagaagaagcctcctaaagaatttcttgaaaggttcaagtcccttctgcaaaagatgattcatcagcacttgtcgtcgagaactcatggtagcgaagattca

SEQ ID NO: 14666 - DNA, 486 bp, synthetic construct
  misc_feature 1..486: note = source = /note="Description of Artificial Sequence: Synthetic coding sequence"
  source 1..486: mol_type = other DNA
atgagaagcagtcctggtaatatggaaagaattgtgatttgtcttatggttatctttctgggcacactggttcacaagtctagttctcaggggcaggatcggcacatgatccgaatgaggcagttgattgacattgttgatcagctaaagaactatgtgaatgacctggtgcccgagtttctgccagccccggaggatgtggagaccaactgtgaatggtctgcttttagttgctttcaaaaggctcagctgaagtctgctaacaccggcaataacgagcgtatcatcaatgtctcaatcaagaaacttaagcgtaagcccccaagtacaaatgccgggcgccgccagaaacaccggctgacatgtccctcttgcgactcttacgagaagaaacctccaaaagagttcttggagcgcttcaagtccttgctgcaaaagatgatccaccaacatctctccagccgaactcacggctccgaagattcc

SEQ ID NO: 14667 - DNA, 486 bp, synthetic construct
  misc_feature 1..486: note = source = /note="Description of Artificial Sequence: Synthetic coding sequence"
  source 1..486: mol_type = other DNA
atgcgctcatcgccgggcaacatggagcgcattgtgatctgccttatggtgattttcctagggacactggtccacaaaagctctagtcagggccaggatcgccatatgatcaggatgaggcagctgatcgatattgttgaccagctcaagaactacgtgaacgatttggtgcccgagttcctccctgcccctgaggatgtggagacaaactgtgaatggagcgctttttcatgcttccagaaagcacagctcaaatccgcgaacaccggcaataatgagagaattatcaacgtcagcatcaagaagctgaaacgcaagcctcctagcacaaacgccggacgaagacaaaaacaccgcctaacatgcccgtcgtgtgattcgtacgaaaagaagcctccaaaagagtttctggagcgcttcaagtcacttcttcagaagatgattcatcaacatctttcaagtcggacccacggcagcgaggacagt

SEQ ID NO: 14668 - DNA, 486 bp, synthetic construct
  misc_feature 1..486: note = source = /note="Description of Artificial Sequence: Synthetic coding sequence"
  source 1..486: mol_type = other DNA
atgcgctcttccccaggaaacatggaaaggatcgtgatttgcttgatggtaatcttcctcggaaccctggtgcataagtcctccagccagggccaagataggcatatgattcgcatgaggcaattgattgacattgtggaccagctgaaaaactacgttaatgaccttgttcccgaattccttcctgcgccggaagatgtggagacaaactgtgaatggtccgcgttttcatgcttccagaaagcccagttgaagagtgctaacacaggtaacaacgaaagaataattaacgtgtctatcaagaaattgaagcgcaagcctccaagtacaaatgcgggaagaaggcaaaaacacagattgacctgtccgtcctgcgactcatacgagaagaaaccccctaaggagttcctggagagatttaaatccttgctccagaagatgatccaccagcacttgtcctccaggacacatggctctgaagacagt

SEQ ID NO: 14669 - DNA, 486 bp, synthetic construct
  misc_feature 1..486: note = source = /note="Description of Artificial Sequence: Synthetic coding sequence"
  source 1..486: mol_type = other DNA
atgagatcatctcctggtaatatggaacgcattgtcatctgcctcatggtgattttcctcggtacactggtacataagtcaagctcccaagggcaggatagacatatgataaggatgcgccagctcatcgacatcgtcgaccagctaaagaattacgtgaacgatctcgttccagagttcctccccgctccagaggatgttgagaccaattgtgagtggagcgccttcagctgtttccagaaggcccaactcaagtctgccaacacaggcaacaacgagaggataattaatgttagcatcaagaagttgaagcgcaagccaccgtcgactaatgccggtaggaggcaaaaacaccgattgacctgtccctcttgcgatagctatgaaaaaaagcctcctaaagagtttctcgagcggttcaagagtctacttcaaaaaatgatccaccagcacctgtctagcaggactcacgggagcgaagattca

SEQ ID NO: 14670 - DNA, 486 bp, synthetic construct
  misc_feature 1..486: note = source = /note="Description of Artificial Sequence: Synthetic coding sequence"
  source 1..486: mol_type = other DNA
atgcgcagctcacccggaaatatggaaagaatcgtgatctgtctgatggtcattttcctgggtactctcgtgcacaagagctcgtcccaaggacaagatcgccatatgatcagaatgcgccagctgatcgacatcgtggatcagctgaaaaactacgtcaatgaccttgtgcccgagtttctgccagctcctgaagatgtagaaaccaactgcgagtggtcggctttttcctgctttcagaaagcccagctcaaatcagcaaataccggaaacaacgagcgcatcatcaatgtctcgatcaagaaactgaagcggaagccaccgtccaccaatgccggcagacgccaaaagcacaggctcacttgcccaagctgtgattcgtacgagaagaagcctccaaaggagttcctggaacgcttcaaatccctgctgcagaaaatgatccaccagcatctctcgtcgcggactcatggctcggaagatagc

SEQ ID NO: 14671 - DNA, 486 bp, synthetic construct
  misc_feature 1..486: note = source = /note="Description of Artificial Sequence: Synthetic coding sequence"
  source 1..486: mol_type = other DNA
atgcgctctagtcccgggaatatggagcggatcgtgatatgcctgatggtaattttcctagggacactggtacacaagtccagctcacaaggtcaggaccgtcacatgattaggatgagacagctgatcgacattgtcgatcagttaaagaactacgtgaacgatttagtccccgaattcttaccagctcctgaagacgtggaaaccaattgcgagtggagtgccttttcctgctttcaaaaggctcagctgaagtctgccaacaccggtaacaacgagagaattatcaatgtgtctattaaaaaactgaagagaaaaccccccagcacaaacgccgggcgcaggcagaagcacaggcttacctgcccatcttgtgattcatatgagaaaaagcccccgaaggaatttctggagagattcaaaagcttactccagaagatgatacaccagcaccttagctcgcgaacccatgggtctgaggactct

SEQ ID NO: 14672 - DNA, 486 bp, synthetic construct
  misc_feature 1..486: note = source = /note="Description of Artificial Sequence: Synthetic coding sequence"
  source 1..486: mol_type = other DNA
atgagaagctctcctggaaacatggagagaatagtgatctgcctaatggtgatctttcttggaacccttgtccacaaatcttcatcacagggccaggaccgccatatgattaggatgcgacaactaattgacattgtggaccagctgaaaaattacgtgaacgatctggtgccggagtttcttccagcccctgaagacgtcgaaaccaattgtgaatggtctgcattcagttgcttccagaaggcacagcttaagagcgcaaacacagggaacaatgagagaataataaatgtgtccattaagaaactcaagcggaagcctcccagtacaaatgctgggaggaggcaaaaacataggttgacgtgccccagttgcgatagttatgagaagaaaccgcctaaggaattcctcgagagattcaaatcattactacaaaagatgattcatcagcatctgagttccagaacacacggatccgaggattca

SEQ ID NO: 14673 - DNA, 486 bp, synthetic construct
  misc_feature 1..486: note = source = /note="Description of Artificial Sequence: Synthetic coding sequence"
  source 1..486: mol_type = other DNA
atgcgctctagtcccggaaacatggagcggatcgtgatctgtctgatggttatttttcttggtacattagtacataaaagtagcagccagggccaggatcgccacatgatccgtatgaggcaactcatagacattgtcgatcagctcaaaaattacgttaacgatttagtgcctgaattcctacctgctcccgaggatgttgagactaactgcgagtggtcagcattttcttgctttcagaaagcccagctgaaatctgccaacacaggcaacaatgagcggataattaacgtgtcaatcaagaaactgaaaaggaagccaccaagcacaaatgctggccgccggcagaagcatcgtctaacctgccccagctgtgactcctatgagaagaagccacctaaggagttcttagagagatttaagtccctgctgcagaaaatgatccatcagcacctgtcttcccggacccacggaagcgaggattca

SEQ ID NO: 14674 - DNA, 486 bp, synthetic construct
  misc_feature 1..486: note = source = /note="Description of Artificial Sequence: Synthetic coding sequence"
  source 1..486: mol_type = other DNA
atgaggtcttcccctggaaacatggaacgcattgtcatttgcctcatggtgatcttcttggggacacttgtccacaaatcctctagtcaaggacaggaccgccacatgattcggatgaggcaactcatcgacatcgtagatcagctcaagaactacgttaacgatctggttcctgagtttctgccagcccctgaagacgtggagaccaactgtgagtggagcgcttttagctgtttccagaaggctcagcttaagagtgcaaataccgggaacaacgaaaggatcatcaatgtctctatcaagaaactcaaacggaagccgcccagcacaaacgcaggaaggaggcaaaaacatagacttacctgtccctcctgcgacagctacgagaaaaagccccccaaagaattcctggaaaggtttaaaagcctgctgcagaaaatgatccatcagcacctttccagcaggacccacgggtctgaagattcg

SEQ ID NO: 14675 - DNA, 486 bp, synthetic construct
  misc_feature 1..486: note = source = /note="Description of Artificial Sequence: Synthetic coding sequence"
  source 1..486: mol_type = other DNA
atgagaagcagtccaggaaacatggagagaattgtaatctgtctgatggtcattttcttgggcacacttgtgcacaaatcgtcatctcaggggcaggataggcatatgattcggatgcgacagctaattgatatagttgatcagttgaaaaactatgtgaatgatttggttcccgaattcttgccagcaccggaagacgtcgaaacgaattgcgagtggtccgcattctcatgcttccaaaaagctcaactgaagtccgccaatacaggaaacaatgaacgaatcattaacgtaagcatcaaaaagttaaaaaggaaacctccaagcacaaacgcaggtcggcgccaaaagcacagactgacatgtccttcatgcgactcttatgagaagaaacccccgaaagaatttctagaacgctttaaatccctacttcagaaaatgattcaccagcacctcagctctcgcacacatggatcagaggactct

SEQ ID NO: 14676 - DNA, 486 bp, synthetic construct
  misc_feature 1..486: note = source = /note="Description of Artificial Sequence: Synthetic coding sequence"
  source 1..486: mol_type = other DNA
atgcgaagctcgcctggcaacatggagagaatcgtgatctgcctgatggtgatcttcctgggaactttggtccacaagtcctcgtcgcaaggccaggaccggcacatgattcgcatgcgccagctcattgacattgtggatcagttgaagaactacgttaacgatctggtgcctgaatttctgccagcaccggaggatgtggagactaactgcgagtggtcggcgttctcatgtttccagaaggctcaactgaaatctgcgaataccggcaacaacgaaagaatcattaatgtgtcaatcaaaaagctcaaaagaaaacctccttcaactaacgcaggcaggaggcaaaagcatcggctcacctgcccgtcgtgcgattcgtatgagaagaaacccccaaaagaattcctggaaagattcaagagcctcctccaaaagatgatccaccagcatttgagctcccgcacccacggaagcgaggatagc

SEQ ID NO: 14677 - DNA, 486 bp, synthetic construct
  misc_feature 1..486: note = source = /note="Description of Artificial Sequence: Synthetic coding sequence"
  source 1..486: mol_type = other DNA
atgcgttcttcaccagggaacatggagcgaatcgttatttgccttatggtaatcttcctcggcacattggttcacaaatcatcaagccagggccaagacagacacatgattaggatgagacagctgattgatatcgtggaccagctcaagaattacgtcaatgacctcgtgccagagtttctgccagcgccagaggatgtggagactaattgtgaatggtcggccttttcatgctttcagaaagcacagttgaaatccgctaataccgggaataacgaaagaattattaacgtttccataaagaaactgaaacgaaaaccaccttcgacaaatgccgggagaagacagaagcaccggctaacctgcccatcctgcgacagctacgagaagaaaccccccaaggaatttcttgagagatttaaatcactgttacagaagatgatacatcagcacctctcctctcgcactcacggatccgaggattct

SEQ ID NO: 14678 - DNA, 486 bp, synthetic construct
  misc_feature 1..486: note = source = /note="Description of Artificial Sequence: Synthetic coding sequence"
  source 1..486: mol_type = other DNA
atgcgtagctctcctggcaacatggagcgcatcgtcatttgtttaatggttattttcctgggaacactcgtccacaagagctctagccagggtcaagaccgtcacatgattcgcatgaggcaactgattgacatcgtcgaccagctcaagaattatgtcaacgaccttgtcccggagttcctccctgctcctgaggacgtggaaactaactgtgagtggagcgctttctcatgtttccagaaggctcaattgaaatccgctaacacgggtaacaacgagaggatcatcaacgtttcaatcaagaagctgaagcggaagcctccgtcgaccaacgccggtcgtcgccagaagcaccgtctcacttgcccctcatgcgacagttatgaaaaaaagccccccaaagagttcctcgagcgtttcaagtcgcttctgcagaagatgatccaccagcacctgagctcacgaacccacggttcagaagactcg

SEQ ID NO: 14679 - DNA, 486 bp, synthetic construct
  misc_feature 1..486: note = source = /note="Description of Artificial Sequence: Synthetic coding sequence"
  source 1..486: mol_type = other DNA
atgcgctcttctccaggtaacatggagagaatcgtcatttgtcttatggtcatcttcttgggtaccttggtccacaaatctagttcccagggtcaagacaggcacatgatccgcatgcgccaactgatcgacatcgtagaccagttgaaaaattacgtgaatgacctggttccagagttcctgcccgccccagaggacgtcgagacaaactgtgaatggtccgccttttcttgcttccagaaggctcagcttaaatctgcaaataccggtaacaacgaacgtataataaatgtctctataaagaagttgaagcgtaagcccccctctacaaacgccggaagaagacagaagcacagacttacttgtcctagctgcgattcttacgagaaaaagcctcccaaggaatttcttgagcgtttcaaaagtctgcttcagaagatgatccatcagcacctgtcatcccgcacccacggatccgaggacagc

SEQ ID NO: 14680 - DNA, 486 bp, synthetic construct
  misc_feature 1..486: note = source = /note="Description of Artificial Sequence: Synthetic coding sequence"
  source 1..486: mol_type = other DNA
atgcgctcctctcctggaaacatggagagaatagtgatttgcctcatggtcatctttttggggactctcgtccacaaatctagttcccaggggcaggatcggcatatgatccgaatgagacagttaattgacatcgtggatcagctgaagaactatgttaatgacttggtccccgaatttttaccggcgcccgaagacgttgagacgaactgcgaatggagcgcattctcgtgttttcagaaggctcagctgaagtccgcaaatacaggaaacaatgagcggattattaacgtgagcatcaagaaactgaagaggaaaccaccttctacaaacgcggggagacggcagaagcaccgactgacatgccctagttgcgattcttatgagaagaagccccctaaggaattccttgagaggtttaagagtctcttacagaaaatgatccaccaacacctgtcctccagaacccacgggtcagaggactcg

SEQ ID NO: 14681 - DNA, 486 bp, synthetic construct
  misc_feature 1..486: note = source = /note="Description of Artificial Sequence: Synthetic coding sequence"
  source 1..486: mol_type = other DNA
atgcgttcatctccgggcaacatggagcgcattgtgatctgcctgatggtcatattcttaggtaccctggttcacaagtcgtcctcacagggacaggaccgtcatatgattcgtatgaggcaactaattgacatagtcgatcaacttaagaattatgtaaacgatttggttcctgagttcctgccagctccagaggacgtggagactaattgcgagtggtctgctttttcctgtttccagaaagctcaacttaaatccgccaacaccggtaataacgaaagaatcatcaacgtttcaatcaagaaactgaagagaaaaccaccaagcaccaatgctggcagaaggcagaaacacaggctcacttgcccttcttgtgactcctacgagaagaagcccccgaaggagttcctggaaaggttcaaatctctcttacagaaaatgatccatcaacatctgtcttcaaggacccatggcagcgaggactct

SEQ ID NO: 14682 - DNA, 486 bp, synthetic construct
  misc_feature 1..486: note = source = /note="Description of Artificial Sequence: Synthetic coding sequence"
  source 1..486: mol_type = other DNA
atgaggagctcgccgggaaacatggagcggatcgtgatttgcctcatggtgatttttctgggaactctggtgcacaagtcatcatcccaaggacaggacagacatatgatccggatgaggcaactgatcgatatcgtcgatcagctgaagaactacgtgaacgacctcgtgcctgaattcctcccggccccagaggatgtcgagactaattgcgaatggtcggcgttctcctgcttccagaaggctcagctgaagagcgccaacacgggcaacaacgagaggattatcaacgtgtctattaagaaactgaagcggaaaccgccctcaactaacgctggtcggcgccaaaagcaccgcctcacttgcccgtcgtgtgattcgtacgaaaagaagccgccgaaggaatttctcgaaagattcaagtccttgctccaaaagatgatccaccaacatctctcctcgcgcacgcacggttcggaagattcg

SEQ ID NO: 14683 - DNA, 486 bp, synthetic construct
  misc_feature 1..486: note = source = /note="Description of Artificial Sequence: Synthetic coding sequence"
  source 1..486: mol_type = other DNA
atgcgctcttcccccggtaatatggagcggatcgtgatttgcttgatggttatcttcctgggaactctggtccacaagagctcctcccagggccaagaccgccacatgataaggatgaggcagttgatcgacatcgtggaccagcttaaaaactatgtgaacgatcttgtgccagaatttttgcccgctccagaggacgtcgagacgaattgcgagtggagcgcatttagctgcttccagaaggcgcaactgaagtccgctaataccgggaataatgaacggatcatcaatgtttcaataaagaaactgaagaggaaacctcctagcactaacgctggacggcgacagaagcaccgcttgacttgcccttcatgcgattcctacgagaagaagcctccaaaagagttcctggaacggttcaagagtctcctccagaagatgatccaccagcacctatctagcagaacacatggcagcgaagattcc

SEQ ID NO: 14684 - DNA, 486 bp, synthetic construct
  misc_feature 1..486: note = source = /note="Description of Artificial Sequence: Synthetic coding sequence"
  source 1..486: mol_type = other DNA
atgagatcctctccagggaacatggagcggatcgttatctgtctcatggtgatcttcctgggcactttggtgcacaagtcaagctcacagggacaggaccgtcacatgatacggatgaggcagctaatcgatatcgtggaccaactgaaaaactacgtaaacgatctcgtcccagaatttctgccagcaccagaggatgtggagacgaactgcgaatggtctgccttctcatgctttcaaaaagcgcagctgaagtctgccaacacaggcaataacgaacgcatcatcaacgttagtattaagaagcttaagcgtaagccgccgtcaacaaatgcgggccgaagacagaaacaccggctgacgtgtccatcttgcgacagttacgagaaaaagccacctaaggagtttttggagcggtttaaatccctacttcaaaaaatgatacatcagcacctttcgagccgtacacacgggtctgaagactcg

SEQ ID NO: 14685 - DNA, 486 bp, synthetic construct
  misc_feature 1..486: note = source = /note="Description of Artificial Sequence: Synthetic coding sequence"
  source 1..486: mol_type = other DNA
atgagatcgagccctgggaacatggagaggattgtgatctgtcttatggtcattttcttgggaactctggtacataagtcctcatcacagggtcaagatcgccatatgattcggatgagacagcttatagacattgtggatcaactgaagaattacgtgaacgatctcgtgcccgaattcctgccagcaccggaagatgtcgaaaccaattgcgaatggtcagccttttcgtgtttccagaaggcacaattgaagtcagccaacactgggaataacgagcgaattatcaatgtttccattaagaagctgaaacggaagccgcctagcactaacgctggacgccgacagaagcatagactgacttgtccatcgtgtgactcctacgagaaaaaacctccaaaggaatttcttgagaggtttaagtcccttctccaaaagatgatacatcagcatctttcgagcagaactcatggctcggaagattca

SEQ ID NO: 14686 - DNA, 486 bp, synthetic construct
  misc_feature 1..486: note = source = /note="Description of Artificial Sequence: Synthetic coding sequence"
  source 1..486: mol_type = other DNA
atgcgtagttctcctgggaacatggaaagaattgttatttgcttaatggtgattttcctgggaacgctagtacataagtcctcttctcaggggcaagatcgtcacatgataagaatgcgacagcttattgatattgtcgatcaattgaaaaattatgttaatgatctggttccagagtttttaccagccccagaggacgtggaaaccaattgtgagtggagtgctttttcatgcttccaaaaagcccaactgaaatctgctaacaccggtaacaatgagcgaattattaatgtatctattaaaaaactcaaacgtaaaccaccttcgacgaatgccggtcgacgccaaaagcaccggcttacttgcccatcgtgtgattcttatgaaaaaaagcctccaaaagagtttctcgagcgttttaagtccctcttacaaaaaatgatacatcagcatctctcgtcgcgaacgcacggtagtgaagacagt

SEQ ID NO: 14687 - DNA, 486 bp, synthetic construct
  misc_feature 1..486: note = source = /note="Description of Artificial Sequence: Synthetic coding sequence"
  source 1..486: mol_type = other DNA
atgagatcatcaccaggtaatatggaacgaattgttatttgtttgatggttattttcttaggtacacttgtacataaatcttcttcacaaggacaagatagacatatgattagaatgcgacaattaattgatatagtcgatcaacttaaaaattatgtaaatgatttagtacctgaatttttaccagcacctgaggacgttgagactaattgtgaatggtcagcattttcttgttttcaaaaagctcaattaaagtcagctaatactggaaataatgagagaattattaatgtttcaataaagaagcttaaaagaaaacctccatcaacaaatgctggacgaagacaaaaacatagacttacttgtccatcatgtgattcttatgaaaaaaaaccaccaaaagaattcttggaaagattcaaatcacttttacaaaaaatgattcatcaacatctttcaagtagaacacatggatcagaagattca

SEQ ID NO: 14688 - DNA, 486 bp, synthetic construct
  misc_feature 1..486: note = source = /note="Description of Artificial Sequence: Synthetic coding sequence"
  source 1..486: mol_type = other DNA
atgcgctcttccccgggcaatatggagcgcattgtgatctgccttatggtgatcttcctgggaaccctggttcataaatcaagctcgcaggggcaggacagacacatgattcgcatgcgccagctgatcgatattgtggaccaactgaagaattacgtcaacgacctggtccccgaattccttccggcaccggaggacgtcgagactaactgcgagtggtccgcttttagctgcttccagaaagctcaactcaagtccgcaaacacgggaaacaacgaacgcatcatcaacgtgtccatcaagaaactgaaacgaaagcctccgtccactaatgccgggcgccgccaaaagcatcgcttgacttgtccctcgtgtgattcttacgagaagaaaccacctaaggaatttctggaacggttcaagtcattgctgcaaaagatgatccaccagcacctctcttcgcgcacccatggttcggaagattcg

SEQ ID NO: 14689 - DNA, 486 bp, synthetic construct
  misc_feature 1..486: note = source = /note="Description of Artificial Sequence: Synthetic coding sequence"
  source 1..486: mol_type = other DNA
atgaggtcatctcctggcaacatggagcggattgttatctgcttgatggtgatttttttgggtacacttgtgcacaaaagcagcagtcagggccaggatcgacacatgatccgtatgcggcaactcatcgacattgtggaccagctcaagaactacgtgaacgacttggttcctgagtttctcccggcaccagaggatgtggagacaaactgtgaatggagtgctttttcctgtttccagaaggcacagctgaagtcagctaacacgggcaataacgaacgaatcataaacgtgagtattaagaaactcaagcggaaaccaccttctacgaacgcaggcaggagacaaaaacacaggctgacctgcccatcatgcgacagctatgagaagaagccgcctaaggaatttctcgagcgtttcaagagccttttgcagaaaatgatacaccaacatctgtcaagtaggacacatggaagtgaggactcc

SEQ ID NO: 14690 - DNA, 486 bp, synthetic construct
  misc_feature 1..486: note = source = /note="Description of Artificial Sequence: Synthetic coding sequence"
  source 1..486: mol_type = other DNA
atgcgctcttctcctggcaatatggagcggatcgttatttgcttgatggttatctttctgggcaccctggttcacaagagcagctcgcaggggcaggacagacacatgatcaggatgcgtcagctcatagacattgtggatcagctgaagaattacgtcaacgatctcgtgccagaattcctgcctgcacccgaggatgtagaaacgaactgtgaatggtctgctttcagctgcttccagaaagctcagctgaagtctgccaatacaggcaacaatgaacgtatcattaacgtctccattaagaaactcaaaagaaagcccccctcgacgaacgcgggcagaaggcagaaacaccgcctgacgtgtcctagctgcgacagttatgaaaagaaaccacctaaagaattcctcgagagattcaagtccctcctgcaaaaaatgatccaccagcacttgtcatcacggacccatggtagcgaggactcc

SEQ ID NO: 14691 - DNA, 486 bp, synthetic construct
  misc_feature 1..486: note = source = /note="Description of Artificial Sequence: Synthetic coding sequence"
  source 1..486: mol_type = other DNA
atgcgctcctcgccgggcaacatggaacgaattgtgatatgtctgatggtcatcttcctgggaaccctggtccacaagtcgtccagccaaggacaggacagacacatgatccggatgaggcagctcatcgacatcgtggaccagctgaagaactacgtgaatgacctggtgcccgagttcctccccgctccggaggatgtggaaacgaactgcgaatggtcggctttctcgtgctttcagaaggcgcaacttaagagcgccaacactggcaacaatgaaagaatcatcaatgtatcgattaagaaactgaagcgcaagccgccttccaccaatgccgggcggaggcagaagcatcgtctgacttgccctagctgtgattcatacgagaaaaagccgccaaaggaatttctggaacgattcaaatcgctgttgcaaaagatgatccaccaacatctctcctcgagaactcacggatcagaggattcc

SEQ ID NO: 14692 - DNA, 486 bp, synthetic construct
  misc_feature 1..486: note = source = /note="Description of Artificial Sequence: Synthetic coding sequence"
  source 1..486: mol_type = other DNA
atgaggtctagcccagggaacatggaaagaattgtgatctgtttgatggtgatattcctgggaaccctggtacataaatcctcttcccagggccaggaccgccatatgatccggatgcggcagttgatcgacatagtggaccagctgaaaaactatgtcaacgacctggttccagaatttctgcctgctccagaagacgttgaaacaaactgcgagtggtccgccttcagctgcttccagaaggcccaactgaagagtgcgaacacaggaaataatgagcgcatcatcaacgtcagtatcaagaagttaaaacggaaacctccgtccaccaatgcggggaggaggcaaaaacaccgtctgacttgccccagctgcgactcctatgagaagaagccccccaaagagtttctcgaaaggtttaagagcctcctgcaaaaaatgatccatcaacatctgagtagtagaacacatggctcagaggacagt

SEQ ID NO: 14693 - DNA, 486 bp, synthetic construct
  misc_feature 1..486: note = source = /note="Description of Artificial Sequence: Synthetic coding sequence"
  source 1..486: mol_type = other DNA
atgaggtcctcaccaggcaatatggagcggattgttatttgcctaatggtaattttcttggggaccctggttcataagtcatcaagccaggggcaggaccgccacatgatacgaatgcgacaactaattgacatcgtggaccagctgaaaaactacgtgaatgacctagttccggagttcctgcccgcccccgaggacgttgagacgaattgtgagtggtccgctttctcctgttttcaaaaagctcaacttaagtctgcaaacacggggaacaacgaaaggattatcaacgtctcgatcaagaagctcaaacggaagccgccgagcacgaacgcaggacgacgacagaaacaccggctgacttgtccctcatgcgattcgtacgaaaaaaaacctcccaaggagtttctcgaacgtttcaagtccctgctgcaaaagatgattcaccagcatctctcctcccgaacacacggatccgaagactcc

SEQ ID NO: 14694 - DNA, 486 bp, synthetic construct
  misc_feature 1..486: note = source = /note="Description of Artificial Sequence: Synthetic coding sequence"
  source 1..486: mol_type = other DNA
atgcgatcgtcccccggaaatatggagcgcatcgtcatttgccttatggtgatatttcttggcacgcttgtccataagtcgtccagccagggtcaagacagacatatgattcggatgaggcaattgatcgatattgtggatcagctgaagaactacgtcaatgatctcgtgcctgaattcctcccggcacctgaggatgttgaaaccaactgcgaatggtcggcattctcgtgttttcaaaaggcacagcttaagtcggcaaataccggaaacaatgagcggataatcaatgtctccataaagaagctcaaaagaaagccacctagcaccaacgcaggcagacgacagaagcaccgcctgacttgtccctcctgcgattcctacgaaaagaaaccaccgaaggagttcctcgagcgcttcaagagcctgctgcagaaaatgattcatcagcatttgagctcacgtacgcacggctcggaggactcc

SEQ ID NO: 14695 - DNA, 486 bp, synthetic construct
  misc_feature 1..486: note = source = /note="Description of Artificial Sequence: Synthetic coding sequence"
  source 1..486: mol_type = other DNA
atgcggtcttccccaggcaacatggaacgcattgtcatttgcctgatggtgatttttctgggtactctggttcacaaaagcagcagccagggccaggaccggcacatgatcagaatgcgccaactgatagatattgtggatcagctgaaaaactacgtgaacgatctggttcctgagtttctacctgcgccagaagatgtggagaccaattgcgagtggagcgccttcagctgctttcagaaggcacaactcaagtccgccaacactggtaataacgagcgtatcattaatgtctccattaagaaactaaagcgtaagccgccctctacgaatgccggtaggcgccagaaacaccgcttgacatgccccagctgtgattcttacgagaaaaagccgcccaaggagtttctcgagcggtttaaaagcctgctgcaaaaaatgatccaccagcacttgtcttcacgcacccatggctctgaggatagc

SEQ ID NO: 14696 - DNA, 486 bp, synthetic construct
  misc_feature 1..486: note = source = /note="Description of Artificial Sequence: Synthetic coding sequence"
  source 1..486: mol_type = other DNA
atgagatccagcccaggtaacatggaaagaattgtgatttgccttatggtgattttcctgggcactcttgttcacaaatcatcctcccagggacaagaccgtcacatgatcagaatgcggcagcttatagacattgtcgatcaactcaagaactacgtcaatgatttggtgccggaatttcttcctgcaccagaagatgtggagactaattgtgagtggtcggcattttcgtgtttccagaaggcgcaattgaagtcggctaacaccggaaacaacgaaagaatcatcaacgtatcgatcaagaaactcaagagaaagcctccttcaactaatgcaggacgccgtcaaaagcatcgactgacttgtccctcgtgtgattcgtatgaaaagaagccgccaaaagagtttcttgaaaggtttaagtcacttctgcaaaagatgatccatcagcatctctcctcacgaacccatggatctgaggactcg

SEQ ID NO: 14697 - DNA, 486 bp, synthetic construct
  misc_feature 1..486: note = source = /note="Description of Artificial Sequence: Synthetic coding sequence"
  source 1..486: mol_type = other DNA
atgcgatcttcaccgggaaacatggagcggatcgtcatttgcctgatggtgatcttcctcggaaccctcgtgcacaaatcgtcatcccagggccaggatagacacatgatcagaatgcggcagctcatcgacatcgtggaccagctgaaaaactacgtgaacgatttggtcccggagttcctcccagccccggaagatgttgaaaccaactgcgagtggagcgcgttttcgtgtttccaaaaagctcagctgaagagcgccaataccgggaataatgaacggatcattaacgtgtccatcaagaagctgaaaaggaagcctcccagcactaacgcaggtcgccgccaaaagcatcgcttgacttgcccttcgtgcgactcgtacgaaaagaagccgccaaaggagtttcttgaacgcttcaagagcctgctgcagaagatgatccaccaacacctgtcatccagaacgcatggatccgaggactcg

SEQ ID NO: 14698 - DNA, 486 bp, synthetic construct
  misc_feature 1..486: note = source = /note="Description of Artificial Sequence: Synthetic coding sequence"
  source 1..486: mol_type = other DNA
atgcggagctcacccggaaatatggaacgaatagtgatctgccttatggtcatcttcttggggaccttggtgcacaaaagctcctcgcagggccaggatcgccacatgattcggatgaggcagctcatcgacatagtggaccagctcaaaaactacgtcaacgacctggtgccagaattccttccggcaccggaggatgtggaaaccaactgtgagtggtcggccttctcgtgcttccaaaaggcccagctgaagagcgcaaacactggaaacaatgaacgcatcattaatgtctcgatcaagaaactcaagcgcaagccaccgtccactaatgcgggcagacggcaaaagcataggctgacctgcccttcctgcgacagctacgaaaagaagccgccaaaggaatttcttgaaaggttcaagtcacttctccagaaaatgatccatcaacatctctcgtcaagaactcacgggtccgaggactcc

SEQ ID NO: 14699 - DNA, 486 bp, synthetic construct
  misc_feature 1..486: note = source = /note="Description of Artificial Sequence: Synthetic coding sequence"
  source 1..486: mol_type = other DNA
atgaggtcctcgccaggaaacatggaacggatcgttatctgcctgatggtgatcttcctcggaactctggtgcacaagtcgtcgtcgcaggggcaggaccgccacatgattcggatgcggcaactcatcgacatcgtggaccaactgaagaactatgtgaatgacctggttccggagttcctcccggcacccgaggatgtggagacgaactgtgagtggtccgccttttcatgcttccaaaaagctcagttgaaatcggcgaacactggaaacaatgagcggattatcaacgtgagcatcaaaaagctgaagagaaaaccaccgtcaactaacgctggtcgccggcagaaacaccgcctcacttgcccgtcatgcgattcatacgaaaagaagcccccgaaggaattcttggagcgttttaagagcctcctgcagaagatgatccaccagcatctgtcctcaaggactcatggatccgaagatagc

SEQ ID NO: 14700 - DNA, 486 bp, synthetic construct
  misc_feature 1..486: note = source = /note="Description of Artificial Sequence: Synthetic coding sequence"
  source 1..486: mol_type = other DNA
atgcgatcctcacccggtaacatggaacgcattgtgatctgtctgatggtcattttcttgggtactctcgttcacaagtcatcatcccagggacaggatcggcatatgattcgcatgcgccagctgatcgatatagtggatcaactcaagaactacgtgaacgatctggtgcctgaatttctgcccgcgccagaggacgtggagactaactgtgaatggtccgcattttcctgcttccaaaaggctcaactcaagtcggcaaatactgggaacaacgagaggatcataaacgtgagcatcaagaaactcaagcgtaagccaccttccaccaacgcaggtcggaggcaaaaacatcgcctgacttgcccaagctgtgattcctacgagaaaaagcctcctaaagagttcctggaaagattcaagagcttgctgcaaaagatgattcaccagcacttgtcgtcgcggacccatggatcagaggactct

SEQ ID NO: 14701 - DNA, 486 bp, synthetic construct
  misc_feature 1..486: note = source = /note="Description of Artificial Sequence: Synthetic coding sequence"
  source 1..486: mol_type = other DNA
atgcggagctccccgggcaatatggagcgcatcgtcatttgcctcatggtgatttttctcggcacattggtgcacaagtcctcttcacagggccaggaccggcatatgatacgcatgcgccagcttattgatatcgtggatcagctgaaaaattacgtgaacgatctggtgcccgagttcctgcctgctccggaggatgtggagacaaactgtgagtggtccgcttttagttgcttccagaaggcgcagctaaaaagcgcgaatactgggaacaacgaacgcatcataaacgtctccatcaaaaaactgaagcggaaaccaccatccaccaacgctggcaggagacagaagcacagattgacgtgcccttcgtgtgacagttatgaaaaaaagccccctaaggaatttctggagcgctttaaatcattattacagaaaatgatccaccagcatctcagttctcgtactcacggcagtgaggacagt

SEQ ID NO: 14702 - DNA, 486 bp, synthetic construct
  misc_feature 1..486: note = source = /note="Description of Artificial Sequence: Synthetic coding sequence"
  source 1..486: mol_type = other DNA
atgcgatcctcccctggcaatatggagcgtattgtgatatgcttgatggttatcttcctgggcaccttggtacacaagtcatcaagccaggggcaggatcgacacatgatacgtatgcggcagcttatcgacattgtggaccaattgaagaattacgtcaatgacctggtccctgaatttctgccagctccagaggacgtcgaaacgaattgcgagtggagcgcatttagctgttttcagaaggcgcagctgaagtctgccaatactgggaacaacgagaggatcattaacgtgtctataaaaaagctgaaacgcaagccaccatctaccaacgctgggcgacgacagaaacatcggctgacttgccccagttgcgattcttacgaaaagaagccgcccaaggaattcctggaacgatttaagagcctactacagaagatgatccatcagcacctgtcgagtcgcacacacggatccgaggactcg

SEQ ID NO: 14703 - DNA, 486 bp, synthetic construct
  misc_feature 1..486: note = source = /note="Description of Artificial Sequence: Synthetic coding sequence"
  source 1..486: mol_type = other DNA
atgcgttcgtcgccgggtaatatggaacgtatagtaatatgtctaatggtaatatttctaggtacgttagtacataaatcgtcgtcgcaaggtcaagatcgacatatgatacgtatgcgtcaactaatagatatagtagatcaattaaaaaattatgtaaatgatttagtaccggaatttttaccggcgccggaagatgtagaaacgaattgtgaatggtcggcgttttcgtgttttcaaaaagcgcaattaaaatcggcgaatacgggtaataatgaacgaataataaatgtttcgataaaaaaactaaaacgaaaaccgccgtcgacgaatgcgggtcgacgtcaaaaacatcgattaacgtgtccgtcgtgtgattcgtatgaaaaaaaaccgccgaaagaatttttagaacgatttaaatcgttactacaaaaaatgatacatcaacatttatcgtcgcgtacgcatggttcggaagattcg

SEQ ID NO: 14704 - DNA, 486 bp, synthetic construct
  misc_feature 1..486: note = source = /note="Description of Artificial Sequence: Synthetic coding sequence"
  source 1..486: mol_type = other DNA
atgcggtccagtccaggcaacatggagcggatcgtgatctgcctgatggtgatcttcctgggcaccctcgtccacaagtcgtcctcgcagggccaagaccgccacatgatcagaatgcggcagttgatcgatatcgtggatcaattgaaaaactacgtgaatgaccttgtcccagaatttctgcctgcaccggaggacgtcgaaaccaactgcgaatggagcgccttctcgtgttttcagaaggctcaactcaagtctgccaatacggggaataacgaacgcatcatcaacgtctcaatcaaaaagttgaaacggaagccgccatccactaacgcgggccggaggcagaagcaccggctgacctgtccgtcgtgcgattcgtatgagaaaaagccaccaaaggaatttctcgaacggttcaaatccctcctgcagaagatgattcatcaacacctgtcctcaaggactcacggatccgaggactca

SEQ ID NO: 14705 - DNA, 486 bp, synthetic construct
  misc_feature 1..486: note = source = /note="Description of Artificial Sequence: Synthetic coding sequence"
  source 1..486: mol_type = other DNA
atgcgaagttcacctggaaacatggaacgcattgtgatttgcctgatggtaatcttcctgggaactctggtccataagtcctcttcccagggccaggaccgacatatgatcaggatgcggcagctcatcgacatcgtggaccagctgaagaactatgttaatgatctcgtcccagaattcttgcccgcaccagaagatgtggagaccaattgtgagtggtccgcgttctcatgcttccagaaagcgcagctcaaatccgccaacaccggaaataacgagagaatcattaacgtcagcatcaaaaagctgaaacggaaacccccttccaccaacgcggggagaagacaaaagcacagacttacctgcccttcctgcgactcctacgaaaaaaagcctcctaaagagtttctcgaaaggtttaagtcccttttgcagaagatgatccaccaacacctcagctctcgcacgcatggaagcgaggatagc

SEQ ID NO: 14706 - DNA, 486 bp, synthetic construct
  misc_feature 1..486: note = source = /note="Description of Artificial Sequence: Synthetic coding sequence"
  source 1..486: mol_type = other DNA
atgaggtcctcccctggaaacatggaacggattgtgatctgtcttatggtgatcttcctgggcaccctggtgcacaagagctcatcgcaaggacaagataggcacatgatcaggatgcggcagcttatcgacattgtggatcagttgaaaaactacgtgaacgatcttgtgcctgaattcctgccagcacctgaagatgtggagactaactgtgaatggtcggccttctcgtgcttccagaaggcccagcttaagtcggcaaacactgggaataatgaacgtatcataaacgtctctatcaaaaagctgaagagaaagcctccctccactaatgcaggtaggcgacagaagcacagacttacttgcccgtcctgcgacagctacgagaagaagccacctaaggagtttctcgaacggtttaagtccttgctccaaaagatgattcatcagcatctctcgagcagaacccatggctccgaggattcc

SEQ ID NO: 14707 - DNA, 486 bp, synthetic construct
  misc_feature 1..486: note = source = /note="Description of Artificial Sequence: Synthetic coding sequence"
  source 1..486: mol_type = other DNA
atgaggtcaagtcccgggaacatggaaaggatagtgatctgcctcatggttatctttctcgggactcttgtccataaatctagttcacagggacaagataggcacatgatcaggatgcggcagctgatagatattgtggatcagctgaaaaactacgttaatgatcttgtgcccgaattcctcccagctcctgaagatgttgaaacaaactgcgaatggtctgcattctcatgttttcagaaagcgcagcttaagtctgctaacacaggaaacaacgaaaggatcatcaatgtgtctataaaaaagctgaagcgaaagccaccctcaacaaatgctgggaggcggcagaaacaccggctcacttgcccctcgtgtgattcttatgaaaaaaaacccccaaaagaattcctagaaagatttaaatctttgctacagaaaatgatacatcagcacctttcttctcgcacacacgggagtgaagatagt

SEQ ID NO: 14708 - DNA, 486 bp, synthetic construct
  misc_feature 1..486: note = source = /note="Description of Artificial Sequence: Synthetic coding sequence"
  source 1..486: mol_type = other DNA
atgcgttcatcccccggcaacatggagcgcatagtaatttgcttgatggtaatcttcctggggacccttgtgcacaaaagttcatctcagggacaggatcgacatatgatccggatgcggcagctaatcgacattgtcgatcagctgaagaattacgtgaatgacctcgtgcccgagttcttacctgcgccggaggacgtcgaaaccaactgtgagtggtctgccttcagttgtttccagaaagcccagttgaaaagcgcaaatacgggaaacaatgagcgcatcataaatgtttctatcaaaaaactaaagaggaagccaccctcaactaacgctggccgcagacagaagcataggctgacctgcccctcatgcgattcatacgaaaagaaaccgcctaaggagtttttggagcgctttaagagccttcttcaaaagatgatacaccagcacttatcttccagaacacacggtagtgaagacagt

SEQ ID NO: 14709 - DNA, 486 bp, synthetic construct
  misc_feature 1..486: note = source = /note="Description of Artificial Sequence: Synthetic coding sequence"
  source 1..486: mol_type = other DNA
atgaggtcctcaccggggaacatggaaagaattgtgatttgcctgatggtcatctttctgggaacccttgtccataagtcatccagccagggccaagatagacatatgatcagaatgcgtcaacttattgatatcgtggatcagttgaagaactacgtcaatgaccttgtgcctgaatttcttcctgcgcccgaggacgtggaaacgaactgcgaatggagcgcctttagctgttttcaaaaggcgcaactgaagtccgcaaatactggtaacaacgaacggattatcaatgtttcgatcaaaaagctgaagaggaagcccccatcgaccaatgcaggacgtagacagaagcaccgactgacctgtccttcttgtgactcctacgagaagaaaccacccaaagagttcctcgaacgtttcaaaagcctgctccagaagatgattcatcagcatctgagctcccgtacccacggctcggaggattcc

SEQ ID NO: 14710 - DNA, 486 bp, synthetic construct; identical to SEQ ID NO: 14641
  misc_feature 1..486: note = source = /note="Description of Artificial Sequence: Synthetic coding sequence"
  source 1..486: mol_type = other DNA

SEQ ID NO: 14711 - DNA, 486 bp, synthetic construct
  misc_feature 1..486: note = source = /note="Description of Artificial Sequence: Synthetic coding sequence"
  source 1..486: mol_type = other DNA
atgagaagcagcccaggaaacatggagcggattgtgatctgcctcatggttatttttttaggtactctggtccacaagtcctcttcccagggccaggacagacacatgattaggatgaggcagctgatagatatcgtggaccagttgaaaaactacgtgaatgacctcgtgccggagttcctgcccgcccctgaagacgtggagacaaattgtgagtggtctgctttctcatgttttcagaaggcacagcttaaatctgccaatacggggaacaacgagcgaattattaatgtctcaatcaaaaagctgaagcggaagcctccctcaaccaatgccggccggcgtcagaagcacagactaacctgcccaagttgcgactcatatgaaaagaaaccaccaaaggagttcctggagagatttaaaagcctgttgcagaaaatgatccaccaacatctgtctagccgcacacacggatctgaggactcc

SEQ ID NO: 14712 - DNA, 486 bp, synthetic construct
  misc_feature 1..486: note = source = /note="Description of Artificial Sequence: Synthetic coding sequence"
  source 1..486: mol_type = other DNA
atgcggagcagccccggcaacatggagcggatcgttatatgtttgatggtcattttcctggggacattagtccacaaatcatcctctcaagggcaggataggcatatgatcagaatgaggcagcttattgacatagtggatcagctcaaaaactacgtgaacgacctggtgcctgaattcctgcccgcccctgaggatgtggaaacgaattgcgaatggtcagcgttttcctgctttcagaaagcacagttgaaatctgcaaatacaggaaataacgaaaggatcatcaacgtgtccattaaaaaactgaagcggaaaccaccctccacaaatgccgggaggcggcagaaacaccgtttgacctgcccgtcttgtgactcatacgaaaagaagcctcctaaggaattcctagagaggttcaaatcattacttcagaagatgatccatcagcaccttagttccagaacacatggtagcgaagatagt

SEQ ID NO: 14713 - DNA, 486 bp, synthetic construct
  misc_feature 1..486: note = source = /note="Description of Artificial Sequence: Synthetic coding sequence"
  source 1..486: mol_type = other DNA
atgagatctagccctggtaatatggagcgtattgtgatatgtctgatggtcatatttctaggaacactagttcataagtcatcaagccaaggtcaggatcgtcacatgatcaggatgaggcagttaattgatattgtggatcaactcaagaactacgtcaacgacttagtgcccgagttccttcctgctccagaagatgtggaaactaactgtgagtggtcagcattctcctgtttccagaaagctcagcttaagagtgccaacacaggtaataacgagaggataattaacgttagcattaagaagcttaagcgaaagccaccttccacaaatgcggggcgacgtcaaaaacataggttaacgtgccctagttgtgattcgtatgaaaagaagccaccgaaggaattcttggagagatttaagtctttgttacagaagatgatacatcagcacctctcatcgaggacccatggatctgaagatagc

SEQ ID NO: 14714 - DNA, 486 bp, synthetic construct
  misc_feature 1..486: note = source = /note="Description of Artificial Sequence: Synthetic coding sequence"
  source 1..486: mol_type = other DNA
atgcgctccagccctggtaacatggaacggatcgtcatctgcttgatggtgatctttctgggcactctggtgcataagtcgtctagccaaggacaggaccgccacatgatcagaatgcgtcaactcatagatatcgtggaccagttgaagaattacgtgaacgatctggtgccggagttcctgcccgctccggaggatgtcgaaaccaactgtgaatggtccgcattcagttgctttcagaaggcccagctcaagtccgcgaatactggaaataacgaaagaattatcaacgtcagcataaagaaactgaaaagaaaaccgccgtcgaccaacgccggccgacgccaaaagcatcgcctgacttgcccgagctgcgacagctacgaaaagaaacccccgaaagagttccttgagcggttcaagtctctcctgcagaagatgatccatcaacacctctcctcacggacgcacggaagcgaggactcg

SEQ ID NO: 14715 - DNA, 486 bp, synthetic construct
  misc_feature 1..486: note = source = /note="Description of Artificial Sequence: Synthetic coding sequence"
  source 1..486: mol_type = other DNA
atgcgctcaagccccggcaatatggaaaggatcgtgatttgtctgatggtcatcttcctgggcacccttgtccataagtcgtctagccaaggccaggatcggcatatgattagaatgcgtcagctgattgatatagtggatcagctgaagaactacgtgaacgatctggtcccagaattcctccctgcaccggaggatgtcgaaaccaactgtgaatggtcggcattttcgtgctttcaaaaagcgcaactgaagtcagccaatactgggaacaatgaaagaattatcaatgtgtcgatcaagaaactgaagagaaagccgccttcgactaatgcaggacgcagacaaaaacatagactgacttgtccatcgtgcgactcgtatgagaaaaaacctcctaaagaatttcttgagcgtttcaaaagcctcctgcaaaagatgatacaccaacatctgagctcgcggacccatggaagcgaggactcc

SEQ ID NO: 14716 - DNA, 486 bp, synthetic construct
  misc_feature 1..486: note = source = /note="Description of Artificial Sequence: Synthetic coding sequence"
  source 1..486: mol_type = other DNA
atgagatcatcgccgggaaacatggagcggatcgtgatctgtctgatggtgatcttcttgggaaccctcgtccacaagagctcgtcgcaaggacaggatcgccacatgattcggatgcggcaactcatcgatatcgttgatcagctgaagaactacgtcaatgaccttgtgcccgagttcttgcccgcaccggaggacgtggaaactaactgcgaatggtcggcattttcatgtttccagaaggcgcaacttaagtcagccaacacggggaataatgaacggatcatcaacgtgagcatcaaaaagctcaagagaaagcctccttctaccaacgctggacggcgccaaaagcacaggcttacctgcccatcttgcgactcatacgaaaagaaaccaccaaaggagtttctcgagcggttcaaaagcctcttgcagaagatgatccatcagcacctgagctccaggactcatggctcggaggactcg

SEQ ID NO: 14717 - DNA, 486 bp, synthetic construct
  misc_feature 1..486: note = source = /note="Description of Artificial Sequence: Synthetic coding sequence"
  source 1..486: mol_type = other DNA
atgaggagcagccccggaaacatggagcgaattgtgatatgtctcatggttatttttctgggcaccctggtgcataaaagttcatcccaaggccaggatcggcacatgattcgcatgcggcaactcattgacatcgtcgaccagctcaagaactatgtaaacgacctagtgccagagttcttgccggcccctgaggacgtcgagacaaattgcgaatggagtgctttctcctgttttcagaaggcccagctgaagtctgccaataccggcaataatgaaaggatcattaacgtctccatcaagaaattaaagcgcaagcctccttcgaccaacgcagggcgacgccagaagcacagactcacatgcccctcctgcgactcttacgaaaagaaacctcctaaggagttcttagaacgctttaagtcactgttgcagaagatgattcaccagcacctatcctctagaacccacggttcagaggacagc

SEQ ID NO: 14718 - DNA, 486 bp, synthetic construct
  misc_feature 1..486: note = source = /note="Description of Artificial Sequence: Synthetic coding sequence"
  source 1..486: mol_type = other DNA
atgcggtcgtccccaggcaacatggagcgcatcgtgatctgcctcatggtgatcttcctgggaactttggtgcataaaagcagcagccaggggcaagaccgccacatgattcgcatgcgccaactgatcgacatcgtcgatcagctgaagaactacgtcaatgacctggtcccggaatttctcccggcgccggaggatgtcgaaactaactgtgaatggtcggccttctcatgctttcaaaaggcgcagctgaaaagcgcaaacaccggcaataatgaaagaattatcaatgtgtcgattaagaaacttaaaaggaagccaccgtcgacgaacgcaggtagacgccagaagcaccgactgacttgcccaagctgcgattcatacgagaagaagcctccaaaagaatttctcgagcgcttcaaatcacttctccagaagatgattcaccagcatctgtcgtcacgcacccacggcagcgaggactcg

SEQ ID NO: 14719 - DNA, 486 bp, synthetic construct
  misc_feature 1..486: note = source = /note="Description of Artificial Sequence: Synthetic coding sequence"
  source 1..486: mol_type = other DNA
atgcggtcctcccctggtaatatggaaaggattgtgatttgtctgatggtcatctttctcggcactctggtgcataagtcgtccagccaaggtcaggatcgtcacatgatcagaatgcgtcaactgattgacattgtggaccaactgaagaattacgtgaacgacctggtgcccgagttccttcctgcacctgaggatgtcgaaactaattgtgagtggtcggcgttcagctgctttcaaaaggcgcaacttaagagcgcaaacactggcaacaacgaacggatcatcaacgtgtccataaagaagttgaagcgtaagcctcctagcaccaacgctggacgacgccagaaacatcgccttacttgcccgtcatgtgactcctacgagaaaaagcctccgaaagaatttctcgaaagatttaagtcgctgctgcagaaaatgatccatcagcacctttcgtcaagaactcatggatccgaggacagc

SEQ ID NO: 14720 - DNA, 486 bp, synthetic construct
  misc_feature 1..486: note = source = /note="Description of Artificial Sequence: Synthetic coding sequence"
  source 1..486: mol_type = other DNA
atgcgctcctcaccggggaacatggaacggatcgtgatttgcctgatggtaatcttcctgggtacccttgtgcataaatccagcagccagggccaggaccgccatatgatccgcatgcgccaactgatagacatcgtggaccagctgaagaattacgtgaacgacctcgtccctgagtttctcccggcaccggaagatgtggaaactaactgcgagtggtccgccttttcatgtttccaaaaggctcagttgaaatcagctaataccggaaacaatgagagaatcatcaacgtctcgataaagaagctcaagagaaaaccacccagcacgaacgccggacggcggcagaaacaccgcctgacttgcccaagctgcgactcgtacgagaagaagccccctaaagaattcctggagagattcaagtctctgcttcaaaagatgatccaccaacatctcagctcacgtacccacggatcagaagattcc

SEQ ID NO: 14721 - DNA, 486 bp, synthetic construct
  misc_feature 1..486: note = source = /note="Description of Artificial Sequence: Synthetic coding sequence"
  source 1..486: mol_type = other DNA
atgcggagctcgcctgggaacatggagcggatcgtgatctgcctgatggtcatcttcctgggcaccctggtccataagtcgtcgagccaaggtcaagaccgccacatgatccggatgcggcaactcattgatatcgttgaccagcttaagaactacgtgaatgacctggtgccggaattcctcccggccccagaagatgttgaaactaactgcgagtggtcagctttctcgtgcttccagaaggcccaactcaagtcggctaatactgggaataacgagcggatcattaacgtctcaattaagaagctgaaacgcaagcccccttcaactaatgccggcagacgacagaagcataggcttacctgcccgtcgtgtgactcctacgagaaaaagccgccgaaggaattcttggaaaggttcaagtcgctgctgcagaaaatgatccaccagcacctgagctcaagaacccatggatccgaagatagc

SEQ ID NO: 14722 - DNA, 531 bp, synthetic construct
  misc_feature 1..531: note = source = /note="Description of Artificial Sequence: Synthetic coding sequence"
  source 1..531: mol_type = other DNA
atgttccacgtttcctttcgttatattttcgggctgcccccgttaatcctggtgcttttgcccgtggcaagctcagattgtgacatagaaggtaaagatggaaagcagtacgaatccgtcctaatggtcagcattgaccagctcctggacagtatgaaggagattgggtcaaactgcctcaacaacgaattcaactttttcaagcggcacatttgtgatgctaacaaggagggcatgtttctgttccgcgctgctaggaagctcagacaattcctcaagatgaatagcacgggggacttcgacctgcacctcctgaaagtttctgaaggaaccacaatcctactaaattgtacggggcaagtgaagggacggaaacctgcggcactcggcgaagcacagccaacaaagagtcttgaagaaaacaagtccctcaaggagcagaaaaagcttaacgacctgtgtttccttaaaagacttttgcaggagataaagacctgttggaacaaaattctcatgggtacaaaggaacac

SEQ ID NO: 14723 - DNA, 531 bp, synthetic construct
  misc_feature 1..531: note = source = /note="Description of Artificial Sequence: Synthetic coding sequence"
  source 1..531: mol_type = other DNA
atgttccacgtctctttccgctacattttcggactgccgcctctcatcctcgtcctgctgccggtcgcgagcagcgattgcgacatagagggcaaagatggtaagcagtatgagagcgtgctgatggtttctattgaccaacttctcgactcgatgaaggagatcgggtctaactgcttgaacaacgagttcaacttcttcaaacggcatatttgcgatgcgaataaagaaggcatgttcctctttcgcgcggctcgaaagctgcggcagtttcttaagatgaattcaacaggtgatttcgacctgcacctactgaaggtgtccgaaggtacgaccattctcctgaactgcactggccaagtgaagggacggaagcctgccgctctgggtgaggctcagcctacgaagtccctcgaagagaataaatcattgaaagagcagaaaaaactgaatgatctgtgtttcctgaagaggctgttgcaagagatcaagacctgctggaacaaaattctcatggggacgaaggagcac

SEQ ID NO: 14724 - DNA, 531 bp, synthetic construct
  misc_feature 1..531: note = source = /note="Description of Artificial Sequence: Synthetic coding sequence"
  source 1..531: mol_type = other DNA
atgtttcacgtgagctttcgctacatcttcgggctgcccccgctgatcttggtgcttctcccagttgcatcatccgactgtgatatcgaaggcaaggacggcaagcagtacgagtccgttttgatggtgtcgatcgaccaactgctggactcgatgaaggaaatcggatcgaactgtctgaacaacgaattcaacttcttcaagaggcacatctgcgacgctaataaggaaggtatgtttctgttcagggcggcgcggaagctccgccagtttctcaagatgaattcaactggagacttcgatctccaccttctcaaggtgagcgagggaacgactattctgctgaattgcaccggacaggtgaaagggcggaagccagctgcacttggcgaagcccaaccgaccaagtcgctcgaagaaaacaagtcgctgaaggagcagaagaaactgaatgatctttgcttcctgaaacggctcctgcaagaaatcaagacctgctggaacaaaatcctcatgggaactaaagaacac

SEQ ID NO: 14725 - DNA, 531 bp, synthetic construct
  misc_feature 1..531: note = source = /note="Description of Artificial Sequence: Synthetic coding sequence"
  source 1..531: mol_type = other DNA
atgtttcacgtgagcttccggtacattttcggtctaccgccacttatcctggtgcttctgccagttgcctctagtgactgtgatattgagggcaaggacggcaaacaatacgagagcgttctcatggtttcaattgaccaactcctggactcaatgaaggaaattgggtccaactgtttgaacaatgaatttaatttttttaagcgccacatttgcgacgcgaataaagaagggatgtttctctttcgcgccgctcgcaaactgcgacagttcctgaaaatgaactccactggggactttgacctccatcttctgaaggtgagcgaaggcactactatcctgctgaactgcacaggccaagtaaagggacgcaagcccgccgccttaggagaggcccaaccaaccaagtcgttggaagagaataagagtctcaaggagcaaaagaagctgaatgacctgtgcttcctgaaaagacttctccaagaaatcaaaacgtgctggaacaaaatactcatgggaaccaaggagcat

SEQ ID NO: 14726 - DNA, 531 bp, synthetic construct
  misc_feature 1..531: note = source = /note="Description of Artificial Sequence: Synthetic coding sequence"
  source 1..531: mol_type = other DNA
atgttccatgtctcattcaggtatattttcggtctgcctcccttgatcctcgtcttgctgccagtagcttcttcggattgtgatattgaggggaaagatggcaagcagtacgagtcagttcttatggtgagcatagaccagctgttagactccatgaaagagatagggtccaactgtctcaacaacgaatttaatttttttaaaaggcacatatgtgacgcaaataaggaaggcatgttcttgtttcgcgctgcacggaaactccgccagtttctgaaaatgaactcgactggcgacttcgacctccacttgctgaaggtatccgaaggaaccactattttgcttaattgtaccggacaagtcaaaggcaggaagcccgcagccttgggagaggctcagcccacaaagtctctggaagagaataaatcattaaaagaacagaagaaactcaatgatctgtgctttctgaagaggctgctgcaggaaataaagacttgttggaacaagattcttatgggtacaaaagaacac

SEQ ID NO: 14727 - DNA, 531 bp, synthetic construct
  misc_feature 1..531: note = source = /note="Description of Artificial Sequence: Synthetic coding sequence"
  source 1..531: mol_type = other DNA
atgttccacgtttcctttcggtacatctttggactgccaccattaatactggtccttctgcccgtagcgtcatccgattgtgacatcgagggtaaggacgggaaacagtacgagtcagtgcttatggtgagcatcgatcagctccttgatagcatgaaggagatcgggagtaattgcctgaataacgagttcaactttttcaaacgccacatctgcgacgccaacaaagagggtatgtttcttttcagggccgcgcggaagctgagacagtttcttaaaatgaactcgactggtgattttgatctgcacctgctgaaagtgagtgaaggcacaacaattctgctgaattgcaccggacaagttaagggccggaagccagccgcactgggtgaggcccagccgacaaaatccttggaggagaataaatcgctgaaagagcaaaagaaattgaatgatctttgtttcctgaagcgccttctgcaggaaatcaaaacttgctggaataaaatcctgatgggcacaaaagagcac

SEQ ID NO: 14728 - DNA, 531 bp, synthetic construct
  misc_feature 1..531: note = source = /note="Description of Artificial Sequence: Synthetic coding sequence"
  source 1..531: mol_type = other DNA
atgtttcacgtgtcattccggtacatctttggactgcctcctcttattctcgttctgcttccagtcgcgtcctcggattgtgacattgagggtaaagatgggaagcaatacgagagcgtccttatggtgtctatcgaccagctccttgattccatgaaggagatcggttctaactgcctcaataacgagtttaactttttcaaacgtcatatttgtgatgccaacaaggagggcatgttcctgtttagagctgcacgaaagttgaggcagtttctgaagatgaacagcactggtgatttcgatcttcacttgctcaaggtgtcggaaggtactaccatcctgctcaattgtactggtcaggtgaagggacgcaagcctgctgcacttggcgaagcacagccaaccaaatcactggaagagaacaaaagccttaaagaacagaagaaacttaatgatctttgctttcttaaaagactgctccaagagattaagacctgctggaataagatactgatgggaactaaggaacat

SEQ ID NO: 14729 - DNA, 531 bp, synthetic construct
  misc_feature 1..531: note = source = /note="Description of Artificial Sequence: Synthetic coding sequence"
  source 1..531: mol_type = other DNA
atgtttcatgtgagcttcagatatatctttggtcttccaccactgattcttgtactgttgcctgtggcctcctccgactgtgatattgaggggaaagatggaaagcaatacgagtctgtgctaatggttagtatcgatcagctcctcgactcaatgaaggagattggatctaattgcctcaacaatgagttcaatttctttaagcgacacatatgtgacgccaacaaggaggggatgttcctgtttcgtgcggctagaaaattgagacagtttctaaagatgaacagtacaggcgactttgacctgcaccttctgaaagtgagtgaagggacaaccatcctgctcaactgcaccgggcaggttaaaggccgcaaacccgccgccctcggagaagctcagcccaccaagagccttgaggagaataagtcattgaaggaacagaagaagctgaacgacctttgctttctgaagaggctgctccaagaaatcaagacttgctggaataaaattttaatgggaactaaggagcat

SEQ ID NO: 14730 - DNA, 531 bp, synthetic construct
  misc_feature 1..531: note = source = /note="Description of Artificial Sequence: Synthetic coding sequence"
  source 1..531: mol_type = other DNA
atgtttcatgtgagcttcagatatatctttgggctccctccactgattcttgtgctgcttcctgtggcgtccagcgattgcgacatagagggcaaggacggtaagcaatatgagagcgtgcttatggtcagcatcgaccagctcctggacagtatgaaggaaatcggctccaactgtctcaataacgaatttaatttctttaagaggcatatatgcgacgccaacaaagagggtatgttcctgtttcgagcagcaagaaaactgagacagttcctaaaaatgaattcaaccggcgacttcgacctacatcttctcaaggtgagcgaggggacaaccattctgctgaattgtactgggcaggtgaagggaagaaaaccagcagcactcggggaagcacagcccaccaaaagcctggaagagaataagtcgctgaaggagcagaaaaaactgaacgatctgtgttttctcaagcgactactgcaagaaattaagacctgctggaacaaaatcctgatgggaacaaaagaacac

SEQ ID NO: 14731 - DNA, 531 bp, synthetic construct
  misc_feature 1..531: note = source = /note="Description of Artificial Sequence: Synthetic coding sequence"
  source 1..531: mol_type = other DNA
atgtttcacgtctcattccgatacattttcggtctgcctccactgattctcgttcttctgcccgtcgcatcgtcggattgcgatattgaaggcaaagatggtaagcaatacgaatcggtcctgatggtgtccatcgaccaactcctggatagcatgaaagaaatcggttcaaattgcctgaacaacgagtttaacttctttaagcgtcatatttgtgatgcgaacaaggaggggatgtttctctttcgcgcagcccggaagctgaggcaatttcttaagatgaactcaaccggcgatttcgatcttcacctgcttaaagtgtcagaaggcacgactatactgctgaactgtaccggtcaggtgaagggaagaaagccagcagcactgggagaagcccaacccactaagtccttggaggagaacaagtcactcaaagagcagaaaaagctgaacgatctgtgtttccttaaacggcttctgcaggaaatcaaaacctgctggaataagatcctcatgggcactaaagaacac

SEQ ID NO: 14732 - DNA, 531 bp, synthetic construct
  misc_feature 1..531: note = source = /note="Description of Artificial Sequence: Synthetic coding sequence"
  source 1..531: mol_type = other DNA
atgttccacgtctcatttcggtacatctttggacttccgcccctcattttggtgctcctcccagtggcctcctcagactgcgatattgaaggaaaggacggaaaacagtacgaatccgtgctgatggtgtcaatagatcagttgctcgactccatgaaggagattggctcaaactgtctgaacaatgaattcaacttctttaaacgccatatttgtgatgcaaacaaagaaggtatgtttctttttagggcagcaagaaagttgagacaattcttgaaaatgaactccactggagatttcgatctgcacctgttgaaggtgagcgaagggaccaccatccttttgaattgcacgggccaggtcaagggacgaaagcctgctgcccttggtgaagcccaaccaaccaagtccctggaggagaacaagagtctgaaggagcagaagaagttgaacgatctgtgttttttgaaaaggctgctgcaagaaatcaagacttgttggaataagatcctcatgggaactaaggaacat

SEQ ID NO: 14733 - DNA, 531 bp, synthetic construct
  misc_feature 1..531: note = source = /note="Description of Artificial Sequence: Synthetic coding sequence"
  source 1..531: mol_type = other DNA
atgtttcatgtttcgttcaggtacatttttggactgcctcccctcatacttgtgctgctgccggtcgcctcatccgactgtgatattgagggcaaggacgggaagcaatacgaatcagtcctgatggtgagcattgatcaacttttggactcgatgaaggagatcgggagcaactgtctgaataacgagtttaacttctttaagaggcatatatgtgatgctaataaggaggggatgtttctgttcagggccgcacggaagttgcgacaatttctgaagatgaactccaccggtgactttgatctccacctgctgaaggtgtccgaaggaaccaccattctgctcaattgtacgggtcaggtgaagggtcgcaaacctgcagcactgggggaagcacagcctactaaaagcctggaagaaaacaagtccctgaaagaacagaagaagctcaatgatctgtgtttccttaaaagactcctgcaagagataaagacttgttggaataagattctgatgggcacgaaggaacat

SEQ ID NO: 14734 - DNA, 531 bp, synthetic construct
  misc_feature 1..531: note = source = /note="Description of Artificial Sequence: Synthetic coding sequence"
  source 1..531: mol_type = other DNA
atgtttcacgtgagctttagatacatttttggcctgcccccactgatcctcgtcctgttgcctgtggcctccagcgattgtgatattgaaggtaaggacggaaagcagtacgaatcggtgcttatggtgtccatcgatcagttgcttgattccatgaaggaaattggaagcaattgtctgaataacgagtttaactttttcaagcgtcatatctgtgacgctaacaaagagggtatgtttctgtttagggcggcaagaaagctgcggcagtttctgaagatgaattctacgggtgattttgacctgcaccttctgaaggtgtccgaagggaccactatactgctcaactgcacggggcaagtgaaagggcgaaagcctgcagcactgggcgaagcgcagcccaccaagagccttgaagaaaacaaatctctgaaagaacagaagaaacttaatgatctgtgcttccttaagcggctccttcaagaaatcaagacttgttggaacaagattctcatgggaacgaaggagcac

SEQ ID NO: 14735 - DNA, 531 bp, synthetic construct
  misc_feature 1..531: note = source = /note="Description of Artificial Sequence: Synthetic coding sequence"
  source 1..531: mol_type = other DNA
atgttccacgtgagcttcagatacatcttcggcctgccaccgctgatcttggtgctgttgcctgtcgcttcctccgactgcgatatagaaggcaaggatggaaagcaatacgagtcggtcctgatggtgtcaatcgaccaactgcttgattccatgaaagagatcggctcgaattgcctgaacaacgaattcaacttctttaagagacacatctgcgatgcgaataaggaaggaatgtttctcttccgggctgctcggaaactgcggcagttcctcaagatgaactccaccggagacttcgacctgcatctcttgaaagtcagcgagggaactaccatcctgctgaactgtactgggcaggtgaagggtcgcaagccggcagcgttgggagaggcgcagcccaccaagtcgctggaggaaaacaaatctttgaaggaacagaaaaaactgaatgacctgtgttttctgaagaggctgctgcaagagattaagacctgctggaacaagatcctgatgggaactaaggaacac

SEQ ID NO: 14736 - DNA, 531 bp, synthetic construct
  misc_feature 1..531: note = source = /note="Description of Artificial Sequence: Synthetic coding sequence"
  source 1..531: mol_type = other DNA
atgtttcacgtgtcgttccgctacatatttggccttcctccactcatccttgtgctgctgcctgtggctagctcggactgtgacattgaaggcaaggatgggaagcagtacgagtcggtgcttatggtgtcgattgaccagctgctggatagcatgaaggagattggttcaaattgtctgaacaatgagtttaacttctttaagaggcacatttgcgatgctaacaaagagggcatgtttttgttccgcgcggcgcggaagctgcggcagttcctgaaaatgaactcaaccggagattttgatctgcatctgttgaaagtctccgagggaacgactatcttgctgaattgcaccggacaggtgaaagggagaaagccagcagcccttggagaagcacagccaactaagtcacttgaagaaaacaaatcgcttaaggaacaaaagaaactgaacgatctgtgttttttgaagcgcttgcttcaagagatcaagacctgttggaataagattctgatggggacgaaggagcat

SEQ ID NO: 14737 - DNA, 531 bp, synthetic construct
  misc_feature 1..531: note = source = /note="Description of Artificial Sequence: Synthetic coding sequence"
  source 1..531: mol_type = other DNA
atgttccatgtatcctttcgctatattttcggcctgccgcccctgatcctcgttctgctacctgtggcatccagcgactgcgacatcgagggaaaagacggcaagcaatatgagtcggtcctaatggtgtcaattgatcagttgcttgactcgatgaaggagattggctcgaactgccttaacaatgaatttaacttctttaaacggcacatttgcgacgccaacaaggaaggcatgttcttatttcgggccgcgcgaaagctgaggcagttcctcaagatgaactccactggcgactttgatcttcatctactgaaagtctccgagggtacgaccattctacttaactgcacgggccaggtcaagggcagaaagccggcagctctgggcgaagcacagccaacaaaatctctggaagagaataagagtttgaaggagcagaaaaaactaaatgacctatgttttctgaagcgcttgcttcaagagataaagacctgctggaacaagatcttaatgggaacgaaggagcat

SEQ ID NO: 14738 - DNA, 531 bp, synthetic construct
  misc_feature 1..531: note = source = /note="Description of Artificial Sequence: Synthetic coding sequence"
  source 1..531: mol_type = other DNA
atgtttcatgtgagctttcgctatatatttggactgccccctctgatactcgttctcctaccagtcgcttcctccgactgtgacatcgagggaaaagatggcaagcagtacgaaagtgtgctgatggtctcaatcgaccaactgctggatagcatgaaggagatcggatccaactgccttaataacgagtttaacttctttaaaagacacatatgtgacgcaaacaaggaaggaatgtttcttttccgggccgcaagaaaactgaggcagttcttgaagatgaatagtacaggggactttgatctgcacctcttgaaagtctctgaagggaccaccattctgctgaactgtaccggacaggtcaagggtaggaagcccgccgccttgggcgaggcccagcctacaaagagtctggaagagaataaatccctgaaggaacagaagaaacttaatgacctgtgctttttgaagcggcttctccaggagatcaagacatgttggaataagattttaatgggcacaaaggagcat

SEQ ID NO: 14739 - DNA, 531 bp, synthetic construct
  misc_feature 1..531: note = source = /note="Description of Artificial Sequence: Synthetic coding sequence"
  source 1..531: mol_type = other DNA
atgtttcacgtgtcattcaggtacatcttcgggctcccaccacttatcctggtcctgctcccggtggcttcgtccgattgtgatattgaggggaaggacggtaaacagtacgagtcagtgttgatggtgagcatcgaccaactcctggactcaatgaaggaaataggatcaaactgcctgaataacgaattcaacttctttaagagacatatctgcgatgccaataaggaaggcatgttccttttccgggccgcacgtaaactccgacagttcctgaagatgaactccactggcgattttgacctccacctgcttaaagtctcggagggcacgaccattctgctcaactgtactggacaagtgaagggacgcaagcctgctgccttgggagaggcgcagccgaccaaatccctcgaagagaataagtccctcaaggaacagaagaagttgaacgatctgtgcttcctgaagcggctcctccaggaaatcaaaacttgctggaacaagattctcatgggtaccaaagagcac

SEQ ID NO: 14740 - DNA, 531 bp, synthetic construct
  misc_feature 1..531: note = source = /note="Description of Artificial Sequence: Synthetic coding sequence"
  source 1..531: mol_type = other DNA
atgttccacgtgagtttcaggtacatcttcggcctcccccccctgatcctggtgttgttaccggttgcttcttctgattgtgatattgaaggcaaggacggcaagcagtatgaaagcgtgctgatggtgtcaattgaccagttgctggattccatgaaagaaatcggctcaaactgtctgaacaacgaattcaacttctttaaaagacatatctgcgacgcgaacaaggagggaatgtttctctttagagccgccagaaagcttagacagtttttaaaaatgaactccacgggtgacttcgatcttcaccttctcaaagtgtccgagggtactactattctgctgaattgtacaggccaggtcaaaggaagaaaacccgcagctttgggggaggcccaaccgaccaaaagtttggaggagaataagagcctaaaggagcaaaaaaaattgaatgatctgtgttttctgaaacgtcttctgcaggagataaagacctgctggaacaagattctgatgggcacaaaggagcac

SEQ ID NO: 14741 - DNA, 531 bp, synthetic construct
  misc_feature 1..531: note = source = /note="Description of Artificial Sequence: Synthetic coding sequence"
  source 1..531: mol_type = other DNA
atgtttcatgtgtccttcagatacatctttggccttccgccattgattctggtgcttcttcccgtggcatccagcgattgcgatatcgagggtaaggatggaaagcaatacgaatcggtcctgatggtgtccattgaccagctgcttgattcgatgaaagaaattggatccaactgcctgaataacgagtttaacttctttaagcgccacatttgcgatgccaataaagagggaatgttcctctttagagccgcacggaaactgcggcagtttcttaagatgaactcgactggcgatttcgatctgcacctgctgaaggtgtcggagggtaccaccatccttctgaactgtaccggacaagtcaaggggcgcaagcccgcagcgctgggggaagcacagccgactaagagcctcgaagaaaacaagtcacttaaagaacagaaaaaactcaacgatctttgttttctgaagagattgcttcaagaaatcaaaacgtgttggaacaagattctgatggggactaaagaacat

SEQ ID NO: 14742 - DNA, 531 bp, synthetic construct
  misc_feature 1..531: note = source = /note="Description of Artificial Sequence: Synthetic coding sequence"
  source 1..531: mol_type = other DNA
atgttccacgtgtcattcagatacatttttggcttgccacctctgatcctggtacttcttccagtagcctcatcggactgtgatatcgagggaaaggatggaaagcaatacgagagcgttctgatggttagcattgatcaattgttagattctatgaaggagattggaagtaattgtcttaataatgagttcaatttttttaagcgtcacatttgtgatgcgaataaagagggcatgttcttgttccgagctgcccgaaaactccgtcaattcttgaaaatgaactcaacgggtgattttgatctccatcttctgaaagtgtcagaaggaaccactatacttctcaactgcactggacaggtgaagggacgaaagccggcggcacttggtgaagcacagccaactaaatctttagaagaaaataagagtcttaaagaacaaaagaaacttaatgatttgtgttttttaaaacgacttcttcaggaaatcaaaacatgctggaataagattttgatggggacgaaggagcat

SEQ ID NO: 14743 - DNA, 531 bp, synthetic construct
  misc_feature 1..531: note = source = /note="Description of Artificial Sequence: Synthetic coding sequence"
  source 1..531: mol_type = other DNA
atgtttcacgtgtcatttcggtacatcttcggactgccacctctcatcctggtgctgctgcccgtcgcgtcgtccgactgtgacatcgaaggtaaggatggtaaacagtacgaatcagtgcttatggtttcgattgatcaactgcttgatagcatgaaggagatcggatcgaattgtctcaataacgagtttaacttctttaaacgacacatctgtgatgcgaacaaagaaggaatgttcctctttagggcggctaggaagctgcgccaattcctcaaaatgaacagcaccggagatttcgatctgcacctgctgaaggtgtcagagggtaccactattctgctgaactgcaccggccaagtgaaggggcggaagccagccgcacttggggaggcacagccgaccaagagcctcgaagaaaacaagagccttaaagagcaaaagaagctcaacgacttgtgcttcctcaaaagattgttgcaggagatcaaaacgtgttggaataagatcctgatgggaactaaggagcat

SEQ ID NO: 14744 - DNA, 531 bp, synthetic construct
  misc_feature 1..531: note = source = /note="Description of Artificial Sequence: Synthetic coding sequence"
  source 1..531: mol_type = other DNA
atgttccatgtcagctttagatacatttttgggctgcctcccctgattctcgtcctgcttcccgtggcatcgagcgattgtgacatcgagggtaaggatggaaagcagtatgaatccgtgttgatggtttcgattgaccagctcctggattcgatgaaagagatcggttcgaactgcttgaacaacgaattcaacttctttaagcgtcatatttgcgatgcaaataaggaaggtatgttcctcttcagagccgcacgaaagctgcggcaattccttaagatgaactccactggcgattttgatctccatctgctgaaggtgtcagaaggcactactattctcctgaattgtactggacaagtgaagggccgaaagccagccgcacttggagaagcccaacccactaagtctcttgaagaaaacaagagcctgaaggagcagaaaaagctcaacgacctctgttttctgaagcgcctgctccaagagattaagacttgttggaataagatactgatgggaaccaaagaacac

SEQ ID NO: 14745 - DNA, 531 bp, synthetic construct
  misc_feature 1..531: note = source = /note="Description of Artificial Sequence: Synthetic coding sequence"
  source 1..531: mol_type = other DNA
atgtttcacgttagcttcaggtacatctttggactgccccctctgatcctggttctgctgccggttgcgtcctctgactgcgatattgaaggaaaagacgggaagcaatacgaatcagtgctcatggttagcatagaccaacttctcgattcgatgaaagagattggtagcaattgtttgaataacgagttcaatttctttaagagacacatttgtgatgcaaacaaggaaggcatgtttctcttcagggccgccagaaaactgcggcagttcctcaaaatgaattccaccggcgactttgatctacatctactgaaagtgagcgaaggcactactatcctgctgaactgcacaggccaggtgaagggaaggaagcccgccgcactgggcgaagcccagcctaccaaatcactggaggagaataagtcgctcaaggagcagaaaaagctaaacgacttgtgcttcctgaagcggttactgcaggagattaaaacctgctggaacaagattctcatggggacaaaggagcat

SEQ ID NO: 14746 - DNA, 531 bp, synthetic construct
  misc_feature 1..531: note = source = /note="Description of Artificial Sequence: Synthetic coding sequence"
  source 1..531: mol_type = other DNA
atgtttcatgtctcgttccgctacatctttggcctcccacctctgatcctcgtgctgttgccagtggcttcctcggattgtgacattgagggcaaggacgggaaacaatacgaaagcgtccttatggtatcaatcgatcagcttctcgacagcatgaaggaaattggtagtaactgcctcaataacgaattcaatttctttaagaggcacatttgtgatgcaaacaaggaaggaatgtttctttttcgcgccgcacgaaaactgcgacagtttctcaaaatgaactcaactggggattttgacttgcacctcctcaaggtgtcagaaggaaccactatacttctgaactgcaccggacaagtgaagggtcgtaagccggccgcacttggagaagctcagccaacgaaatcccttgaagagaataagtcgcttaaagagcaaaagaaactgaatgatctgtgttttcttaagcggctgctccaagagataaagacttgctggaacaaaatcctcatgggaaccaaggagcat

SEQ ID NO: 14747 - DNA, 531 bp, synthetic construct
  misc_feature 1..531: note = source = /note="Description of Artificial Sequence: Synthetic coding sequence"
  source 1..531: mol_type = other DNA
atgtttcatgtatcgtttcgatatatatttggtctaccgccgctaatactagttttactaccggttgcgtcgtcggattgtgatatagaaggtaaagatggtaaacaatatgaatcggtattaatggtatcgatagatcaactactagattcgatgaaagaaataggttcgaattgtttaaataatgaatttaatttttttaaacgtcatatatgtgatgcgaataaagaaggtatgtttttatttcgagcggcgcgtaaattacgacaatttctaaaaatgaattcgacgggtgattttgatctacatctactaaaagtatcggaaggtacgacgatattattaaattgtacgggtcaagttaaaggtcgaaaaccggcggcgttaggtgaagcgcaaccgacgaaatcgctagaagaaaataaatcgttaaaagaacaaaaaaaactaaatgatttatgttttttaaaacgtctactacaagaaataaaaacgtgttggaataaaatactaatgggtacgaaagaacat

SEQ ID NO: 14748 - DNA, 531 bp, synthetic construct
  misc_feature 1..531: note = source = /note="Description of Artificial Sequence: Synthetic coding sequence"
  source 1..531: mol_type = other DNA
atgtttcatgtgtcatttagatatatcttcggtctcccaccgctgattctggtgttgctgcctgttgcctccagtgattgtgacatcgagggtaaggacgggaagcagtacgagtcagtgttgatggtttcaatcgaccagttgctggatagcatgaaggagattgggagtaattgtctgaacaatgagtttaattttttcaaaagacatatatgcgacgccaataaggagggcatgttcctgtttcgagctgcaagaaaactgagacaattcctgaagatgaattctacaggcgactttgacctgcatttgctgaaagtgtccgaggggaccacaatactgctcaactgtaccgggcaggtgaaggggaggaagcccgccgcactgggagaagctcagccaaccaaatccctcgaagagaataagagcctcaaggagcagaaaaaattgaacgatttgtgtttcctgaaaagactgctccaggaaattaagacttgttggaataagatcctgatgggcactaaagagcat

SEQ ID NO: 14749 - DNA, 531 bp, synthetic construct
  misc_feature 1..531: note = source = /note="Description of Artificial Sequence: Synthetic coding sequence"
  source 1..531: mol_type = other DNA
atgtttcatgttagtttccggtatatttttggccttcctccccttatcttagttcttctgccggtggcgtcaagtgactgtgatattgaaggaaaagatggcaaacaatacgagtcagttctgatggtttcgattgatcaactgttagactccatgaaagagattggcagtaattgcctgaataacgaattcaactttttcaaaaggcatatttgtgatgcaaataaagaggggatgtttttgtttagagcggcaagaaagcttcgacaatttttgaaaatgaactcaacaggcgactttgatcttcaccttctgaaggtctccgaaggaacaacaattttattaaactgtacaggccaggttaagggaaggaaaccagccgcactgggagaagcacagccgactaagagcctggaagaaaacaagtcactcaaggaacaaaaaaaattgaatgacttatgttttcttaaacgcctgctgcaagaaatcaaaacatgttggaataagattctcatggggacaaaggaacac

SEQ ID NO: 14750 - DNA, 531 bp, synthetic construct
  misc_feature 1..531: note = source = /note="Description of Artificial Sequence: Synthetic coding sequence"
  source 1..531: mol_type = other DNA
atgttccacgtatcctttaggtacatctttggactgccaccgctgatcttagtcctgctgcccgtggctagcagcgactgtgatattgagggtaaggatggcaaacagtatgaaagcgtgctgatggtgtccatcgaccagctgctcgacagcatgaaggagattgggagtaattgtctgaacaacgagtttaacttcttcaagcggcatatctgcgacgccaacaaggagggaatgttcctttttcgggccgccagaaaactgcgacagttcctgaaaatgaatagtaccggagactttgacttacacctcctgaaggtctcagagggaacaacaattctgttgaactgcactgggcaggttaaaggacgcaagccagccgcattgggggaggcccagccgaccaagagcttggaggaaaacaaaagcctgaaggagcagaagaagcttaacgacctgtgtttcctcaaacggctactccaagagatcaaaacttgttggaacaagattctcatggggactaaagaacac

SEQ ID NO: 14751 - DNA, 531 bp, synthetic construct
  misc_feature 1..531: note = source = /note="Description of Artificial Sequence: Synthetic coding sequence"
  source 1..531: mol_type = other DNA
atgtttcatgtcagctttcgctacatttttggcctcccaccgctgattttggtgcttcttcctgtggcctcgagcgattgtgacattgaaggtaaggatggcaagcaatatgagtccgtccttatggtgtccattgatcagctgttggattcgatgaaggaaattggcagcaattgtctgaataacgaattcaactttttcaagcggcatatttgcgatgcgaataaggaaggtatgtttctttttcgcgcagcacgaaaactgagacaattcttgaaaatgaactccaccggggactttgacctgcaccttcttaaagtctccgaaggtaccaccattcttcttaactgtaccggacaggtgaagggccgtaaacctgccgctcttggggaagcacagccaaccaagagcctcgaggagaacaagtcgctgaaagaacagaagaagctcaatgatctgtgtttccttaagagactgcttcaggagataaagacttgttggaacaagattcttatgggtaccaaagagcac

SEQ ID NO: 14752 - DNA, 531 bp, synthetic construct
  misc_feature 1..531: note = source = /note="Description of Artificial Sequence: Synthetic coding sequence"
  source 1..531: mol_type = other DNA
atgttccacgtgtccttccgctacatcttcgggttgccgccgctgattttggtgctccttccagtggcctcctctgactgcgacattgaaggaaaggatggaaagcagtacgagtcggtcttgatggtatccatagaccaactgctcgatagcatgaaggaaatcgggagcaactgtttgaataacgaattcaacttcttcaaacggcacatttgcgacgcgaacaaggaaggtatgttcctgtttagagcggccaggaaactcagacagttcctcaagatgaactcgactggtgacttcgacctgcacctcctcaaggtttctgagggtactaccatcctccttaactgtaccgggcaggtgaaaggacgcaagcctgcagcactgggcgaagctcaaccaaccaagtcgctcgaggagaacaagtcacttaaagagcagaaaaagctgaatgatctgtgctttctcaaacgactgctgcaagaaatcaagacctgctggaataagatcctgatgggcacgaaggagcat

SEQ ID NO: 14753 - DNA, 531 bp, synthetic construct
  misc_feature 1..531: note = source = /note="Description of Artificial Sequence: Synthetic coding sequence"
  source 1..531: mol_type = other DNA
atgttccatgtctcgttccgctacatcttcgggctcccgccgctcatcctggtcctgttgccagtcgcgtcctccgattgcgacatcgaagggaaagatgggaagcagtacgaatcagtgctgatggtgtcaatcgaccagctgctggattcgatgaaggaaatcggctcgaactgtctgaacaacgagtttaacttctttaaacggcatatctgcgacgccaacaaggagggaatgtttttgttccgggcggcacgcaagctgagacaattcctgaagatgaactcgactggtgacttcgacctgcatctcctgaaagtctccgaagggactaccatcctgcttaactgcacggggcaggtcaagggccgcaaaccggccgctctgggagaggcccaaccgactaagtcccttgaggagaataagtctctgaaggagcaaaagaagttgaatgatttgtgcttcctcaaacgcctgttgcaggaaatcaagacttgctggaataagatcctgatgggaaccaaggaacac

SEQ ID NO: 14754 - DNA, 531 bp, synthetic construct
  misc_feature 1..531: note = source = /note="Description of Artificial Sequence: Synthetic coding sequence"
  source 1..531: mol_type = other DNA
atgttccatgtaagcttcagatacattttcgggctgccaccgctgattctggtcctgcttccagtggccagctccgattgcgatattgagggcaaagacggcaagcagtatgagtccgtgctaatggtcagcatcgatcaactgctggattcgatgaaagagatcggcagcaattgcctgaacaatgaattcaacttctttaaaaggcatatatgtgatgccaataaggagggaatgtttctgtttcgagcagcacgaaagctaaggcagtttctaaagatgaatagcacaggtgactttgacctgcaccttttaaaggtgagcgaaggcaccactatcctgttaaactgtactgggcaagtcaagggccgcaagcctgccgcgctgggagaggcacagcctactaagtccctggaggaaaataaatccctgaaggagcagaagaaactcaacgatctatgttttcttaagaggttgctccaagaaattaaaacctgttggaacaaaatacttatgggtactaaggagcac

SEQ ID NO: 14755 - DNA, 531 bp, synthetic construct
  misc_feature 1..531: note = source = /note="Description of Artificial Sequence: Synthetic coding sequence"
  source 1..531: mol_type = other DNA
atgtttcacgtgagcttccgttacatttttgggctcccccctctaattttggtcctgctcccagtcgcctccagtgattgcgatatagaggggaaggacgggaaacagtacgagagcgttttgatggtgagcatagaccagctgctagacagtatgaaggaaattggtagtaactgtctgaacaatgaatttaacttctttaagagacatatctgcgatgctaacaaggaaggaatgttcctgttccgggccgcgaggaaactccgtcagttcttgaagatgaattctacaggcgattttgatctgcacctactaaaagtgagcgagggtactacaatcttgctaaactgtaccggccaggtcaaaggacgaaaacccgccgccctgggggaggcacagccaactaaatctctggaggagaacaagtcactaaaagaacagaagaagcttaatgatctctgtttcctaaaacgcttgctccaagagatcaaaacctgctggaataagattctgatgggcaccaaagaacat

SEQ ID NO: 14756 - DNA, 531 bp, synthetic construct
  misc_feature 1..531: note = source = /note="Description of Artificial Sequence: Synthetic coding sequence"
  source 1..531: mol_type = other DNA
atgtttcacgtttcgtttagatacatttttggattgcctccacttattctcgtccttttgccggtggccagctcggactgcgacatcgagggtaaagatggcaagcagtacgagtcagtgcttatggtgtcaatagatcaactgctggatagtatgaaggaaattggatcgaactgccttaacaacgagtttaacttcttcaaaagacacatttgtgatgcaaacaaggaaggaatgtttctctttcgcgcagcccggaaacttcggcagttcctgaagatgaattcaaccggggattttgatctgcatctccttaaggtgtccgaaggaacgactattcttctgaactgcaccggtcaagtgaagggtcgcaaacctgctgccctgggcgaggcccaaccaaccaagtcgctcgaagagaacaagtcgctgaaagaacaaaagaagctgaacgatctctgttttctcaaaagactccttcaggagattaagacctgttggaacaaaattctcatgggtaccaaagagcat

SEQ ID NO: 14757 - DNA, 531 bp, synthetic construct
  misc_feature 1..531: note = source = /note="Description of Artificial Sequence: Synthetic coding sequence"
  source 1..531: mol_type = other DNA
atgttccacgttagtttcagatacatctttggacttcctccactaatcctcgtcttgttgcctgtggcaagttccgattgtgatatagaaggaaaggacggaaaacagtatgagtcagttcttatggtttctattgatcaacttttggactcaatgaaagaaataggaagtaattgcctaaacaatgagtttaattttttcaagagacatatatgcgatgctaataaagaaggaatgttcttgttcagggctgcacgtaaattaagacaattcctcaagatgaacagcaccggggactttgatttgcacctcttgaaggttagcgaaggtaccacgattcttctcaattgcaccgggcaggtgaagggtaggaaacctgccgctctgggagaagctcagccaactaaatcccttgaggagaacaagagcttgaaggaacaaaagaaattgaatgacctttgctttttgaagcggcttttgcaagaaatcaaaacatgttggaataaaatacttatgggtactaaggagcac

SEQ ID NO: 14758 - DNA, 531 bp, synthetic construct
  misc_feature 1..531: note = source = /note="Description of Artificial Sequence: Synthetic coding sequence"
  source 1..531: mol_type = other DNA
atgtttcacgttagtttcagatatatatttgggctacctcctctgatcctggtcctgctgcccgtcgcaagctccgattgcgatatagaaggtaaggacgggaaacagtacgagtctgtactgatggtcagcattgatcagctgctggattccatgaaggaaatcggaagtaactgtctcaacaacgaattcaactttttcaagcggcacatttgtgacgccaataaggaaggcatgtttctgttcagggccgctcgaaaactccgacagtttctgaagatgaactctaccggagatttcgacctccacctcctcaaagtgagtgagggcactaccatactccttaactgcactggccaggtgaaggggaggaaacctgccgctctgggagaggcccaaccaactaagagcctggaggaaaacaagtccctgaaagaacagaaaaaactgaacgacctgtgtttcctgaagcgcctgctgcaggagattaagacttgttggaataaaattctaatgggaacaaaggaacac

SEQ ID NO: 14759 - DNA, 531 bp, synthetic construct
  misc_feature 1..531: note = source = /note="Description of Artificial Sequence: Synthetic coding sequence"
  source 1..531: mol_type = other DNA
atgttccacgtgagttttagatacatctttggcctcccacccctgattctggtgttgctgcctgtggcatcatctgactgcgatatcgaaggcaaagacggaaaacagtatgaaagtgtcctgatggtgagcattgaccaattgctcgatagtatgaaagaaataggtagcaactgcctcaataatgaatttaatttttttaagaggcatatttgtgatgctaataaggagggcatgttccttttccgggctgccaggaagctgcggcaattcttgaagatgaatagcactggcgattttgaccttcacctgctcaaagtgagcgagggcaccactatcctgctcaactgcacagggcaggtgaagggtcgcaaaccagcagccttaggggaagcccaacctacaaagagcctcgaagagaataaatcccttaaggaacaaaaaaagcttaacgatctgtgttttctcaagaggcttttgcaggaaattaagacatgttggaacaaaatactgatgggaactaaagaacat

SEQ ID NO: 14760 - DNA, 531 bp, synthetic construct
  misc_feature 1..531: note = source = /note="Description of Artificial Sequence: Synthetic coding sequence"
  source 1..531: mol_type = other DNA
atgttccacgtgtccttccggtatattttcgggctgccccctttgatccttgtgttgctcccagtggcttccagtgactgcgacatcgagggtaaggacgggaagcagtatgagagcgtgcttatggtctctatcgatcagctgcttgactccatgaaagaaatcggttccaactgtcttaacaacgaatttaactttttcaagcgccatatttgtgatgcgaataaggagggcatgttcctgttccgcgcagcgagaaaactgcgtcagttcctgaagatgaactccacaggagacttcgacctgcacctgctcaaggtctctgaggggacgaccatcttgttgaattgcaccggtcaggtcaagggacgcaagcccgcggccctcggagaggcccagcccaccaagagcctggaagaaaataaatctttgaaggagcagaagaagttgaatgatttgtgctttctcaagcgcttgcttcaggagatcaagacctgttggaacaaaatcctgatgggcaccaaggaacat

SEQ ID NO: 14761 - DNA, 531 bp, synthetic construct
  misc_feature 1..531: note = source = /note="Description of Artificial Sequence: Synthetic coding sequence"
  source 1..531: mol_type = other DNA
atgttccatgtctcgttccgctacatcttcggcctgccaccgctgatcctcgtgctcctgccggtggcttcttcggattgcgatatagaagggaaagacgggaaacagtacgagtcagtcctcatggtaagcatcgaccaattgttggactctatgaaagaaattggatccaactgtcttaacaacgaattcaactttttcaaaagacacatctgcgatgctaataaggagggtatgtttctgttccgggctgcgaggaagttgaggcagtttctgaaaatgaatagcaccggcgatttcgatctccatcttctcaaggtttcggagggcactaccatcctgctcaactgcactggacaagtgaagggccggaagcccgcagccttgggggaggcccagccaactaagtccctggaagagaataagtcactcaaggaacagaagaagctgaacgacttgtgcttcctgaagagactgctccaagagatcaagacctgttggaacaagatcctgatgggaacgaaagagcac

SEQ ID NO: 14762 - DNA, 531 bp, synthetic construct
  misc_feature 1..531: note = source = /note="Description of Artificial Sequence: Synthetic coding sequence"
  source 1..531: mol_type = other DNA
atgttccacgtcagcttccgttacatattcggcctgccccctttgatcctcgtcttgcttccggtggcatcgtcagattgtgacatcgaaggaaaggatgggaagcagtacgagagcgtgctgatggtttctatagatcagttgctcgacagcatgaaggaaattggcagcaactgtctgaacaatgaattcaacttctttaaacgccacatctgtgatgctaacaaggaaggcatgtttttatttcgggccgcaaggaagttgaggcagttcctgaaaatgaacagcacgggggacttcgatttgcatctgttgaaagtcagtgagggcaccaccatcctgctaaactgtacagggcaggtaaaggggcgcaagcctgcagccttaggtgaggcccaaccaaccaaatccctcgaggaaaacaaatccttaaaagagcaaaagaagctcaatgatttgtgctttttaaagcggctgctccaagagatcaagacctgctggaacaagatactcatggggaccaaggagcac

SEQ ID NO: 14763 - DNA, 531 bp, synthetic construct
  misc_feature 1..531: note = source = /note="Description of Artificial Sequence: Synthetic coding sequence"
  source 1..531: mol_type = other DNA
atgttccacgtctcatttagatacatattcgggctgccccccctcatcttggtgctcctgcctgtagcttcttccgactgcgatattgaggggaaggatggcaagcagtacgaatcagtgctcatggtgtccatcgaccagttgctggatagtatgaaagaaattggttctaattgcctcaataacgaattcaacttctttaagagacatatttgtgacgccaacaaagaggggatgttcttatttcgcgctgcacgcaaactgcgacagttcctcaagatgaatagcacaggcgactttgatcttcacctcttaaaggtctcggaaggaacaaccatcctgttgaattgcaccggccaggtgaaggggagaaaacctgctgccctcggcgaggctcagcctacaaagtctcttgaagaaaataaatctctcaaggaacaaaagaagctgaacgatctttgcttcctgaaacgccttctgcaggagatcaaaacatgctggaacaaaatcctgatggggacaaaagagcac

SEQ ID NO: 14764 - DNA, 531 bp, synthetic construct
  misc_feature 1..531: note = source = /note="Description of Artificial Sequence: Synthetic coding sequence"
  source 1..531: mol_type = other DNA
atgtttcatgtttcattccgatatattttcggtcttcctcctttaattttagttcttttgcctgtagcatcatctgattgtgatattgagggtaaagatggtaagcaatatgaaagtgttttaatggtaagtatcgatcaattacttgattcaatgaaagaaattggttctaattgtcttaataatgaatttaatttttttaagagacatatctgtgacgctaataaagaaggtatgtttttatttcgagcagcaagaaaacttagacaattcttaaaaatgaattcaacgggagatttcgatttgcatttattaaaagtttcagaaggaacaacaatacttttaaattgtacaggacaagttaaaggaagaaaaccagcagctcttggagaagcacaacctacaaagagtcttgaagaaaataaatcacttaaagagcaaaaaaagcttaatgatttgtgttttcttaaaagactattacaagaaattaagacatgttggaataaaattcttatgggtactaaggagcat

SEQ ID NO: 14765 - DNA, 531 bp, synthetic construct
  misc_feature 1..531: note = source = /note="Description of Artificial Sequence: Synthetic coding sequence"
  source 1..531: mol_type = other DNA
atgtttcatgttagtttccgctacatttttggcctgccgcccctgatcctagttctccttccagttgctagtagcgattgtgacatcgaaggaaaagatggcaaacaatacgagagtgttcttatggtatcaattgaccaacttctggattcaatgaaggagatcgggtcgaattgcctgaacaacgaattcaacttcttcaagcgacatatctgcgatgctaataaagaaggcatgttcttgtttcgtgctgcccgaaagctacgtcaattcttgaagatgaattccaccggcgatttcgatcttcatttgctcaaggtcagcgaagggaccaccattctactaaactgtacaggtcaggtcaaaggtcgaaagcccgctgcattgggcgaggcccagcctacaaagtctctcgaagaaaacaaaagtctaaaagagcaaaaaaagttgaacgatctctgtttcttgaagcgactgctccaagaaattaaaacttgctggaacaagatcctgatgggaacgaaggaacat

SEQ ID NO: 14766 - DNA, 531 bp, synthetic construct
  misc_feature 1..531: note = source = /note="Description of Artificial Sequence: Synthetic coding sequence"
  source 1..531: mol_type = other DNA
atgtttcacgtgagctttagatacatttttggactccccccacttatccttgtccttctgccagtggcctcgtcggactgtgatattgaaggaaaagatggcaagcagtacgaatcagtgcttatggtcagcattgatcagctgctggattcgatgaaggaaattggctccaattgtctgaataacgagtttaacttctttaaacggcatatctgcgatgccaataaggagggaatgtttctgtttcgcgcagcacggaagctccgccagttcctgaagatgaattcgactggtgattttgacctgcatctgttgaaggtgtccgagggaacgacgatccttctcaactgtactgggcaagttaaaggtcgcaaaccagcagccctgggcgaagcgcaacctactaagtcacttgaagagaacaaatcactgaaagaacagaaaaagttgaacgacctgtgttttctgaaacgacttcttcaggagattaagacttgttggaacaagatcttgatgggaaccaaggagcac

SEQ ID NO: 14767 - DNA, 531 bp, synthetic construct
  misc_feature 1..531: note = source = /note="Description of Artificial Sequence: Synthetic coding sequence"
  source 1..531: mol_type = other DNA
atgtttcatgtgtcgtttcggtacattttcggactgccaccactcattctggtgctgcttcctgtggcatcgtcagactgtgacatagaagggaaggatggaaagcaatacgaatccgtgctgatggtgtcaattgatcaactgctggacagcatgaaggagatcggatccaactgtcttaacaatgagtttaactttttcaagagacatatatgtgatgctaacaaggaagggatgttcctctttagggctgcgcgtaaactgagacaatttctcaaaatgaactcaactggggactttgatcttcatcttctcaaggtgtcggaaggcaccacgattcttctgaactgcaccggacaggtgaaaggacggaaacctgcagcactgggagaagcacaaccaactaagtcacttgaagagaacaagtccctgaaagaacagaagaaacttaatgacctttgttttctgaagcgactcttgcaggaaatcaagacctgttggaacaagatccttatgggaaccaaggaacac

SEQ ID NO: 14768 - DNA, 531 bp, synthetic construct
  misc_feature 1..531: note = source = /note="Description of Artificial Sequence: Synthetic coding sequence"
  source 1..531: mol_type = other DNA
atgtttcatgtctccttccggtacattttcgggctgccgccactcatcctcgttcttctgccagtggcatcttccgattgcgacatcgaaggaaaggacgggaagcagtacgaatcagtccttatggtgagcattgaccagctcctggattcgatgaaggagattggttccaactgcctgaataacgaattcaacttctttaagaggcatatttgtgatgcaaataaggagggaatgtttcttttcagagccgcgcggaaactgagacagtttctgaagatgaactccacgggagactttgacctgcatttgctgaaagtgagcgaaggaaccaccatcctccttaattgtactggacaagtgaaagggcggaagcctgccgcattgggggaggctcaaccaactaagagccttgaggaaaacaagtcgctgaaagaacaaaagaagctcaacgatctttgtttcttgaagagacttctgcaagagattaagacttgttggaacaagatacttatgggtaccaaggaacat

SEQ ID NO: 14769 - DNA, 531 bp, synthetic construct
  misc_feature 1..531: note = source = /note="Description of Artificial Sequence: Synthetic coding sequence"
  source 1..531: mol_type = other DNA
atgttccacgtgagtttccgctacatctttggcctgccaccactgattctggtcttactgccagtggccagttcggactgcgatatagaaggtaaggacgggaagcagtacgaatctgtgctgatggtgtcaattgaccaattgctcgattctatgaaagagatcgggagtaactgcctgaataatgagttcaactttttcaagcgacacatttgcgacgctaacaaggaaggaatgtttctgttccgggccgcccggaagttaagacagtttttgaaaatgaactctactggagatttcgatctccatctattgaaggtgagtgagggcacaacaatcctcctaaactgcaccgggcaagtcaagggccggaagccggctgccttgggagaggcgcagcccaccaagtcgttagaagagaacaaaagcctaaaggagcaaaagaaacttaacgacctctgctttctaaagcgcttactgcaagaaattaagacttgctggaataagattctgatgggaacaaaggagcac

SEQ ID NO: 14770 - DNA, 531 bp, synthetic construct
  misc_feature 1..531: note = source = /note="Description of Artificial Sequence: Synthetic coding sequence"
  source 1..531: mol_type = other DNA
atgttccatgtgagctttaggtacattttcggcctgccccccctcatactcgtgcttctgcccgtcgctagttctgattgtgacatcgagggtaaagacgggaaacagtatgaatccgtgttgatggtatcaatcgaccagctgcttgactcaatgaaggagatcggttcaaattgtctgaataatgagttcaacttcttcaaacgacatatttgcgacgcaaataaggaagggatgttcctgtttagagccgcaaggaagttgaggcagttcttgaaaatgaacagtacgggcgatttcgatctgcacttgctgaaagtctctgaaggcacaacgattctcctcaactgcaccgggcaggtgaagggccgcaaacccgcagccctcggcgaggcgcaaccgactaaatcacttgaagagaataaatctttgaaggaacaaaagaaactcaacgacctctgttttctgaagaggttgctgcaggagataaaaacttgttggaataagattctcatgggcacaaaagaacat

SEQ ID NO: 14771 - DNA, 531 bp, synthetic construct
  misc_feature 1..531: note = source = /note="Description of Artificial Sequence: Synthetic coding sequence"
  source 1..531: mol_type = other DNA
atgttccatgtctcgttccgttacattttcggcctgccaccgctcattctggtgctcttgccagtggcctcgagcgattgtgacatcgaaggcaaggatgggaagcagtacgaaagcgtgctgatggtgtcgatcgaccagttgctggattcgatgaaggaaatcggatctaattgcctcaacaacgagttcaatttcttcaaacggcatatctgcgatgccaataaggaaggaatgttcctcttcagagccgcgagaaagctgcggcaatttctcaagatgaattcgaccggagacttcgacctgcacctgcttaaagtgtcggagggtaccaccatcttgcttaactgcaccggacaggtgaagggacgcaaaccagctgcgctgggcgaagcgcagccgaccaagtcacttgaggaaaacaagtccctcaaggaacagaaaaaactgaacgacctgtgcttcctgaagcggctgctgcaggaaatcaagacgtgctggaacaagattctgatggggaccaaggagcac

SEQ ID NO: 14772 - DNA, 531 bp, synthetic construct
  misc_feature 1..531: note = source = /note="Description of Artificial Sequence: Synthetic coding sequence"
  source 1..531: mol_type = other DNA
atgtttcacgttagcttccgttacatctttggcctgcccccgctcatcctggtccttttgcctgtcgcgtcctcagattgtgacatcgagggcaaggatggcaagcagtacgagagtgtgctgatggtgagcatcgaccaactgctagactctatgaaggaaataggcagtaactgtcttaataatgagttcaacttctttaaaaggcacatctgtgatgctaataaggaaggtatgttcttatttagggccgccaggaaactccggcagttcctgaagatgaactccaccggagattttgacctgcacctcttgaaagttagcgaaggcaccacaattctcctgaactgtaccgggcaggttaaggggcgcaagcccgctgccctcggagaggctcagccaaccaagtccctagaagagaacaaatcgttgaaggagcaaaagaagcttaacgacttgtgctttctcaagagactgctccaggaaattaagacctgctggaataagattttaatgggcactaaagagcac

SEQ ID NO: 14773 - DNA, 531 bp, synthetic construct
  misc_feature 1..531: note = source = /note="Description of Artificial Sequence: Synthetic coding sequence"
  source 1..531: mol_type = other DNA
atgttccacgtaagtttcagatatatattcgggcttccacctctcatcttagtgctgctccctgtggcatcctctgattgcgacattgaagggaaagatgggaaacagtatgaatcagtgctgatggtttccatcgatcagctcctcgattcaatgaaagagatcggatccaattgtctgaacaacgaattcaacttcttcaaaaggcacatatgtgatgccaataaagaagggatgttcctctttcgagcggcacgcaaactgagacaattcctcaaaatgaattctactggggattttgacctgcatttactcaaggtgtctgaagggactacaatcctgctcaattgcacaggacaggttaaaggaagaaaacccgctgctctgggggaagcccagcctactaaatccctagaagagaacaaatcacttaaagagcagaaaaaactgaacgatctttgttttctgaaacggctgctgcaagaaattaaaacatgctggaataaaatcttgatgggaacaaaagaacac

SEQ ID NO: 14774 - DNA, 531 bp, synthetic construct
  misc_feature 1..531: note = source = /note="Description of Artificial Sequence: Synthetic coding sequence"
  source 1..531: mol_type = other DNA
atgtttcatgtcagtttcaggtacatattcggactgcctcccctcatactggtcttgcttccggttgctagttccgactgtgacatcgagggcaaggacgggaaacagtatgagtcggtgctcatggtgtcaatcgaccagctcctcgacagcatgaaggagatcggctctaactgtctgaacaacgagtttaacttcttcaaaaggcacatctgcgacgctaataaggaaggtatgtttctcttcagggccgcccgcaaactgaggcagtttctgaagatgaactcgactggagacttcgatctgcatctgctcaaagtgtcagaaggtactacaatcttactgaactgcacaggccaggtgaagggccgcaagcccgcagcgcttggagaggctcagcccacaaagagcctagaggagaataaatccctgaaagagcagaaaaaactcaatgacttgtgcttcctcaaacgtctgctccaagaaataaaaacatgttggaacaaaatacttatggggaccaaggaacac

SEQ ID NO: 14775 - DNA, 531 bp, synthetic construct
  misc_feature 1..531: note = source = /note="Description of Artificial Sequence: Synthetic coding sequence"
  source 1..531: mol_type = other DNA
atgtttcatgtgtctttcagatatatcttcggtctcccaccacttatcctggttctgctccccgtagcttccagcgattgcgatattgaaggaaaagacggtaaacaatacgagagcgtcctgatggtcagcattgatcagcttcttgatagtatgaaggagataggtagcaactgcttgaacaatgagttcaacttcttcaaaaggcatatctgtgatgccaacaaagagggtatgttcttgttccgtgctgccaggaagctgagacaattcctgaaaatgaatagtactggcgacttcgacttgcatcttctcaaggtaagcgaaggtaccacaatactgctgaattgtaccggccaggtaaaaggtcgcaaacccgccgccctgggagaagctcaacccaccaagtctttggaggagaataagtctctcaaggagcagaagaagctgaacgacctgtgctttttgaagaggttgttgcaggaaattaagacctgttggaataaaattctgatgggaactaaagagcac

SEQ ID NO: 14776 - DNA, 531 bp, synthetic construct
  misc_feature 1..531: note = source = /note="Description of Artificial Sequence: Synthetic coding sequence"
  source 1..531: mol_type = other DNA
atgttccatgtctcgtttagatatatatttggattacctcctctgatcctggtgctcttacctgtggcatcaagcgactgtgatattgaaggcaaggatgggaagcagtacgaatctgtcttaatggttagtattgatcaattgttagatagtatgaaagagataggttctaattgtctcaacaacgagttcaacttcttcaagcgtcatatctgcgacgctaacaaggaaggtatgttcctattccgtgccgcgcgtaaactgaggcaattcctcaaaatgaactctactggcgattttgacctccacctcctaaaggttagtgagggcactacaattcttctgaactgtacaggccaggtgaaggggcgtaagcccgcagcgctcggagaagcccagcctactaagtctttggaggagaacaagtcattaaaggagcagaagaaactgaacgacctttgttttctgaagaggctccttcaggagattaaaacgtgctggaataagattctgatgggaacaaaggagcac

SEQ ID NO: 14777 - DNA, 531 bp, synthetic construct
  misc_feature 1..531: note = source = /note="Description of Artificial Sequence: Synthetic coding sequence"
  source 1..531: mol_type = other DNA
atgttccatgtcagttttaggtacattttcggattgccacccctcatcctggtccttttaccagtggcaagctcagactgtgacatcgaaggtaaggatggcaaacaatatgagtccgtactcatggtgtctattgaccagttactggattcaatgaaagagataggtagcaactgtctgaacaacgagttcaacttcttcaaaaggcatatctgcgatgctaataaggagggcatgttcctgtttagagctgcccgcaagctcaggcaattcttaaaaatgaactctaccggcgacttcgatctgcacctgttgaaagtgtcagagggcaccactatactgctgaattgcactgggcaggtcaaagggcgcaagcccgcggctctgggcgaggctcagccaacaaagagtctcgaggaaaacaaatctcttaaagaacagaaaaagttgaatgacctgtgctttctaaaacggcttctccaggaaattaaaacatgttggaacaagatcctgatgggtacaaaggagcat

SEQ ID NO: 14778 - DNA, 531 bp, synthetic construct
  misc_feature 1..531: note = source = /note="Description of Artificial Sequence: Synthetic coding sequence"
  source 1..531: mol_type = other DNA
atgttccatgtgtcctttcgctacatcttcggtctgcctccgcttatcctggtgttgctgcctgtcgcctcctcggattgcgatatcgaaggcaaggacggaaagcaatacgaatcggtgctgatggtgtccattgatcagctgttggactccatgaaggagatcgggtcgaactgcctgaacaatgagttcaacttcttcaagaggcacatttgcgacgcgaataaggagggcatgttcctgtttcgcgccgcccggaagctgcgacaattcctgaaaatgaacagcacgggagacttcgaccttcaccttctgaaggtgtcggagggaaccacgatcctgctcaactgcactggacaagtcaagggccggaagccggcggcactcggggaggcccagccgaccaaatcattggaggaaaataagtcgcttaaggagcagaagaaactgaacgacctgtgcttcctcaagaggctgctgcaagaaattaagacttgctggaacaagatcctgatgggtaccaaagagcac

SEQ ID NO: 14779 - DNA, 531 bp, synthetic construct
  misc_feature 1..531: note = source = /note="Description of Artificial Sequence: Synthetic coding sequence"
  source 1..531: mol_type = other DNA
atgttccacgtttcctttcggtacatcttcgggctgccaccgctgattcttgtgctcctccctgtggcttcatcggactgcgacatcgagggaaaggacgggaagcagtacgaatcggtcctcatggtcagcatcgatcagctgctggacagcatgaaggaaatcggatccaattgcctgaacaacgagttcaacttttttaaaaggcatatctgtgatgccaataaggaaggaatgttcttgttccgcgccgcaagaaagctgcggcaattccttaagatgaactctacgggtgacttcgatctccacctgttgaaagtgtcagaaggaactaccatcctgcttaattgtaccggccaggtgaagggccgcaagccggccgcgctgggcgaggcgcaacccactaagtcgctggaggaaaacaagtccctcaaagagcagaagaagctgaacgatctgtgcttcctcaaaagactgttgcaagaaattaaaacctgctggaataagatcctcatgggaactaaagaacat

SEQ ID NO: 14780 - DNA, 531 bp, synthetic construct
  misc_feature 1..531: note = source = /note="Description of Artificial Sequence: Synthetic coding sequence"
  source 1..531: mol_type = other DNA
atgtttcatgtgagcttccgttacatatttggattgccgcctcttatccttgtgctcctcccagtggcatcgtcagactgtgatatcgaaggtaaggatggtaagcaatacgaatcagttctgatggtgagcattgatcagcttctggattccatgaaagaaattggttcgaattgtcttaacaacgaattcaacttcttcaagagacacatttgcgacgcaaacaaggaaggaatgttcctgtttagagctgccaggaagttgcggcaatttctgaagatgaactccaccggagattttgatttgcatcttcttaaggtgtccgaaggtacgaccattctgctgaactgtaccggtcaggtgaaaggaagaaagccagccgcacttggagaagcacagcctaccaagtcgctggaagagaataagtcccttaaagaacagaagaaactgaacgatctgtgttttcttaaaagattgcttcaagaaatcaagacctgttggaacaagattttgatgggtaccaaggagcat

SEQ ID NO: 14781 - DNA, 531 bp, synthetic construct
  misc_feature 1..531: note = source = /note="Description of Artificial Sequence: Synthetic coding sequence"
  source 1..531: mol_type = other DNA
atgttccatgtttccttcagatacattttcggtcttccccctcttattctggtcctgctgcccgtggcatctagtgactgcgatatcgaaggcaaagacggtaagcagtatgagtctgtattgatggtgtcaattgatcagctcctggattccatgaaagagataggttctaattgcctcaacaatgagtttaattttttcaaacgccatatttgtgacgcaaataaagaaggtatgttcttgttcagggccgcacggaagttgcggcaatttctgaagatgaacagtactggagactttgacttgcacttgctgaaagttagtgaaggcacaaccatcctgctgaactgcacggggcaagtgaaggggaggaaacccgctgctttgggagaggcccagcctacgaaatctttggaagagaacaagtctctcaaggagcagaagaagctgaatgacctgtgttttctcaagagattgcttcaggagatcaagacctgttggaacaagatccttatgggtacgaaggaacac

SEQ ID NO: 14782 - DNA, 531 bp, synthetic construct
  misc_feature 1..531: note = source = /note="Description of Artificial Sequence: Synthetic coding sequence"
  source 1..531: mol_type = other DNA
atgtttcatgtgagtttcagatatatttttggattaccacctctgatattggtgcttctcccagtagcttctagtgattgcgatatcgaagggaaggatggaaagcagtatgaatcagtgctcatggtctccatcgatcagttactagattctatgaaagaaatcgggtctaactgtctcaataatgaatttaatttcttcaaaagacatatctgtgatgccaataaagaagggatgtttttgtttagagcagcccggaaactccggcagtttctcaaaatgaatagtactggggatttcgatttacatctcctcaaagtgtcagaaggaactacaatcctgctgaactgcacagggcaggtgaaaggaaggaagccagctgccctgggggaagcacagcccactaaatccctcgaagagaacaaaagtcttaaagaacagaaaaaattgaatgatttatgtttcctgaaacggctccttcaggagattaaaacttgctggaataaaatacttatgggaacaaaagagcac

SEQ ID NO: 14783 - DNA, 531 bp, synthetic construct
  misc_feature 1..531: note = source = /note="Description of Artificial Sequence: Synthetic coding sequence"
  source 1..531: mol_type = other DNA
atgttccacgtgtcgttcagatatatttttggcctgccacccctgattctagtgttgctaccagtagcatcctcagactgtgatattgagggaaaggatggcaagcagtacgagagcgtgctgatggtgtcaatcgaccagttactggattctatgaaggaaatcggcagcaactgcctcaataatgaatttaactttttcaaacgtcacatctgcgacgcaaacaaggaaggaatgttccttttccgtgctgcacgaaaactcagacagttcctgaagatgaattccactggcgattttgatctgcacttgctgaaggtctctgagggaacaactatacttctgaattgcacgggtcaggtcaagggccggaaaccggctgcactcggggaggctcagcccactaagtccctggaagagaacaagtctctcaaggaacagaaaaaattgaatgatctttgtttcctcaaacgtctgctccaagaaatcaaaacgtgttggaacaagatactcatgggaacgaaagaacac

SEQ ID NO: 14784 - DNA, 531 bp, synthetic construct
  misc_feature 1..531: note = source = /note="Description of Artificial Sequence: Synthetic coding sequence"
  source 1..531: mol_type = other DNA
atgttccacgtgagttttaggtatatttttggattaccgcctctgattctggtcttactccccgtggcttctagcgattgtgacatcgagggtaaagacgggaaacagtacgaatcggtgctgatggttagtatcgatcaacttctagactcgatgaaggaaatcggcagcaactgtctgaacaatgagtttaacttcttcaaacgccacatatgtgacgcgaacaaagaaggaatgtttcttttcagggcagcccgaaagctccgccaatttctgaaaatgaactccaccggagactttgacctgcacttactgaaggtgtccgagggaacaactatcctactgaattgcactggccaagttaaaggacgcaaaccggctgcgctcggcgaggcccagcctacaaagtctttggaagaaaacaagagcttgaaggagcaaaaaaaactcaacgatctttgcttcctgaaacggctccttcaggagatcaagacatgctggaacaaaattctcatgggcactaaggagcac

SEQ ID NO: 14785 - DNA, 531 bp, synthetic construct
  misc_feature 1..531: note = source = /note="Description of Artificial Sequence: Synthetic coding sequence"
  source 1..531: mol_type = other DNA
atgtttcacgtcagcttcaggtatattttcggtttaccacccttgattctggtactgctgcctgttgcctcaagcgattgcgacatcgagggtaaagatggaaaacagtacgaaagcgtgctcatggtcagcatcgaccaattactggatagtatgaaagagatcggctctaactgcctgaacaatgagtttaactttttcaagaggcatatttgcgacgcaaacaaggaagggatgttccttttccgggccgcccgcaagttgcgacaatttctcaaaatgaactcaactggggattttgatctgcacctccttaaggtgagtgagggaactaccattcttttaaactgtacaggacaggtaaaagggcggaagccagccgcactcggggaagcccaaccgactaagagcctagaagagaataagagcctcaaagaacaaaagaagctgaacgatctgtgcttcctgaaacgcttgcttcaggagattaagacttgttggaacaagatactcatgggcacaaaggagcat

SEQ ID NO: 14786 - DNA, 531 bp, synthetic construct
  misc_feature 1..531: note = source = /note="Description of Artificial Sequence: Synthetic coding sequence"
  source 1..531: mol_type = other DNA
atgtttcatgtgagcttcaggtacatattcgggttgcctccactcatcctagtgctgctccctgtggcatctagtgactgcgatatagaaggtaaggatgggaagcagtacgaatccgtcctgatggtgtccatagaccagttgctagactctatgaaggaaattggctctaattgcttgaacaatgaatttaatttcttcaagagacacatatgcgatgcgaacaaagaagggatgtttctcttcagggcagcccgcaagctgcggcaattcttgaagatgaactccacaggcgatttcgacttgcacctcctgaaggtttccgagggcacaactatattactgaactgtaccggccaggttaaggggaggaaaccggctgccctgggcgaagcccagccaactaaatctctggaagagaacaagagcttgaaagaacagaaaaagctgaatgatctgtgcttcttaaagcgtcttttgcaagagataaagacatgttggaacaagatcttaatgggcacaaaggagcac

SEQ ID NO: 14787 - DNA, 531 bp, synthetic construct
  misc_feature 1..531: note = source = /note="Description of Artificial Sequence: Synthetic coding sequence"
  source 1..531: mol_type = other DNA
atgttccatgtgagcttccgctacatcttcggactcccaccactcatcttggtcctcctgccggtcgcgagctcagattgcgacatcgaaggcaaggacggaaaacagtacgagtcagtgctcatggtgtccatcgaccagctgctggactccatgaaagaaatcggatccaattgcttgaataacgagttcaacttcttcaagcgccacatctgcgacgccaacaaggaggggatgtttctgttcagggctgctagaaagctgcgccaattcctgaagatgaactcaactggagatttcgacctgcaccttctcaaagtgtctgaaggaaccactatcctgctcaactgcacgggccaggttaagggacggaaaccagccgccctgggtgaggctcagccgaccaagtcgctggaggagaacaagtcactgaaggaacagaaaaaacttaacgatctgtgtttcttgaagagacttcttcaagagatcaagacttgctggaataagatcctcatgggaaccaaagaacac

SEQ ID NO: 14788 - DNA, 531 bp, synthetic construct
  misc_feature 1..531: note = source = /note="Description of Artificial Sequence: Synthetic coding sequence"
  source 1..531: mol_type = other DNA
atgttccatgtgagctttcgctacatctttggactccccccactgatcctggtcctccttccggtcgcgtcatcggactgcgatatcgagggtaaagacggaaagcagtacgagtccgtgctcatggtcagtatcgaccaactgttggactctatgaaggagatcggttccaactgcctgaacaacgagttcaatttcttcaagcggcatatctgtgacgctaacaaagaaggcatgttcctcttccgcgcagcaagaaaattgcggcaatttctgaagatgaactcgactggagacttcgacctgcatctcctcaaggtgagcgaggggacgactatcctgctcaactgcaccgggcaggtgaagggacggaaacccgctgccctcggagaagcccaaccgaccaaatccctggaagaaaacaaatcactgaaggaacagaagaagttgaatgacctctgtttccttaagagactgctgcaagaaatcaagacctgctggaacaagatcctcatgggaaccaaggaacat

SEQ ID NO: 14789 - DNA, 531 bp, synthetic construct
  misc_feature 1..531: note = source = /note="Description of Artificial Sequence: Synthetic coding sequence"
  source 1..531: mol_type = other DNA
atgttccacgtgagcttcaggtacatctttggcctgcccccgctgatcctggtgcttctccctgtagcctccagcgactgcgacatcgaaggcaaggatggaaaacagtacgaatcagtgctgatggtttcgatcgaccagctgctcgacagcatgaaggagattggctccaactgtctgaacaatgagtttaactttttcaaacggcatatatgtgatgcgaacaaagagggtatgttcctgttccgggctgctagaaagctgcgacaattcctgaagatgaatagcactggcgatttcgacctgcatttgcttaaggtgtccgaaggaactacgatcctgctgaattgcaccgggcaggtgaagggcagaaaaccagccgcactcggagaagctcagccgactaagagcctggaggagaacaagtctctcaaggaacagaagaaactgaatgacttgtgcttcctgaagcgccttctgcaagaaatcaagacctgttggaacaagatcctcatgggtaccaaagaacac

SEQ ID NO: 14790 - DNA, 531 bp, synthetic construct
  misc_feature 1..531: note = source = /note="Description of Artificial Sequence: Synthetic coding sequence"
  source 1..531: mol_type = other DNA
atgttccatgtgagcttccgctacattttcggactgccacctcttatcctcgtgctgctgcctgtggcctctagcgattgtgatatcgagggcaaggatggcaaacagtacgaaagcgtattgatggttagcatcgaccaacttcttgacagcatgaaggagatcgggagcaactgcttgaacaacgaatttaacttcttcaaaaggcacatttgcgatgctaacaaagaaggaatgtttctttttagagctgctagaaagctgcggcagtttctgaaaatgaactcaacaggcgacttcgaccttcacctgctgaaggtgagcgagggcaccactatcctgctgaattgcactggacaggtgaaggggagaaaacctgcagctctgggagaagcccagcccaccaagtctctcgaggagaacaagtcgctcaaggaacagaagaagctgaatgacctctgctttctgaagaggctgctgcaggaaatcaagacctgctggaataaaatccttatgggaacaaaagaacat

SEQ ID NO: 14791 - DNA, 531 bp, synthetic construct
  misc_feature 1..531: note = source = /note="Description of Artificial Sequence: Synthetic coding sequence"
  source 1..531: mol_type = other DNA
atgttccatgtctcctttagatacatctttggactcccacctcttatacttgtcctgctgcccgtagccagtagcgactgtgatattgaaggtaaagacggcaagcaatacgagagcgttctgatggtctcaattgaccagctcctcgactctatgaaggagatcggaagtaactgtctcaacaatgaatttaactttttcaaaaggcacatctgcgatgccaacaaggaaggaatgtttttgttcagggctgctaggaaactgagacaattcttgaaaatgaacagtaccggagacttcgacctccacctgcttaaagtcagcgagggcacaacaatcctgctgaattgtaccggacaagttaaaggacgcaaacccgctgcgctgggcgaggcgcagcccactaagtccctggaagagaacaagtcccttaaggagcaaaagaagctcaacgacctctgttttcttaagagactcctgcaagagatcaagacatgctggaacaaaatcctcatgggcactaaggagcat

SEQ ID NO: 14792 - DNA, 531 bp, synthetic construct
  misc_feature 1..531: note = source = /note="Description of Artificial Sequence: Synthetic coding sequence"
  source 1..531: mol_type = other DNA
atgtttcacgtgtcttttagatatatatttgggctcccaccacttattctagtccttctgcctgtcgccagttccgattgcgatatcgagggcaaggatggaaaacaatatgagtcagtgctaatggtgagcatcgatcagctgctggacagcatgaaggagatagggtcaaactgcctgaacaatgagtttaacttttttaaaaggcacatctgtgatgccaacaaagagggaatgtttctttttagggcggctcgtaagcttagacaatttctaaagatgaatagcacaggggatttcgatctgcaccttctgaaggtgtccgaaggtacgacaatactgctgaactgtactggacaggtgaagggccgcaagccagctgctctgggagaggcccagcccaccaagagtctcgaggaaaataaaagtttaaaagagcagaaaaaactgaatgatttgtgcttcttaaagcgcctccttcaagaaatcaaaacctgttggaacaaaattttgatggggaccaaggagcac

SEQ ID NO: 14793 - DNA, 531 bp, synthetic construct
  misc_feature 1..531: note = source = /note="Description of Artificial Sequence: Synthetic coding sequence"
  source 1..531: mol_type = other DNA
atgtttcacgtctcctttaggtacatcttcgggttgcccccattgatccttgtgcttttaccggttgcaagctcggactgcgacatagagggtaaggacggaaaacagtacgaatctgtactaatggtgagtatagatcaattgttagacagtatgaaagaaatcgggagtaattgcctcaacaacgaattcaactttttcaaacgacatatctgcgacgccaataaggagggaatgtttctgtttagggcagcacgcaaattaagacagtttctaaagatgaattccacgggtgatttcgatctccacctgctgaaggtatcagaagggacaaccatcctcctcaattgtaccgggcaggttaaagggcgtaagcccgccgcccttggggaggcacagccaacaaagtcattggaggagaacaaaagtttgaaggaacagaaaaaactcaacgatctatgctttctgaaacgactgctacaggagataaaaacctgttggaacaagatccttatgggcactaaggaacat

SEQ ID NO: 14794 - DNA, 531 bp, synthetic construct
  misc_feature 1..531: note = source = /note="Description of Artificial Sequence: Synthetic coding sequence"
  source 1..531: mol_type = other DNA
atgttccacgtctcctttaggtatatctttggactgccgccactaattctggttctgttgccagttgcaagttccgactgcgacattgaggggaaggatggcaaacagtacgaaagcgttttgatggtgtcgatcgatcaattgctcgattccatgaaggagatcgggagcaattgccttaataatgagtttaacttcttcaagaggcacatctgtgatgccaataaagagggcatgttcctgttcagagccgctcgtaaattgcggcagttcctcaagatgaactctactggggacttcgacttacaccttctgaaggtgagcgagggaacgaccatcttgctgaattgtacaggccaggtaaaaggtcgtaaacctgcagccttgggtgaggcacaacctactaaatccctggaggagaataagagcctgaaggaacagaagaagcttaacgatttatgtttcctgaagcggctactacaggagattaagacatgctggaacaaaatcctaatgggaactaaggagcac

SEQ ID NO: 14795 - DNA, 531 bp, synthetic construct
  misc_feature 1..531: note = source = /note="Description of Artificial Sequence: Synthetic coding sequence"
  source 1..531: mol_type = other DNA
atgttccacgtttcctttcggtacatcttcggcctgccccctctcatcctagtacttctcccagttgcctccagcgactgcgacatcgagggaaaagatggcaaacagtatgaatctgtgctcatggtgtccatcgaccagctgctagattccatgaaggaaatcggcagtaactgtctcaacaacgaattcaacttttttaagcggcatatttgcgacgccaataaagaagggatgtttttatttagggcggcaagaaaactgcgacagtttcttaagatgaatagcactggcgatttcgacttgcacttgttgaaggtgagcgaagggacgacaatcctcctaaattgcaccggtcaggtcaagggtcgtaaacccgcggcacttggcgaggcccagccaacaaagtccctggaggagaataagagcttaaaggagcagaaaaaactgaatgatctttgtttccttaagcggctgctgcaggagattaaaacttgttggaacaagatcctcatgggcaccaaagagcac

SEQ ID NO: 14796 - DNA, 531 bp, synthetic construct
  misc_feature 1..531: note = source = /note="Description of Artificial Sequence: Synthetic coding sequence"
  source 1..531: mol_type = other DNA
atgttccacgtgtcattccgttacatatttggacttcctcctctcattctcgtccttctcccagtggcatccagcgattgtgacattgagggaaaggacggaaaacaatacgaaagcgtgctgatggtgtcgattgatcagctgctggattccatgaaggagattggatcgaactgtttgaataatgagttcaatttctttaagcgtcatatatgtgatgcaaacaaagaaggtatgtttctgtttagagcagctagaaagttgcgacagttcctgaagatgaacagcaccggtgacttcgacctccatcttttgaaagtgtccgaaggaactactatcctgctgaactgtacgggtcaagtgaaaggacgtaagcctgccgcgctcggggaggcacaacctaccaagtcgcttgaggagaacaagtcactgaaggagcagaagaagctgaacgatctgtgttttctcaagaggcttctgcaagaaatcaaaacctgctggaacaaaatccttatgggaactaaagaacat

SEQ ID NO: 14797 - DNA, 531 bp, synthetic construct
  misc_feature 1..531: note = source = /note="Description of Artificial Sequence: Synthetic coding sequence"
  source 1..531: mol_type = other DNA
atgtttcatgtgtccttcaggtacatttttgggcttcctccgctcattttggtgctgcttcccgtcgcatcgtccgattgtgacatagaaggaaaagatggcaagcaatacgaatctgtgctgatggtttcaattgatcagcttctggactccatgaaggagataggttccaattgtctgaacaacgagtttaacttcttcaagagacacatttgtgacgctaacaaagaagggatgtttctttttagggcagcaaggaaacttcgccagtttcttaagatgaattcgactggcgattttgatcttcacctgctgaaggtgtccgagggaaccactattctgctgaactgtaccggtcaagtgaaaggcagaaagccagctgcccttggagaagcacaacccaccaagtcccttgaggagaacaagagcctcaaggaacaaaagaagctgaacgacctctgttttctgaagcgtttgctccaagaaatcaagacttgttggaacaaaattctgatgggcactaaagaacac

SEQ ID NO: 14798 - DNA, 531 bp, synthetic construct
  misc_feature 1..531: note = source = /note="Description of Artificial Sequence: Synthetic coding sequence"
  source 1..531: mol_type = other DNA
atgttccatgtgtcgtttaggtacatctttgggctcccaccgctcattctcgtcctgcttccagtggcgtcctcagattgcgacattgaagggaaagacggcaagcagtacgaatcggttctcatggtcagtatcgatcaactgctggatagcatgaaggagatcgggtcaaactgcctgaataatgaattcaatttctttaagcgacacatctgtgatgcgaacaaagaggggatgttcttgttccgcgccgcacggaaactgaggcaattcttgaagatgaactcgactggagactttgatctgcacctcctgaaggtcagcgaaggaaccaccatcctgctgaattgtaccggtcaagtgaagggaaggaagccggcagcactgggagaagctcagcctaccaagtctctggaagagaataagagcttgaaggagcagaagaaactcaatgatctctgcttcctcaagcgccttctccaggagatcaaaacgtgctggaacaagatcctgatgggtaccaaggaacat

SEQ ID NO: 14799 - DNA, 531 bp, synthetic construct; identical to SEQ ID NO: 14793
  misc_feature 1..531: note = source = /note="Description of Artificial Sequence: Synthetic coding sequence"
  source 1..531: mol_type = other DNA

SEQ ID NO: 14800 - DNA, 531 bp, synthetic construct
  misc_feature 1..531: note = source = /note="Description of Artificial Sequence: Synthetic coding sequence"
  source 1..531: mol_type = other DNA
atgttccatgtcagctttaggtacatttttgggctcccacctctgattttagttctgttaccagttgccagcagcgactgcgatatcgaaggcaaggatggaaagcaatatgaatcagtgctgatggtgtcaattgaccagttgttggatagcatgaaagaaatcggcagcaattgtctgaacaacgaatttaacttctttaaacgacacatctgtgatgctaacaaagaaggcatgttcctgtttagggccgcacgcaagctccggcaattcctgaagatgaactcaacgggagacttcgatttacacttgttgaaagtctcagaaggcacaactatccttctgaattgcacagggcaagtgaaaggtagaaaaccagccgcactgggagaggctcagccaaccaagtccctggaagaaaacaaatcactgaaggagcagaaaaaattgaacgacttatgctttctcaagcgcctgcttcaagagataaagacctgttggaacaaaattctgatggggacaaaggaacat

SEQ ID NO: 14801 - DNA, 531 bp, synthetic construct
  misc_feature 1..531: note = source = /note="Description of Artificial Sequence: Synthetic coding sequence"
  source 1..531: mol_type = other DNA
atgttccacgtgagcttccggtacatctttggactgccgccactgattctggtcctgctccctgtggcaagctcagactgtgacatcgaggggaaggatgggaaacagtacgaatcggtgctcatggtcagcatagatcagttgctggactccatgaaagaaattggatcaaattgcctgaacaacgagtttaacttcttcaaacgccacatttgcgacgccaataaggaaggcatgttcttgttcagagccgcaaggaagctcagacagttccttaagatgaatagcactggggactttgatctccaccttctgaaagtgtcggaaggaacgaccatcttgcttaattgtactggccaggtgaagggacggaagccggcggccctcggagaagctcaacccaccaagtccctcgaagagaataagagcctcaaagagcaaaagaagttgaacgacctgtgcttccttaagcggctgctgcaggaaatcaagacctgctggaataagatcctcatgggaactaaagagcac

SEQ ID NO: 14802 - DNA, 531 bp, synthetic construct
  misc_feature 1..531: note = source = /note="Description of Artificial Sequence: Synthetic coding sequence"
  source 1..531: mol_type = other DNA
atgtttcatgtctcattccgatatatcttcggattacctcccttgattctggttctgctgcctgtggctagctctgattgtgacatcgagggcaaggatggcaagcaatacgaatccgtactcatggtctctatcgatcaactgctcgactctatgaaggagataggcagcaactgcctgaataacgagttcaacttttttaagcggcacatttgcgacgcaaataaagaaggtatgttcctcttcagagcagcacggaaactgcggcagtttctgaaaatgaatagcacaggcgacttcgacttgcatttgctgaaggtcagcgagggaaccaccattctcttgaattgcaccggccaagttaagggccgtaaacccgccgccctgggagaggcccaaccaaccaagtccctagaggagaacaagtcgctcaaggagcagaaaaagctaaatgacctatgcttcctcaaaaggctgcttcaggagataaagacatgctggaataagatcctgatgggcacgaaggaacac

SEQ ID NO: 14803 - DNA, 531 bp, synthetic construct
  misc_feature 1..531: note = source = /note="Description of Artificial Sequence: Synthetic coding sequence"
  source 1..531: mol_type = other DNA
atgtttcacgtatcattcagatatatattcggtctccccccactgatcctagtgctgctacccgtagcaagctccgactgtgatatagagggcaaggacggaaagcaatatgaaagtgtcctcatggtgagcatcgaccagctgttggactccatgaaggagattggtagcaattgtctcaataatgagtttaatttttttaagaggcatatatgcgacgcgaacaaggaaggaatgttccttttcagggctgcaaggaaactgcggcagtttctgaagatgaattccacaggtgacttcgatctccatttactgaaagtttccgaggggaccaccattctgctgaattgcaccgggcaggtgaagggccgcaaaccagcagctctgggcgaagcccagccaactaagtcgttggaagaaaacaaatcattaaaagaacagaagaagctgaacgacttatgttttctcaaaagactgctccaagagatcaagacatgctggaacaaaatcttgatgggaaccaaagagcat

SEQ ID NO: 14804 - DNA, 531 bp, synthetic construct
  misc_feature 1..531: note = source = /note="Description of Artificial Sequence: Synthetic coding sequence"
  source 1..531: mol_type = other DNA
atgtttcacgtctcgttccgttacatctttggacttccgccattgatccttgtgctcctcccggtcgcttcgagcgactgtgacattgaaggcaaggacggaaagcagtacgaatcagtgctgatggtgtcgattgatcaactgctggactcgatgaaagaaatagggtccaattgccttaacaacgaattcaatttcttcaagcggcacatctgtgatgccaataaagagggaatgttcctcttccgcgcagcacggaaattgcggcagtttctgaagatgaacagcaccggagacttcgaccttcatctccttaaggtgagcgagggtactactattctcctcaattgcaccggacaggtgaaaggaagaaagccagccgctctgggtgaagcccagccgaccaaatccctcgaggaaaacaagagcctgaaggaacagaagaaactgaatgacttgtgtttcctgaagcggcttctccaagagatcaagacttgctggaacaaaatcctgatgggaaccaaggaacac

SEQ ID NO: 14805 - DNA, 531 bp, synthetic construct
  misc_feature 1..531: note = source = /note="Description of Artificial Sequence: Synthetic coding sequence"
  source 1..531: mol_type = other DNA
atgtttcacgtgtcctttagatacatcttcggactgccacctctcatcctggtgctcctgccggtggcctcgtcggactgcgacatcgagggcaaggatggaaaacaatacgaatccgtcctgatggtgagcatcgaccagctcctggattcgatgaaggagatcggtagcaattgtctgaacaatgagttcaatttcttcaagagacatatctgtgacgccaataaggagggtatgttcctcttccgagcagctcggaagttgcgccagttcctgaagatgaactcgaccggcgacttcgacttgcaccttctgaaagtctcagagggaaccaccattctgctgaactgcaccggacaagtgaagggtcgaaaaccagccgccctgggcgaggcacaacctactaagtccctcgaagaaaacaagagcctgaaggagcaaaagaagttgaatgacctgtgctttctgaagcgcctgctgcaggagatcaaaacctgctggaacaagatcctcatgggaacgaaagagcac

SEQ ID NO: 14806 - DNA, 531 bp, synthetic construct
  misc_feature 1..531: note = source = /note="Description of Artificial Sequence: Synthetic coding sequence"
  source 1..531: mol_type = other DNA
atgttccacgtgtcgttccgctacattttcgggctcccgccactcatccttgtgctgctgccggtggcgagcagcgattgcgacattgaagggaaagacggcaagcagtacgaatcggtcttgatggtgtcaatcgaccaactcctcgattctatgaaggaaatcggctcaaactgcctgaacaacgagtttaacttctttaagaggcacatctgcgacgctaacaaagagggaatgttccttttcagggccgctcggaaacttcggcaatttctcaaaatgaactcgactggcgatttcgatctgcacctgctcaaggtgagcgagggaactaccatcctgctgaactgtacgggacaggtgaaaggtcggaaacctgccgccctcggagaggcgcaacccactaaaagtttggaagaaaacaaatcgttgaaggagcaaaagaaactcaacgatctgtgcttcctgaagcgcctcctgcaggaaatcaagacctgctggaataagatcctgatgggtaccaaggaacat

SEQ ID NO: 14807 - DNA, 531 bp, synthetic construct
  misc_feature 1..531: note = source = /note="Description of Artificial Sequence: Synthetic coding sequence"
  source 1..531: mol_type = other DNA
atgttccatgtgagtttccgatacatcttcggtttacctcctcttattttggttctgttgcccgtggcatcaagcgactgtgatatagaggggaaagatggcaagcagtacgaatccgtcctaatggtgtctatcgaccagctcctcgattccatgaaggagatcggctctaactgtctgaacaatgagtttaacttctttaaacgacatatatgcgatgcaaacaaggaaggaatgttcttgttccgagctgccaggaagttacgacaattcctgaagatgaactccactggcgacttcgacctgcatctgttgaaagtgtccgagggaacaactatccttttaaattgcacggggcaggtaaaaggcagaaagcctgcggccctgggagaggcccagcctacaaaaagtctagaggaaaacaaatccctgaaggagcagaagaagctcaacgacctgtgttttttgaaaaggctcctgcaggagatcaagacgtgttggaataaaatcctgatgggcacgaaagagcat

SEQ ID NO: 14808 - DNA, 531 bp, synthetic construct
  misc_feature 1..531: note = source = /note="Description of Artificial Sequence: Synthetic coding sequence"
  source 1..531: mol_type = other DNA
atgttccacgtgtcctttcgctacatctttggactgcctccactcattctggtgctgctcccggtcgcctcctcggactgcgatatcgaggggaaagacggaaaacagtacgaatcggtcctgatggtatcgatcgaccagctcctggacagcatgaaggaaatcggttcaaattgcctcaataacgagttcaactttttcaagaggcacatttgcgatgcaaacaaggaaggaatgttcctcttccgtgctgcgagaaagctccggcagttcctcaagatgaattccaccggcgacttcgatctgcatcttcttaaagtctctgagggaaccactatcttgctgaactgcactggccaggtcaagggccggaaaccggcggcgctgggcgaagcccaaccaaccaaaagcctggaggaaaacaaatcacttaaagaacaaaagaagctgaacgacctctgtttcttgaaacggctcctgcaggaaatcaaaacctgctggaacaaaatcctcatgggtaccaaggagcat

SEQ ID NO: 14809 - DNA, 531 bp, synthetic construct
  misc_feature 1..531: note = source = /note="Description of Artificial Sequence: Synthetic coding sequence"
  source 1..531: mol_type = other DNA
atgtttcacgtaagttttcggtatatcttcggattgcccccactgatcctcgttttgctgcctgtggccagcagcgactgtgacatcgaaggtaaggacggcaagcaatacgagtctgtcctcatggtttccattgaccaacttctggattctatgaaggagattggatctaattgcttgaacaacgaatttaacttctttaaacgacatatctgtgacgccaacaaagagggcatgttcctgttccgcgccgccaggaagttgagacagttcctgaaaatgaactcaactggcgatttcgatttgcacctcctgaaggtctctgaaggcactacaattcttctgaactgcaccggtcaggtgaaaggacggaagcccgccgcactgggcgaagcccagccgaccaagagtctggaggagaacaaaagcctgaaagagcagaaaaagctgaacgatctgtgctttcttaagaggttgctgcaagagattaagacctgttggaataagatcctgatggggactaaagagcac

SEQ ID NO: 14810 - DNA, 531 bp, synthetic construct
  misc_feature 1..531: note = source = /note="Description of Artificial Sequence: Synthetic coding sequence"
  source 1..531: mol_type = other DNA
atgtttcacgtgagcttcagatatatctttggtctgcctcctctgatcttagtccttttacctgtggcatcatccgactgtgacatagaagggaaggacggcaaacaatacgaatccgtactgatggtgagcattgaccagctgctcgactcgatgaaagagatcgggtcaaactgccttaacaacgaattcaacttttttaagcgccacatttgcgatgccaataaggagggcatgttcctatttcgggctgcacgaaagttgcggcagtttttgaaaatgaactcaactggtgattttgatctgcatctcttgaaggtgtctgagggcacgacaatcctactgaattgtacaggacaggtgaagggccggaagccggcagcactgggggaggcacaacccaccaagtccctggaagagaacaagtccctcaaggagcagaagaagctcaacgatttgtgtttccttaaaagactacttcaggagatcaaaacctgctggaacaaaattctgatgggtaccaaagagcat

SEQ ID NO: 14811 - DNA, 531 bp, synthetic construct
  misc_feature 1..531: note = source = /note="Description of Artificial Sequence: Synthetic coding sequence"
  source 1..531: mol_type = other DNA
atgttccatgtttcctttaggtatattttcggactacctccgttgatacttgtgttgctaccagtcgcttcctcagattgtgacatcgaaggaaaagatgggaaacagtatgagagtgtccttatggtgagtatagatcaactgttggatagtatgaaggagatcggatccaactgtctaaataacgagtttaatttctttaagagacatatatgcgacgcaaacaaggagggaatgtttctattcagagccgctcgtaagctaagacaatttcttaaaatgaactcaactggcgactttgatttgcatctccttaaggtgtctgagggcacaacaattcttcttaactgtacaggacaagtaaagggacgtaaaccagctgcattaggtgaggcccaaccaacaaaaagcctagaggaaaacaaatcacttaaagagcagaagaagcttaatgacttgtgcttcctaaagagactgttgcaagaaatcaagacgtgttggaacaagattcttatgggaactaaggagcac

SEQ ID NO: 14812 - DNA, 531 bp, synthetic construct
  misc_feature 1..531: note = source = /note="Description of Artificial Sequence: Synthetic coding sequence"
  source 1..531: mol_type = other DNA
atgtttcatgtgagtttcaggtacatattcggactgccgcccctgatcctggtgttactgcctgtcgcatcctccgactgcgatatagaaggcaaggatgggaaacagtacgagagcgtgctcatggtgagcatcgaccagctcctcgattcgatgaaggaaataggctccaactgcctcaacaatgaatttaatttcttcaagcgccacatctgcgatgccaacaaggaaggtatgttcctttttcgggccgcgagaaagctgaggcagtttctgaaaatgaactcaaccggggacttcgatctccatctgttaaaggtttccgaggggacaactatcctcttaaactgtacgggacaagtgaaagggcgaaaacctgcagccctgggggaggcccagcctacaaaatccttagaagagaacaaaagtctaaaagaacagaagaagttgaatgatctgtgtttcctgaagagactcctgcaggagataaaaacttgctggaataagattctgatgggaaccaaagagcat

SEQ ID NO: 14813 - DNA, 531 bp, synthetic construct
  misc_feature 1..531: note = source = /note="Description of Artificial Sequence: Synthetic coding sequence"
  source 1..531: mol_type = other DNA
atgttccacgtctctttccggtatatcttcggactcccaccacttatcctggtccttttgcctgtggcttctagcgattgcgatatcgaagggaaggatggaaagcagtatgaatcagttctgatggtttcaattgatcaactcctcgatagcatgaaggagatcggctccaattgcttaaacaatgaatttaacttcttcaaacgccatatctgtgatgctaacaaagaaggcatgttcttgttcagagcggccaggaagttgaggcaattccttaaaatgaacagcacaggtgattttgatcttcatttgctgaaggtgtcggagggcacgactatcctgctcaactgtaccggacaggttaagggacgtaagcctgcagctctcggcgaagcccaaccaactaagagcctggaggagaacaaatcactgaaggagcaaaaaaaattgaacgacttgtgcttcctcaagcggctcctccaggagataaagacatgctggaacaagatcctgatgggcactaaagaacac

SEQ ID NO: 14814 - DNA, 531 bp, synthetic construct
  misc_feature 1..531: note = source = /note="Description of Artificial Sequence: Synthetic coding sequence"
  source 1..531: mol_type = other DNA
atgttccatgtgtccttcagatacatcttcggccttccgccactgatcctggtcttgctccctgtggccagctcggactgtgacatcgaagggaaggatggtaagcagtacgaatcagtgctcatggtgtccattgatcaacttctggattctatgaaggagatcggatcaaactgtctgaacaacgaattcaattttttcaagcgccatatctgcgatgcgaacaaggaggggatgtttctgttccgcgcggcccggaaactgaggcagtttctcaaaatgaattccactggcgacttcgacctccacctgttgaaggtttcggagggaaccaccatcctgttgaactgcacgggacaggtcaagggacggaagcccgccgctctgggcgaggcacaaccgactaaaagcctcgaagaaaataaatcgctcaaagaacagaagaagctgaatgacctgtgcttccttaagagactgctgcaagaaattaagacttgctggaacaagatcctcatgggaaccaaagagcac

SEQ ID NO: 14815 - DNA, 531 bp, synthetic construct
  misc_feature 1..531: note = source = /note="Description of Artificial Sequence: Synthetic coding sequence"
  source 1..531: mol_type = other DNA
atgtttcatgttagctttagatacatatttggcctgcccccgctgattttggtgttgttaccagttgctagtagcgactgtgacatcgaaggtaaagacggcaagcaatatgagagcgtcttaatggtatcaatcgatcagttgctggattctatgaaagagatcggatctaactgcttgaacaacgagtttaattttttcaaaagacatatctgcgatgccaataaagagggaatgttcctatttcgggcagcaagaaagctgcgacagttcctgaagatgaattccactggcgatttcgatctgcacttgttgaaggtgtccgagggcaccacaatcctgctgaactgcacagggcaggtgaaaggccggaagccagctgccctgggagaagcccagcccacaaagtcacttgaggaaaacaagtcgctgaaggagcagaaaaagctcaacgacctatgcttcttgaaacgtctcctgcaggagatcaagacatgctggaataaaattcttatggggacgaaggagcac

SEQ ID NO: 14816 - DNA, 531 bp, synthetic construct
  misc_feature 1..531: note = source = /note="Description of Artificial Sequence: Synthetic coding sequence"
  source 1..531: mol_type = other DNA
atgttccatgtgtcatttagatacatcttcgggcttccgcccctgatcctcgtcctgcttcctgtcgctagttcagactgtgatattgaggggaaggacggaaaacaatacgaatccgtcctgatggtctccatcgaccagctcctggatagcatgaaagaaatcgggtccaattgcctcaacaatgagtttaatttctttaagaggcatatatgcgatgctaataaagaggggatgttcctgtttagggcagctagaaaattgaggcagttccttaagatgaattccacgggggactttgatttgcatctcttaaaagtttccgagggcacaacaattcttttaaattgtacagggcaagttaaagggcgaaagccggccgctttgggcgaggcacagcccacaaagtctctggaagaaaataagtccttaaaggagcaaaaaaagctgaacgacctgtgtttcctgaagcgactcctacaggagataaaaacatgctggaacaagatcctcatggggactaaagagcac

SEQ ID NO: 14817 - DNA, 531 bp, synthetic construct
  misc_feature 1..531: note = source = /note="Description of Artificial Sequence: Synthetic coding sequence"
  source 1..531: mol_type = other DNA
atgtttcacgtttccttccgatatatctttggccttcctccactcattctggttctgcttcctgtggcaagctctgactgcgatattgaaggaaaggacggcaaacagtacgaatcggtgcttatggtgtccattgatcaactgctggattcaatgaaagagattggctccaactgcctgaataatgagttcaacttcttcaagcgccatatttgcgacgctaacaaagagggcatgtttttgtttagagccgctaggaaattaagacagtttctaaaaatgaacagcactggtgatttcgatctgcacctcctgaaggtatcggaaggcactaccattctactgaattgtacaggtcaggtaaaagggcggaagccagctgcgttgggagaggctcagccaactaagtctcttgaggagaataagtcactgaaagaacaaaagaagcttaatgacctgtgtttcctgaagagacttctccaggagatcaagacctgctggaacaaaatcctgatgggtactaaggagcac

SEQ ID NO: 14818 - DNA, 531 bp, synthetic construct
  misc_feature 1..531: note = source = /note="Description of Artificial Sequence: Synthetic coding sequence"
  source 1..531: mol_type = other DNA
atgttccatgtgtctttccgctatatattcgggctgcctccgttgattctggttctgctccccgttgcgtcatctgattgtgacatagaggggaaagacgggaagcagtacgagtcagtgctgatggtatcgattgatcagctcctggactccatgaaggagataggctccaactgcctcaacaatgaattcaacttttttaaaagacacatctgtgatgccaacaaagagggaatgttcttgttcagggccgcgagaaagttgagacagttcctgaagatgaactctaccggggatttcgaccttcacctgctcaaagtttccgagggcaccacgatcctgctgaattgcaccggacaggttaaaggccgtaagcccgccgcactgggggaagcgcaacctacgaagagcctggaggagaataagtcattgaaggaacagaagaagctgaacgatctgtgtttcttaaagcgactgttgcaggaaattaagacttgctggaacaaaatcctaatgggcacgaaagaacac

SEQ ID NO: 14819 - DNA, 531 bp, synthetic construct
  misc_feature 1..531: note = source = /note="Description of Artificial Sequence: Synthetic coding sequence"
  source 1..531: mol_type = other DNA
atgttccacgtgtctttcaggtacatttttggattgcctccattgatcctggtactccttccagttgcatcttcagactgcgacattgaaggcaaggacggcaagcagtacgaaagcgtgctgatggtctctattgatcagttgcttgacagcatgaaagagataggctccaattgtttgaacaacgaatttaatttcttcaagcgtcacatatgcgacgctaacaaagagggcatgttcttgttcagggctgctcgtaagctgaggcagttccttaagatgaactcaactggagactttgatctccatcttctgaaagttagtgaaggtaccactatcttgctgaattgtactggtcaggttaagggacgcaagcctgcagcactcggagaggcccaaccaacaaagagtctcgaggaaaacaaaagccttaaagaacaaaagaaactcaacgatttgtgctttctgaaacgccttctgcaggaaatcaaaacctgctggaataaaatcctgatgggaactaaggagcat

SEQ ID NO: 14820 - DNA, 531 bp, synthetic construct
  misc_feature 1..531: note = source = /note="Description of Artificial Sequence: Synthetic coding sequence"
  source 1..531: mol_type = other DNA
atgttccatgtcagttttaggtacatttttgggctcccgcctctgatactggtccttctgccagttgcttcttctgattgcgatattgagggcaaagacggcaaacagtatgaatccgtgctcatggtcagtatagatcagctgctggattcgatgaaggaaatcggctcaaactgcctcaataacgagttcaatttcttcaaaaggcacatttgcgacgccaataaagaaggaatgtttttattcagggccgcaaggaagcttcgccagttcttgaagatgaatagtaccggtgacttcgatcttcacctcctgaaggtctccgagggcacaacaattttactgaattgcaccgggcaggttaagggtagaaaacctgcggccctgggggaagctcagcctacaaagagccttgaagaaaacaaatctctgaaggagcagaagaagttgaacgatttatgcttccttaagaggttgctgcaggaaatcaagacatgttggaacaaaattctgatgggaaccaaagaacat

SEQ ID NO: 14821 - DNA, 531 bp, synthetic construct
  misc_feature 1..531: note = source = /note="Description of Artificial Sequence: Synthetic coding sequence"
  source 1..531: mol_type = other DNA
atgttccacgtctcgttccgctacatttttggtttgcccccccttatcctggtccttttgcccgtcgcatccagtgattgcgatatcgagggcaaggacggcaagcagtacgaaagcgtgttgatggtaagcattgaccagctcctcgatagcatgaaggagatcggctccaactgtctgaacaacgagtttaacttcttcaaacgccatatctgcgacgcaaacaaggagggcatgttccttttccgtgcggcccgcaagctccgccagttccttaaaatgaattccaccggcgactttgacctgcacctgctcaaggtcagtgagggtacaacaattctacttaattgcactggacaggtgaagggccgcaagccagctgccctgggcgaagcccagccgacgaagagcctagaagagaacaagtccttgaaagagcagaaaaagctcaacgatttgtgtttcctcaagcggttgctgcaggagatcaagacttgctggaacaagatccttatgggcacaaaggagcac

SEQ ID NO: 14822 - DNA, 531 bp, synthetic construct
  misc_feature 1..531: note = source = /note="Description of Artificial Sequence: Synthetic coding sequence"
  source 1..531: mol_type = other DNA
atgtttcatgtatcgtttcgttatatatttggtttaccgccgctaatattagtattattaccggttgcgtcgtcggattgtgatatagaaggtaaagatggtaaacaatatgaatcggttttaatggtatcgatagatcaactactagattcgatgaaagaaataggttcgaattgtctaaataatgaatttaatttttttaaacgacatatatgtgatgcgaataaagaaggtatgtttttatttcgagcggcgcgaaaattacgacaatttctaaaaatgaattcgacgggtgattttgatttacatctactaaaagtatcggaaggtacgacgatactattaaattgtacgggtcaagttaaaggtcgtaaaccggcggcgctaggtgaagcgcaaccgacgaaatcgttagaagaaaataaatcgctaaaagaacaaaaaaaattaaatgatttatgttttctaaaacgattactacaagaaataaaaacgtgttggaataaaatactaatgggtacgaaagaacat

SEQ ID NO: 14823 - DNA, 531 bp, synthetic construct
  misc_feature 1..531: note = source = /note="Description of Artificial Sequence: Synthetic coding sequence"
  source 1..531: mol_type = other DNA
atgtttcatgtgtccttcagatacatcttcggtctacctccacttatcttggtgcttctccctgtcgcatcgagcgattgcgatatagagggcaaagatggcaagcaatacgagtcagtattgatggtttcaatcgatcaactattagactccatgaaagaaattggatccaactgtttgaacaacgaatttaacttcttcaaaaggcacatctgcgacgccaacaaggaggggatgttcttgtttagggctgcccgcaagctacgccagtttctgaaaatgaactccactggagatttcgatctacacctcctcaaggtaagcgagggcactactatcctgctcaattgtaccggccaggtcaagggccgaaagccagccgcactcggcgaggcccaaccaaccaagtcccttgaagagaataagtctctcaaggaacaaaagaaactgaacgatttgtgcttccttaagcgtctcctgcaggagattaagacctgttggaacaaaatattgatgggcacgaaagaacat

SEQ ID NO: 14824 - DNA, 531 bp, synthetic construct
  misc_feature 1..531: note = source = /note="Description of Artificial Sequence: Synthetic coding sequence"
  source 1..531: mol_type = other DNA
atgtttcatgtttcatttagatatatttttggtttacctccattaattcttgttttgcttccagttgcatcttcagattgtgatattgagggaaaagatggaaagcaatatgaatcagttcttatggtttcaattgatcaacttttagattcaatgaaggaaattggaagtaattgtttaaataatgaattcaattttttcaaaagacatatttgtgatgcaaataaagaaggaatgttcctttttagagctgcaaggaaacttcgtcaatttcttaaaatgaattctactggagattttgatttacatcttttaaaagtttctgaaggaactacaattttacttaactgtacaggacaagtaaaaggaagaaaacctgctgctttaggagaagcacaaccaacaaaatctttagaagagaataagagtttaaaggaacaaaagaagttaaatgatttatgttttttaaaaagattacttcaagaaattaaaacctgttggaataaaattcttatgggaacaaaggaacat

SEQ ID NO: 14825 - DNA, 531 bp, synthetic construct
  misc_feature 1..531: note = source = /note="Description of Artificial Sequence: Synthetic coding sequence"
  source 1..531: mol_type = other DNA
atgtttcacgttagctttcgttacatttttgggttgcctcctctgatattagtgctgttacccgtcgcctccagcgattgtgacattgagggtaaggatggaaaacagtacgaaagtgtgctgatggtgtcaattgatcagctcctggatagcatgaaggagatcgggtccaattgtctgaacaatgaattcaacttcttcaaaaggcacatttgtgatgccaataaagaaggaatgttcctctttcgggccgcacgaaaactccgccagtttctgaagatgaactccaccggcgactttgatctccaccttttgaaggtcagcgagggcaccacaatcctcctcaactgtacagggcaggtgaaggggcgcaagcccgctgccttaggtgaagcacagcccactaaaagtttagaagagaataagagcctgaaagaacagaaaaaactcaatgatttgtgctttctcaagaggctcttgcaggaaatcaaaacatgttggaacaagatcctgatggggaccaaagagcac

SEQ ID NO: 14826 - DNA, 531 bp, synthetic construct
  misc_feature 1..531: note = source = /note="Description of Artificial Sequence: Synthetic coding sequence"
  source 1..531: mol_type = other DNA
atgttccacgtttccttccggtacatctttggcctccctcccctcattctggtgttactgccagttgccagttctgattgcgatattgaaggaaaagacggcaaacaatacgagagtgtgcttatggtaagtattgatcaactcttggacagcatgaaggagatcggaagcaactgtttaaacaatgagttcaacttcttcaaacgccatatctgcgacgcaaacaaggaaggcatgtttctgtttagagcggctcgaaaactccggcagtttctgaagatgaattccacaggcgacttcgatctgcacctgcttaaggtgagtgaagggactaccattctgctgaactgcacaggccaggttaaggggcggaaaccagctgctctcggcgaagctcagccaacaaagagccttgaggagaataagtccttgaaagaacagaagaagctcaatgacttgtgcttcctcaaacggctgttgcaagagattaagacatgttggaataagattctgatggggaccaaggagcac

SEQ ID NO: 14827 - DNA, 531 bp, synthetic construct
  misc_feature 1..531: note = source = /note="Description of Artificial Sequence: Synthetic coding sequence"
  source 1..531: mol_type = other DNA
atgttccatgtttcatttaggtacatttttggtctgccgcctctgatcctggtgttgctgccggtggctagctctgactgcgatattgagggcaaggacggcaaacaatacgaatccgttttgatggtgagtatcgatcaactgcttgacagcatgaaggagataggctcgaattgcctgaataacgagtttaacttttttaagaggcacatttgtgacgcaaataaagaagggatgtttctgtttcgtgcggcgcggaagttgcgacagtttctgaagatgaatagcaccggcgacttcgatcttcatttactgaaggtttctgagggtaccactattctgctgaattgcactggtcaggttaaaggcaggaagccggctgcactgggggaggcgcagccgaccaagtcactggaggagaacaagtctctgaaagagcagaaaaaactcaacgacctgtgttttctgaagcgcctgctccaagaaattaaaacctgctggaacaagatactgatgggtaccaaggagcac

SEQ ID NO: 14828 - DNA, 531 bp, synthetic construct
  misc_feature 1..531: note = source = /note="Description of Artificial Sequence: Synthetic coding sequence"
  source 1..531: mol_type = other DNA
atgttccacgtttccttcaggtacatctttggccttccacctttgatcctcgtgctgctgccagttgcttctagtgattgtgatatcgagggtaaggacggcaaacagtacgagtctgttctgatggtatcaatcgaccagctcttggactccatgaaagagattggtagtaactgccttaacaatgagttcaatttctttaagagacacatttgcgatgcgaacaaagagggaatgttcctgttccgcgccgcccgcaaactgcgccaattcctgaagatgaactctacgggtgatttcgacctccatctgttgaaggtttctgaaggcaccaccatacttctgaactgcacgggtcaagtcaagggtcgcaagccggcagccctcggtgaggcccaacccaccaagagtctggaggaaaacaaatcccttaaggaacagaaaaagctcaacgacctttgtttccttaaaaggctgctgcaagagatcaaaacttgttggaacaagattctcatgggtaccaaagagcac

SEQ ID NO: 14829 - DNA, 531 bp, synthetic construct
  misc_feature 1..531: note = source = /note="Description of Artificial Sequence: Synthetic coding sequence"
  source 1..531: mol_type = other DNA
atgtttcatgtctcttttcggtatatcttcgggctcccccctctgatcctcgtcctgcttcctgtcgctagctctgattgcgatattgagggaaaggacggaaaacaatacgagagcgtgctgatggtgtctatcgaccagctgctggactccatgaaggaaattgggagtaattgtcttaataatgaatttaatttttttaaacgccatatttgtgatgctaacaaagagggtatgtttctctttcgcgccgccagaaagctgcgccagttcctgaaaatgaatagtaccggagacttcgatctgcacctgttgaaagtttctgaaggaacaacgatcctcctgaattgcaccgggcaggtgaaggggaggaagcccgcagctctcggagaggcgcagccaaccaagagcctggaagaaaataagagcctgaaagagcagaagaagctgaatgacctctgcttcctgaaacgacttcttcaggagattaagacttgctggaacaagatactgatgggtactaaagaacat

SEQ ID NO: 14830 - DNA, 531 bp, synthetic construct
  misc_feature 1..531: note = source = /note="Description of Artificial Sequence: Synthetic coding sequence"
  source 1..531: mol_type = other DNA
atgtttcacgtgtcatttcggtacatcttcggtctgccacctttaattttagtgcttctcccggttgcaagctcagactgcgacattgaagggaaggatggcaagcagtatgagtctgtgctgatggtctccatcgatcagttgcttgattccatgaaggagatcggctcgaactgtcttaacaatgagttcaatttctttaaacgccacatctgtgatgcaaacaaggagggcatgtttctgtttcgagcagccagaaagctccggcagtttttgaaaatgaactccacaggtgactttgacctccacctgcttaaggtgagtgaaggcactaccattctgcttaattgcaccggacaggtgaaggggcggaagccagcagcactgggggaggctcagccaacaaagtctctcgaggagaacaagtctctcaaggaacagaagaagttaaatgacctctgcttcctgaaaaggctcttacaagagataaagacatgttggaataaaattctcatggggactaaagagcac

SEQ ID NO: 14831 - DNA, 531 bp, synthetic construct
  misc_feature 1..531: note = source = /note="Description of Artificial Sequence: Synthetic coding sequence"
  source 1..531: mol_type = other DNA
atgtttcacgtgagtttccgttacattttcgggctgccacctctaatcctagtgctgctgcctgttgcttcctcagactgcgacatcgagggtaaagacggcaagcaatatgagagcgtactgatggtgagcatcgaccagttgctagacagcatgaaagaaatagggtctaattgtctgaataacgaatttaacttcttcaaacgacatatctgtgatgccaataaggagggcatgtttctctttcgtgctgctcggaagttgcgacaatttctgaaaatgaactcaacaggcgactttgaccttcaccttctcaaagttagcgagggcacgaccattctgttgaactgcacgggccaagtaaaagggaggaaaccagccgctttgggggaagcccagccaaccaagtctttggaggagaacaagagtctgaaagagcagaagaagctgaacgacctttgcttcctgaagagactcctgcaggagatcaaaacttgttggaacaagattctgatgggcacaaaggagcac

SEQ ID NO: 14832 - DNA, 531 bp, synthetic construct
  misc_feature 1..531: note = source = /note="Description of Artificial Sequence: Synthetic coding sequence"
  source 1..531: mol_type = other DNA
atgttccatgttagcttcagatatattttcggcctacctccattaatcctcgtgctgctgcctgtggcttcgtcggattgtgatatcgaagggaaagacggcaaacaatatgaaagcgtgctgatggtgagtattgaccagctgctggattccatgaaagagattggttctaattgtttgaacaacgaatttaatttcttcaaacggcatatttgtgacgccaacaaggaaggcatgttcctgttcagagcggctcgaaagctgcgtcagtttctgaagatgaactccaccggagatttcgacctgcacctgttgaaagtttcagagggcaccacgattctgcttaactgtaccggccaggtcaaagggagaaaaccagccgcactgggagaagcccagcctacaaaaagcttggaggagaacaaatctctgaaggagcaaaagaaattgaatgatctgtgctttctgaagaggctcttgcaagagataaagacatgttggaataagattcttatgggcacgaaggaacac

SEQ ID NO: 14833 - DNA, 531 bp, synthetic construct
  misc_feature 1..531: note = source = /note="Description of Artificial Sequence: Synthetic coding sequence"
  source 1..531: mol_type = other DNA
atgtttcacgtgagctttagatatatcttcggtcttcccccactgatcctcgtgctgctgcccgtcgcatcaagcgattgtgacatagagggaaaagatggaaaacaatacgaatctgttctgatggtgagcatcgaccagcttcttgacagtatgaaggagattggatcaaactgcctgaacaatgagttcaacttctttaaaagacacatctgtgacgcaaacaaggagggcatgttcttgtttagagccgcccgaaaactgcggcaatttcttaaaatgaacagtacgggagatttcgatctccatctactgaaggtgagcgagggaactactatcctgttgaactgtaccggccaggttaaaggcaggaaacccgccgctctgggcgaggctcaaccgacaaaatcacttgaggagaataagtccctgaaagaacaaaaaaagctgaacgatctgtgcttcctcaaaaggttgttacaggagatcaagacctgctggaacaaaatcctcatgggaactaaggagcac

SEQ ID NO: 14834 - DNA, 531 bp, synthetic construct
  misc_feature 1..531: note = source = /note="Description of Artificial Sequence: Synthetic coding sequence"
  source 1..531: mol_type = other DNA
atgttccacgtgagctttaggtacatatttggtctgcctcctttgatcctcgtactcctccctgtggcctcatcggactgcgacatcgaaggaaaggacggtaaacagtacgagagtgtcctgatggtgtctattgaccagctgctggactcaatgaaggagattggatctaactgtttaaacaacgagtttaacttcttcaaacgccacatttgtgacgctaataaagaggggatgttcctgtttagggcagcgaggaagctgcgacagtttctgaagatgaactccaccggcgactttgacctccacctgttaaaagtaagcgaaggcacgacaatcctgctcaactgcacaggacaggtgaaggggagaaagcctgcggccctcggcgaagcacaacccaccaaatcgctggaggagaataaatcgctcaaagagcaaaagaagttgaatgatctgtgctttctgaagcgtctgctgcaggagatcaaaacatgttggaataaaatcctgatgggtacaaaagagcac

SEQ ID NO: 14835 - DNA, 531 bp, synthetic construct
  misc_feature 1..531: note = source = /note="Description of Artificial Sequence: Synthetic coding sequence"
  source 1..531: mol_type = other DNA
atgtttcacgtcagttttcggtacatctttgggctacccccactgatcctcgttctgctgcccgtcgcatccagtgactgtgatatcgaagggaaagatggaaagcagtatgaatctgttttaatggtgagtatcgatcaactcctcgattcgatgaaagaaatagggtccaactgcctaaacaacgaattcaatttctttaaacggcacatatgcgatgctaacaaagaagggatgttcctgtttagggcagccagaaaattacggcagtttctgaaaatgaatagtacaggggattttgacttgcatctgttgaaagtctccgaagggacaacaatcttactaaattgtacaggacaggtcaaaggaaggaaacccgctgctcttggggaagcacagcccacgaaatccctggaggaaaacaaatcattaaaagagcagaaaaaactcaacgatctgtgctttctgaaacgactcctccaggaaatcaaaacttgttggaataaaattttaatgggaacaaaagagcac

SEQ ID NO: 14836 - DNA, 531 bp, synthetic construct
  misc_feature 1..531: note = source = /note="Description of Artificial Sequence: Synthetic coding sequence"
  source 1..531: mol_type = other DNA
atgttccacgtgtcatttaggtatattttcggccttcctccgctcatcctggtgttgctcccagtggcctcatccgattgtgatatagagggtaaggatggcaaacagtatgagtctgtcctcatggtgtcaatcgatcagctgctggattcaatgaaggagatcgggtctaattgtctcaataacgagtttaatttctttaaaagacacatttgcgatgctaataaagagggaatgttcctcttccgagcggcccggaagctaagacaattcctaaaaatgaatagcacgggggatttcgaccttcatctacttaaggtcagcgaaggcaccacaattcttctgaactgcacaggccaggtcaagggtcggaaaccagctgctttgggtgaggcccaacccacaaagagcctcgaagaaaataagtctctcaaggaacagaagaagctaaacgacctctgcttcctgaagagacttctccaggagatcaagacctgctggaacaaaatactcatgggcacgaaggagcac

SEQ ID NO: 14837 - DNA, 531 bp, synthetic construct
  misc_feature 1..531: note = source = /note="Description of Artificial Sequence: Synthetic coding sequence"
  source 1..531: mol_type = other DNA
atgtttcacgtgagcttcaggtatattttcggattgcccccactaatcctggttcttctaccagtggccagtagcgattgtgatattgaaggcaaggacggtaagcagtatgaaagtgtgctcatggtctcaatcgaccagcttcttgatagcatgaaggaaatcgggtctaactgtctgaacaacgaattcaacttcttcaagcgacatatctgcgatgctaacaaagaaggcatgtttctgtttagagccgctagaaaactgagacagtttctcaagatgaattccaccggcgactttgacttacacctgctgaaggtctctgaaggaacgaccattctgctgaactgtaccggccaagtaaagggcaggaagccagcagctctgggcgaagcacaaccaaccaaatcgctcgaggagaacaaatccctcaaagagcagaaaaaattgaatgacctgtgtttcctaaaaaggctgctgcaagaaatcaagacatgctggaataagatcctgatggggacaaaggagcac

SEQ ID NO: 14838 - DNA, 531 bp, synthetic construct
  misc_feature 1..531: note = source = /note="Description of Artificial Sequence: Synthetic coding sequence"
  source 1..531: mol_type = other DNA
atgtttcatgtctcatttagatatatttttggcctgccaccactaatcctggtgttgctaccggtggcatcaagtgactgtgacattgaagggaaggatggcaagcagtacgaatccgtcctgatggtgtcaatcgatcagttgcttgactctatgaaggagatcggatccaattgcctgaataacgagtttaacttttttaagagacacatttgcgacgctaataaggaagggatgtttctcttccgagctgcccggaaactcaggcagttcctgaagatgaattccacaggggacttcgacctacacttgctgaaggtatcagaagggacaaccatccttctgaattgtaccggccaggtgaagggtcgcaaacctgcagcactcggagaggcccagccaactaaaagcctggaagagaacaagtcccttaaggaacaaaagaaactcaatgatctctgcttccttaagcggctactacaggaaattaagacatgctggaataaaatcctgatgggcactaaggaacac

SEQ ID NO: 14839 - DNA, 531 bp, synthetic construct
  misc_feature 1..531: note = source = /note="Description of Artificial Sequence: Synthetic coding sequence"
  source 1..531: mol_type = other DNA
atgttccacgtctctttcagatatatattcggactcccaccactgatacttgtccttttgcccgtggcttccagcgactgcgacattgagggtaaggatgggaagcagtacgagtccgtgttgatggtgtcaatagatcagctgttagattccatgaaggagataggatccaattgcttgaataacgagttcaatttctttaaaagacacatctgtgatgcaaataaggaggggatgtttctcttccgggccgcaaggaaactgcgccagtttcttaagatgaacagtacaggagactttgatctgcacctcctgaaggttagtgagggcacgaccatattactcaactgcacagggcaagtaaaaggccgcaagcctgcagccctgggtgaggcacagccaacaaagagcctcgaagagaacaagagtctcaaagaacagaagaagctcaatgatctatgcttcctcaagagacttctccaggagatcaaaacatgttggaacaaaatcttgatgggaacaaaagaacac

SEQ ID NO: 14840 - DNA, 531 bp, synthetic construct
  misc_feature 1..531: note = source = /note="Description of Artificial Sequence: Synthetic coding sequence"
  source 1..531: mol_type = other DNA
atgtttcacgtctccttccgctacatattcggactgcctcccctgatattagttctcctgcctgttgcatctagcgactgcgacatcgagggtaaggacggaaaacagtacgagtccgtgctcatggttagcattgatcaattgttagactcaatgaaggaaatcggcagtaattgtctgaacaatgagttcaatttcttcaagcggcacatatgtgacgccaataaagagggtatgtttctgttccgggcagccaggaagctgcgtcagtttctaaaaatgaactctacaggagacttcgacctgcaccttctgaaggtgagcgaaggtactacaattctgttaaattgcacagggcaggtaaaaggcaggaagcctgcagccctaggagaggcacaacccaccaaaagcttagaggaaaacaagtcactgaaggagcagaagaagctgaacgacctttgttttttgaaacggctgctacaggagatcaagacatgctggaataagatactaatgggtactaaggaacat

SEQ ID NO: 14841 - DNA, 531 bp, synthetic construct
  misc_feature 1..531: note = source = /note="Description of Artificial Sequence: Synthetic coding sequence"
  source 1..531: mol_type = other DNA
atgttccatgtgtcctttcgatatatcttcggtctgcccccgttaattctagtgttgttgccagtggcctcatccgactgcgatattgaggggaaagacggaaaacagtatgagtccgttctgatggtctcgattgaccagttgttagacagcatgaaggaaataggcagcaattgtctaaataatgagttcaacttctttaaaagacatatctgtgatgccaataaggaaggcatgtttctctttagagccgccaggaagctacgacagttcctaaaaatgaactctactggtgacttcgacttgcaccttctcaaagtgtccgagggcactacaatactgcttaattgtactgggcaggttaaaggccgaaaaccagctgccctcggggaagcccagccaacgaagagcctcgaggagaacaagagccttaaggagcagaagaagttgaacgatctttgttttctaaaacgtcttctacaggagattaagacatgctggaacaagatactgatgggtaccaaagagcac

SEQ ID NO: 14842 - DNA, 531 bp, synthetic construct
  misc_feature 1..531: note = source = /note="Description of Artificial Sequence: Synthetic coding sequence"
  source 1..531: mol_type = other DNA
atgttccatgtatcatttcgatacatctttggactacctccattaatcctggtgcttttgccggtagcttctagcgattgtgacatcgagggaaaagacggaaaacagtatgagtcggtgcttatggtttcaattgaccaacttcttgattccatgaaagaaatcggctcaaattgcttaaacaacgaatttaatttttttaaacgccacatctgtgatgcgaataaagaaggaatgtttctgtttcgcgccgcccgcaaattgagacaatttctcaaaatgaacagtacaggagattttgacttacatcttttgaaagtttctgaggggaccacgattttgctgaattgtacgggccaggttaaagggcgcaaaccagctgcgcttggtgaagcacaaccgacaaaatcgcttgaggaaaataagagtctgaaggagcaaaaaaagttaaatgacctttgctttctaaaacgcctgcttcaagaaattaagacatgttggaacaaaatcttaatgggcacaaaggaacat

SEQ ID NO: 14843 - DNA, 531 bp, synthetic construct
  misc_feature 1..531: note = source = /note="Description of Artificial Sequence: Synthetic coding sequence"
  source 1..531: mol_type = other DNA
atgttccatgtttctttccgatacatattcggccttccacccttgatactagtgctcttgcctgtagcctctagtgactgtgatatcgaagggaaggacggcaaacagtacgaatcagtcctcatggtttctatcgaccagctgctcgactccatgaaagagatcggaagcaactgcctaaataatgaattcaacttcttcaaacgccacatctgcgacgcaaacaaggagggaatgttcctattccgcgccgcacggaagttaaggcagttcctgaaaatgaattcaaccggcgacttcgatttacatctcctaaaggttagcgaggggacgaccatattgctgaattgcactgggcaggtgaagggccggaaacccgctgccttgggcgaggcacaaccaacaaagagcctggaggagaataagtccctcaaggaacagaagaagctgaacgacctgtgcttcttaaaaaggctcctgcaggaaattaaaacctgttggaataagattctcatgggcaccaaggagcat

SEQ ID NO: 14844 - DNA, 531 bp, synthetic construct
  misc_feature 1..531: note = source = /note="Description of Artificial Sequence: Synthetic coding sequence"
  source 1..531: mol_type = other DNA
atgtttcatgtttcttttcggtatatcttcggactacctccactcatactagttctcctgccagtagcttcctcagattgtgatatagaagggaaagacgggaaacagtatgaatctgttctaatggtttcaatcgatcagctactggactcaatgaaagaaattgggagtaactgtctcaacaacgagttcaacttcttcaaaagacatatctgtgatgccaataaagaaggaatgtttttgttccgagctgcccggaagcttaggcagttcctgaaaatgaatagtacaggagactttgaccttcatcttctgaaggtcagtgaaggaactacaatcctgctaaactgcacaggacaggttaaagggaggaaacctgcggcattaggagaagcacagccaactaaaagtctcgaagagaataagagtttaaaagaacagaaaaaactgaacgatctgtgcttcctcaaaagactcctccaggaaattaaaacgtgttggaataaaattctaatgggaacaaaagagcat

SEQ ID NO: 14845 - DNA, 531 bp, synthetic construct
  misc_feature 1..531: note = source = /note="Description of Artificial Sequence: Synthetic coding sequence"
  source 1..531: mol_type = other DNA
atgttccatgttagttttcggtacatctttggtttgccccctctgatcttggtcctccttccagtcgcaagttctgattgcgacatagagggaaaggacggaaagcagtatgagtctgtcctgatggtgagcatagatcagctcctcgacagcatgaaggagatcggatccaactgcctcaacaatgaatttaattttttcaagcgccacatatgtgatgccaacaaggagggcatgtttcttttccgggctgctaggaaactgcgccagtttctgaagatgaactcaacaggagatttcgacctgcatcttctgaaggtctctgagggcaccacaatcttgttgaattgcaccggacaagtcaagggtagaaaacccgccgctctgggagaggctcagccaactaagagcctggaagagaacaagagcctgaaagaacagaagaagctgaatgatctctgcttcctcaaacgactgctgcaagagataaaaacctgttggaacaagattctcatggggactaaggagcat

SEQ ID NO: 14846 - DNA, 531 bp, synthetic construct
  misc_feature 1..531: note = source = /note="Description of Artificial Sequence: Synthetic coding sequence"
  source 1..531: mol_type = other DNA
atgttccatgtctctttccgatatattttcggactgccccccctgatcctcgtccttcttccggtcgcgagcagcgattgcgatattgagggtaaagatggtaagcaatatgagtcagtgcttatggtatctatcgatcagctgttagatagcatgaaagaaattgggtctaactgcctgaataatgaattcaatttctttaagcggcatatctgcgacgctaacaaagaggggatgtttctgttcagggctgctcggaaactcagacagttcctcaagatgaactcaactggggacttcgacctgcatctcctcaaggtgagcgagggcactaccatcctactgaattgcaccggccaggtgaaggggcgtaagcccgccgccctaggcgaagcccaacccacaaaatccttggaggaaaataaatctctcaaagaacagaaaaagctgaatgatttatgtttcctaaagcgcctcctccaggagataaaaacctgctggaacaagatcctgatgggaaccaaagaacat

SEQ ID NO: 14847 - DNA, 531 bp, synthetic construct
  misc_feature 1..531: note = source = /note="Description of Artificial Sequence: Synthetic coding sequence"
  source 1..531: mol_type = other DNA
atgtttcatgttagctttcggtacatcttcgggctgccaccactcatcctcgtgttgctgccagtagcctcatccgattgtgacatcgaaggaaaagacggcaaacaatacgaatctgtactcatggtttctattgatcaactcttggacagcatgaaggaaattggctccaactgcctgaataacgagttcaatttctttaagcggcatatctgcgacgctaataaggagggcatgtttcttttccgggccgccaggaaacttcgccaatttctcaagatgaactcgaccggcgactttgacctgcacctgcttaaagtgtcagagggcacaactattctcctcaactgcacaggacaggtgaagggtaggaagcccgccgccctgggcgaggcccagccaactaaatcacttgaggaaaataagagcctgaaagagcagaaaaagctcaatgacttgtgcttcttaaagagactcctacaggagatcaagacatgttggaataagattctgatgggcactaaggagcat

SEQ ID NO: 14848 - DNA, 531 bp, synthetic construct
  misc_feature 1..531: note = source = /note="Description of Artificial Sequence: Synthetic coding sequence"
  source 1..531: mol_type = other DNA
atgttccatgtctcattcaggtatattttcggattgccccccctcatccttgtactgttgccagtggcaagcagcgattgtgatatcgaggggaaggatggaaaacagtatgagtcagttcttatggtgagcatcgatcagctgctcgacagtatgaaggagattgggagtaattgtctgaacaacgagttcaacttttttaaaagacacatctgcgatgccaacaaggagggcatgtttttattccgagccgctcgcaagttaagacagttcctgaaaatgaactctactggcgacttcgatctccatcttctgaaggtttctgagggaaccactatactcctgaactgcacggggcaggttaagggtcggaaacctgctgcattgggggaagcacagcctaccaaatctctggaagagaataagtctctgaaggagcagaaaaagctgaacgatctgtgctttctgaagcgtctgctacaggagatcaaaacttgctggaacaagattctcatggggacgaaggaacac

SEQ ID NO: 14849 - DNA, 531 bp, synthetic construct
  misc_feature 1..531: note = source = /note="Description of Artificial Sequence: Synthetic coding sequence"
  source 1..531: mol_type = other DNA
atgtttcacgtttctttcaggtacatctttggattaccccccctaattctggtcctgcttccagtcgcgtcatctgactgcgatattgaaggaaaggacggaaaacagtacgaatccgtgctgatggtcagtatagatcagctgctggattcgatgaaagaaattgggagtaattgcttaaataatgagttcaatttttttaagcggcatatctgcgatgccaataaggagggcatgttcctgtttagggccgcgagaaaactgagacagtttttgaaaatgaactcaacaggcgatttcgacctgcacttattgaaggtctctgagggtaccactatccttctcaattgcacaggtcaagttaagggcaggaaaccagccgcattgggcgaagcacagccaactaagtctctggaggaaaacaagagcctcaaagagcagaaaaagttgaacgatctctgtttcttaaagaggctgttgcaagagataaagacatgctggaacaaaatattaatgggtacgaaggagcac

SEQ ID NO: 14850 - DNA, 531 bp, synthetic construct
  misc_feature 1..531: note = source = /note="Description of Artificial Sequence: Synthetic coding sequence"
  source 1..531: mol_type = other DNA
atgtttcatgttagttttcgctatattttcggactccctccattgatcttggtcctcttgccagtcgcatcatctgattgcgacattgagggaaaagatggtaagcaatacgaatctgtcctcatggtttcgattgatcaattgcttgactcgatgaaggagattggatctaactgtcttaacaacgagttcaatttcttcaaacgtcacatctgcgatgcgaacaaagaaggtatgttcctgttccgtgctgcgcgcaaattgcgacagttcttaaagatgaactcaactggagatttcgatttgcatttattgaaggtctctgaaggaaccaccattctcctaaactgcaccggccaagtgaagggtcgaaaaccagccgcactcggagaagcacaaccaaccaaaagtcttgaagaaaacaaatctctcaaagagcagaaaaagttaaatgatctgtgttttctgaaacgccttcttcaggaaattaagacctgttggaataaaatactcatgggaacaaaagagcac

SEQ ID NO: 14851 - DNA, 531 bp, synthetic construct
  misc_feature 1..531: note = source = /note="Description of Artificial Sequence: Synthetic coding sequence"
  source 1..531: mol_type = other DNA
atgtttcatgtttccttccgctacatcttcggtctgcccccccttatcctggtgctgcttcctgtggcctccagtgattgcgacatcgaaggcaaggatggcaagcagtacgaatcggtgttgatggtttcaatagatcagttgctcgactccatgaaggaaataggctcgaattgcctcaacaatgagtttaatttcttcaaacggcacatatgcgatgcaaataaagagggtatgttcctcttccgcgcggccagaaagctccgccaattcttgaagatgaatagcaccggagatttcgatcttcatttgctgaaagtctcggagggcactacaatcttgcttaattgcactggtcaggtgaaaggcagaaagccagctgccctgggcgaagcccagccaaccaagtccttggaggaaaacaagagtttaaaggaacagaagaaactcaatgatctttgctttttgaagcgtttgctccaggaaatcaaaacgtgctggaacaagattctgatgggaaccaaggagcac

SEQ ID NO: 14852 - DNA, 531 bp, synthetic construct
  misc_feature 1..531: note = source = /note="Description of Artificial Sequence: Synthetic coding sequence"
  source 1..531: mol_type = other DNA
atgttccacgtttctttccggtatatcttcggcttgccccctctgatccttgtgctcctgccagtcgcatcctcagactgtgatattgagggaaaagacggcaagcagtacgagagcgtgctgatggtctctatcgaccagcttctggacagtatgaaggaaattggcagcaactgcctgaacaacgagttcaacttttttaagagacatatttgtgacgctaacaaagagggcatgttcctcttcagggcagcccgaaaactgagacagttcctgaaaatgaattctaccggggacttcgatctgcacctgctgaaggtgtcagagggtacaacaatccttcttaactgtacagggcaggtgaagggcagaaagccagctgccctgggagaggcacagcccacgaagagtttagaggaaaataaatcacttaaggagcaaaaaaaactcaacgacctctgctttctaaaaaggctgcttcaggaaatcaagacctgctggaataagattctcatgggaactaaagaacat

SEQ ID NO: 14853 - DNA, 531 bp, synthetic construct
  misc_feature 1..531: note = source = /note="Description of Artificial Sequence: Synthetic coding sequence"
  source 1..531: mol_type = other DNA
atgttccatgtcagtttcaggtatatctttgggctgcctcccttaatcctggtgctgttgcctgtggcctcgtccgactgcgatattgagggcaaggacggtaagcagtatgagtccgtgcttatggtgtctatcgatcaattgctcgactctatgaaggaaataggttctaactgtctgaataatgaatttaacttttttaagcggcacatttgtgacgctaataaggagggcatgttcttatttcgggccgcccggaaattgcggcagtttctgaaaatgaatagcacaggagatttcgatttgcatctgctgaaagtcagtgagggaaccacaatcctgctgaattgcactggacaggtcaagggaaggaaacccgctgctctgggcgaagctcagcccaccaagagcctggaggagaataagtcgctcaaagaacagaaaaagctgaatgatctctgttttttgaaaaggctgcttcaggagatcaaaacctgctggaacaagattctgatgggtacaaaggagcat

SEQ ID NO: 14854 - DNA, 531 bp, synthetic construct; identical to SEQ ID NO: 14825
  misc_feature 1..531: note = source = /note="Description of Artificial Sequence: Synthetic coding sequence"
  source 1..531: mol_type = other DNA

SEQ ID NO: 14855 - DNA, 531 bp, synthetic construct
  misc_feature 1..531: note = source = /note="Description of Artificial Sequence: Synthetic coding sequence"
  source 1..531: mol_type = other DNA
atgttccacgtttcattcaggtacatcttcgggctgccgcctcttattctggtgctgctgccagtggcaagcagcgattgcgacattgagggtaaggatggaaagcagtatgagtctgtgttgatggtgtccatcgatcagctgctggattccatgaaggagattgggtctaactgcttgaacaatgaattcaatttttttaagaggcacatctgcgatgcgaacaaagagggcatgtttctgttccgcgctgcgcgtaagttgagacagtttctcaagatgaactcgacaggagattttgatctgcatctgcttaaggtaagtgagggcacgacaattctgctgaattgtactgggcaggtgaaggggaggaagcccgccgccctaggggaggctcaacccacaaaatcacttgaggaaaacaagtcgcttaaggaacagaagaaactcaacgatctgtgctttctgaagaggctcctgcaggaaataaaaacatgctggaacaaaatccttatgggcaccaaggagcac

SEQ ID NO: 14856 - DNA, 531 bp, synthetic construct
  misc_feature 1..531: note = source = /note="Description of Artificial Sequence: Synthetic coding sequence"
  source 1..531: mol_type = other DNA
atgttccacgtgtctttccgctacatcttcggcttgccacccctaatcttggttttactccccgtggccagcagcgactgcgatatagaaggcaaagatggtaagcagtatgaaagtgtgctcatggtctcaatcgatcagctcctggattcgatgaaagagatcggttctaactgtctcaacaatgaatttaattttttcaagcggcatatttgtgacgccaacaaggaggggatgttcctctttagagctgcaaggaagctacgacagttcctcaaaatgaacagtacaggagacttcgacctgcaccttctgaaagtgtcagagggtaccaccattttgcttaactgtacaggacaggttaaagggcgtaagcctgctgccctcggagaggcacaacctactaagtccctcgaggagaataaaagcctgaaagagcagaagaagcttaacgatctgtgcttcctgaaacggctcctgcaggaaatcaaaacgtgttggaacaaaattctgatgggcacaaaggaacat

SEQ ID NO: 14857 - DNA, 531 bp, synthetic construct
  misc_feature 1..531: note = source = /note="Description of Artificial Sequence: Synthetic coding sequence"
  source 1..531: mol_type = other DNA
atgttccatgtctccttcagatacatattcgggctcccaccgcttatcttggtgctgctgccagtggcaagctccgactgtgatattgaaggcaaggacggaaaacagtacgagtcagttttgatggtgagcatagaccagttgctcgacagtatgaaagaaattggctctaactgcctgaacaacgagtttaattttttcaaacggcatatatgtgacgccaacaaagaaggaatgttcctcttccgcgcagctagaaaactgaggcagttcctcaagatgaacagtacgggcgattttgacttgcacttgcttaaagtgagcgaaggcaccaccattttgctgaactgcaccggccaggttaagggtcggaaacccgctgctctgggggaggctcagcctactaaaagtctggaggagaataaaagccttaaggagcagaagaaattgaacgacctgtgtttcctgaagagactgctgcaggagataaagacgtgttggaataagatcctcatgggaacaaaggagcac

SEQ ID NO: 14858 - DNA, 531 bp, synthetic construct
  misc_feature 1..531: note = source = /note="Description of Artificial Sequence: Synthetic coding sequence"
  source 1..531: mol_type = other DNA
atgttccacgtgtcattcagatacatattcggcctgccgccactcattcttgtcctgttgcctgtcgcctcttcagattgtgacatcgagggcaaggatgggaagcagtatgagtccgtactgatggtttctatcgatcagctgctagactctatgaaggaaataggatccaattgtctcaacaatgaattcaacttctttaagaggcacatctgcgacgcaaataaagagggcatgttcctctttagggccgctcgcaagctgcgtcagttcctgaaaatgaactctactggtgattttgatcttcacctgctgaaagtgtcagaggggactacaatcctgttgaactgtaccggtcaggtgaagggacgaaagcctgccgctctgggtgaggctcagccaaccaagtctctagaagagaacaaaagtctcaaggagcagaaaaagctgaacgacctttgttttctcaagcggctgctgcaggagattaaaacctgctggaataagatcctcatggggacaaaagaacat

SEQ ID NO: 14859 - DNA, 531 bp, synthetic construct
  misc_feature 1..531: note = source = /note="Description of Artificial Sequence: Synthetic coding sequence"
  source 1..531: mol_type = other DNA
atgtttcatgtgagctttagatacatttttggcctaccccctctgattctcgtattgttacctgttgcatcaagtgactgtgacatagagggtaaagatggaaagcagtatgaatccgtattgatggtctccatcgatcagttactggatagcatgaaggagatcggctctaactgcttgaacaacgagttcaacttttttaagaggcacatctgcgacgctaacaaagaggggatgtttctgtttagagctgctcgcaaactgcggcaatttcttaaaatgaactccactggggactttgacttacacctgcttaaggtgagcgaaggaaccacgattctattgaattgcaccggacaggtgaaagggcgcaaacccgctgctctgggcgaagctcagcccacaaaatcgttggaagaaaataagtctctgaaggagcagaagaagcttaatgatttatgtttcttgaagcgcctgctccaggagattaagacgtgctggaataagatcctgatggggaccaaagaacat

SEQ ID NO: 14860 - DNA, 531 bp, synthetic construct
  misc_feature 1..531: note = source = /note="Description of Artificial Sequence: Synthetic coding sequence"
  source 1..531: mol_type = other DNA
atgttccatgtgtcctttcgctacatctttggtcttcctcccttaattttggtgttgctcccggtggcgagcagcgactgtgacatagagggcaaagacggaaaacagtatgagagcgtactaatggtgagcattgatcagttgctggatagcatgaaagaaatcggatccaattgcctgaataatgaattcaattttttcaagcggcatatctgcgatgcaaataaagaggggatgttcctgttccgagcggctcgaaagctacgccagttcctgaagatgaactcgactggtgactttgatctccatctgctgaaggtgagcgagggtaccaccatccttcttaattgcaccggacaggtgaagggcaggaagcctgctgcactgggcgaggcgcagccaacgaagtcactggaggagaacaaatctctgaaggagcagaaaaaactcaatgatctgtgtttcctgaaaaggctgctccaggagataaaaacctgctggaataaaatcctcatggggaccaaagagcac

SEQ ID NO: 14861 - DNA, 819 bp, synthetic construct
  misc_feature 1..819: note = source = /note="Description of Artificial Sequence: Synthetic coding sequence"
  source 1..819: mol_type = other DNA
atgaagaagacccagacctggatactgacatgcatctatttgcagcttcttctgttcaacccgctcgtcaagactgagggcatttgcagaaatcgcgtcacaaacaatgttaaggatgtgacaaagttggttgccaacctccctaaagattatatgatcactctgaaatacgtccccgggatggacgtgctgccctcccattgctggataagcgagatggtggtccagctctccgacagcctgacagaccttctggataagttttctaacatttcagagggtcttagtaattattccatcatcgataagctggtgaacatagtagacgatctggtggagtgtgtgaaggagaatagcagcaaggacctgaaaaagagcttcaaatcccctgagcccaggctcttcactccggaagaatttttcaggattttcaatcgaagcatcgatgcattcaaggatttcgtagtagcttctgagacaagcgattgtgtcgtcagttccacactctcacccgagaaggacagtagggtttccgtgaccaagccatttatgctgccccctgtggccgcatcttctctgcgcaatgactcctcaagttccaatagaaaggccaaaaacccccccggggattctagccttcattgggccgccatggccctgcccgcactgttctcccttatcatcgggttcgccttcggcgccctgtattggaagaagcggcagccatccctgactagggccgtcgagaacatccagataaatgaggaggacaatgagatctctatgctgcaagaaaaagaaagagaatttcaggaggta

SEQ ID NO: 14862 - DNA, 819 bp, synthetic construct
  misc_feature 1..819: note = source = /note="Description of Artificial Sequence: Synthetic coding sequence"
  source 1..819: mol_type = other DNA
atgaagaagacccagacctggattttgacctgtatttacctgcaacttttgcttttcaaccccctggttaagacagaggggatctgtcgcaatcgcgtcacgaacaacgtcaaagacgtgacgaaactggttgcaaacctgccgaaggactacatgatcacccttaaatatgtgccaggtatggacgtgctgccatcccattgctggataagtgaaatggtggtgcagctatccgacagcctgactgacttactggataaattctctaatatttctgaggggctgagtaactactctattatcgacaaactagtgaatattgtcgacgacctcgtggaatgtgtgaaagaaaactctagcaaagacttaaagaagagttttaagtcacccgagcccagactttttactcccgaagagtttttccgtatcttcaaccggtctatagatgcattcaaggactttgtggttgcgtcggagacgagcgactgcgtggtgtcctccacgctgtcaccggagaaggatagtcgggtatccgttaccaaacctttcatgcttcccccagtcgcagcctctagtctgagaaacgactcatctagctctaatcgaaaagccaagaaccctccaggagactcatcactgcattgggctgctatggcactgcctgctttgttctccctgatcatcgggttcgcgtttggagctttgtactggaaaaagcgccagccttcgctgactagagcagttgaaaatattcagataaacgaggaagataatgagatctccatgctacaggagaaagaacgcgagtttcaggaggtg

SEQ ID NO: 14863 - DNA, 819 bp, synthetic construct
  misc_feature 1..819: note = source = /note="Description of Artificial Sequence: Synthetic coding sequence"
  source 1..819: mol_type = other DNA
atgaagaagacacaaacctggatccttacctgcatctacctccagcttttactcttcaatccactagtgaagacagagggaatttgccggaacagagtgacaaacaatgtcaaagacgtgacaaagctggttgccaatctgcctaaggattacatgatcaccctgaagtacgtgccggggatggacgttctgcctagtcattgctggattagcgagatggtggtccagttgtcagacagcctgactgatttactcgataaattttctaatataagcgagggcctctccaattactctattattgataaactggttaacatcgttgatgacctggtcgagtgcgtgaaagagaatagctcaaaagacctgaagaagagcttcaaatcacctgagcctcgtctgtttacacctgaggaattctttaggatattcaatcggagcattgatgctttcaaggatttcgtggtggccagcgagacaagcgactgtgtggtcagttctaccctgtcaccggagaaagactcccgtgtgtctgttaccaagcctttcatgctcccgcccgtcgctgcatcctccctgaggaacgattccagcagttctaacaggaaggctaagaatccccctggcgatagcagcctccactgggccgccatggcccttcccgctcttttcagcttgattattggcttcgcctttggtgccctgtattggaaaaaacggcagcctagcctcacgcgtgcagttgagaacatccaaatcaatgaagaggataatgagatttccatgctgcaggaaaaggagcgtgagttccaggaggtc

SEQ ID NO: 14864 - DNA, 819 bp, synthetic construct
  misc_feature 1..819: note = source = /note="Description of Artificial Sequence: Synthetic coding sequence"
  source 1..819: mol_type = other DNA
atgaaaaagactcagacgtggattcttacctgtatctaccttcagcttcttctgtttaaccctttggtgaaaacggaagggatctgccgcaatagagtgaccaacaacgtgaaggatgtgaccaagctggtcgccaacctgcccaaagattacatgattactctcaaatacgtccccggaatggatgtgctcccttcacattgttggatctccgaaatggtcgtgcaactttcggattcccttactgacctgcttgataagtttagcaacatctccgaaggactttccaattactcgattattgataaacttgtgaatattgtcgatgatctggtcgaatgtgtgaaggaaaactcgagcaaggatttgaagaagagctttaagtcccctgagccacgcctttttactcctgaagaattctttcgaattttcaacagatcgattgatgcatttaaggactttgtcgttgcctcggaaacttcggattgtgttgtctcgtccactctgagcccagaaaaagacagcagagtgtccgtgactaaaccattcatgctcccacctgtcgcggcctcctcccttcggaatgacagctccagttcgaatcggaaagccaaaaatccacccggtgactcgtcgctgcactgggctgccatggcccttccagccctcttttcactcatcatcggattcgcattcggtgcactttactggaagaaaaggcaaccttcacttactcgggcagtggagaacattcagattaacgaagaagataacgagatctcgatgctgcaagaaaaagagagagagttccaagaagtg

SEQ ID NO: 14865 - DNA, 819 bp, synthetic construct
  misc_feature 1..819: note = source = /note="Description of Artificial Sequence: Synthetic coding sequence"
  source 1..819: mol_type = other DNA
atgaagaaaacccagacttggatactaacctgcatttatctgcagttgctcctatttaatcctctggtgaaaacggagggcatctgtcggaacagggtgacaaacaacgtcaaggacgtgactaagctggtcgcaaatctgcctaaagactatatgataacattgaagtacgtcccgggcatggatgtgctcccatcccattgttggatctccgaaatggtagttcagctcagcgatagcctgacagacctcctggataaattcagcaacatcagcgagggactctccaactactcaatcatagacaagctggtaaatatagtggatgatttggttgaatgtgtgaaagagaactcgtccaaggatctcaagaagtccttcaagagtccagaaccccgtctgttcacccctgaggagttttttcgtatatttaaccgttccatagacgcctttaaggatttcgttgtggcctcagagaccagtgactgcgtcgtgtcgtctaccttgtcccctgagaaggactctcgagtgtcagtgacgaaaccattcatgctgcctcccgtggctgcaagttcattgaggaacgactcctccagcagtaatcgcaaagctaagaatcccccaggcgactcttcgctgcactgggcagccatggctctgcctgcactgttctcactcataattgggtttgcatttggggcactgtactggaaaaaacggcagccttctctgacgagagccgtggaaaacattcaaattaacgaggaggacaatgagatcagtatgctgcaggaaaaggaacgagaattccaggaggtt

SEQ ID NO: 14866 - DNA, 819 bp, synthetic construct
  misc_feature 1..819: note = source = /note="Description of Artificial Sequence: Synthetic coding sequence"
  source 1..819: mol_type = other DNA
atgaaaaagactcaaacttggattctcacttgcatctacctgcagttgctccttttcaacccgctggtgaaaactgaaggaatctgccgcaatcgggtgacgaacaatgtgaaggatgtgaccaagctggtggcgaacctcccgaaggactacatgattacgctgaagtacgtgccgggaatggatgtgctcccgtcgcattgctggatttcagagatggtggtgcaacttagcgactcactgaccgatctgttggacaagttcagtaatatcagcgaaggattgtcaaattacagcataatcgataagctggtgaacattgtagacgacctcgtggagtgcgtcaaggagaattcctcgaaagacctcaagaagtcattcaagtcgcccgagcccagacttttcacgcccgaggagttcttcagaatctttaacagatcgatcgatgcattcaaggacttcgttgtcgcaagcgaaacctccgactgtgtggtgagcagcaccctgagcccggagaaggactccagagtgtctgttactaagcctttcatgctgccgccggtcgcggctagttcgctccgcaacgactcgagctcctcaaaccgaaaggcgaaaaaccctccaggcgacagctcactccactgggcagccatggccctcccggcactgttttcactcatcatcggcttcgcgttcggggccctgtactggaagaagcggcaaccgtcgctgacgcgcgctgtggaaaacatccagatcaatgaagaagataacgaaatctccatgctgcaggaaaaggagcgcgagtttcaggaagtg

SEQ ID NO: 14867 - DNA, 819 bp, synthetic construct; identical to SEQ ID NO: 14862
  misc_feature 1..819: note = source = /note="Description of Artificial Sequence: Synthetic coding sequence"
  source 1..819: mol_type = other DNA

SEQ ID NO: 14868 - DNA, 819 bp, synthetic construct
  misc_feature 1..819: note = source = /note="Description of Artificial Sequence: Synthetic coding sequence"
  source 1..819: mol_type = other DNA
atgaagaagacccagacatggatccttacctgtatttatctccagctgctcctcttcaacccgctcgttaagaccgagggaatttgccgcaacagagtgaccaacaacgtcaaggacgtaactaagctggttgccaacctccccaaggattacatgatcactctgaagtacgtcccaggtatggacgtgctgccttcccactgttggatttccgagatggtagtacaactgtctgacagcctgacggacctgttggacaagttttctaacatctctgaaggactgtccaattactcaatcattgataagcttgtcaatatcgtggacgatctcgttgaatgcgttaaggagaatagctccaaggacctgaaaaagagctttaaaagtccagaacccaggctgttcacccctgaggaatttttcaggatctttaacaggtcaatcgatgcattcaaggacttcgtggtggctagcgagactagcgactgtgtggtttcttccaccctgagtcccgaaaaagattcacgcgttagcgttactaaaccgttcatgttgccaccagtggccgccagcagcctcaggaatgattcaagttcatcaaatagaaaagcgaagaaccctccaggcgactcttcattgcactgggcagccatggctctgcccgctctgttctcactgattattggattcgcctttggtgcactctactggaagaagagacaaccatcactgacccgcgccgtggaaaacatccagatcaacgaagaggataatgagatatccatgctgcaagagaaggagagggagtttcaggaggtg

SEQ ID NO: 14869 - DNA, 819 bp, synthetic construct
  misc_feature 1..819: note = source = /note="Description of Artificial Sequence: Synthetic coding sequence"
  source 1..819: mol_type = other DNA
atgaagaaaacacagacttggatcctgacctgcatttatctccagcttctgctttttaacccactggtcaaaactgagggtatatgtcgaaatagagtgacaaataatgtaaaagacgtgacaaaactagtggctaatctgcccaaagactatatgattactctcaagtacgtgcccggaatggatgtactcccaagtcactgttggatctctgaaatggtggtgcagctaagtgatagtttgacggatctcctcgacaaattttcaaatatatcggaggggctgagtaattattcaataatcgacaagcttgtgaatattgtggacgacctggtggagtgtgtaaaagagaattcatctaaagatttgaagaagagcttcaagtctccggagcctaggttgttcacacctgaagaattttttcggatctttaatcgcagtatcgatgccttcaaagatttcgtagtggccagcgaaacatcagattgtgtggtaagctctacactgtcccccgagaaagattccagagtaagtgtaactaagccgtttatgttgcctccagtagccgccagctcccttcgcaatgatagctcttcatccaacaggaaagctaaaaatccccctggggactcctctctgcattgggctgccatggctctgccggcattgttctcactcattatcggtttcgcctttggcgccctgtactggaagaagcggcagccatccctgacacgtgccgtcgaaaacatccagatcaatgaagaagacaacgagatctccatgcttcaggagaaggaaagagagtttcaggaagtg

SEQ ID NO: 14870 - DNA, 819 bp, synthetic construct
  misc_feature 1..819: note = source = /note="Description of Artificial Sequence: Synthetic coding sequence"
  source 1..819: mol_type = other DNA
atgaaaaagacgcagacctggatcctgacttgcatttatctgcaactgctcctctttaatccgttggtgaaaaccgaggggatctgtcgcaatcgggtgaccaacaacgtgaaagatgtcaccaagctggttgcaaatcttccaaaggattacatgatcaccctgaagtacgttcctggaatggacgtcctccctagccattgctggatcagtgagatggtggtgcaactttcggactccctgactgacctgctggacaaattctcgaacatttcggagggattgtccaattactcgatcatagacaagctggtgaacatcgtggacgacttggtggaatgcgtgaaagaaaactccagcaaggacttgaagaagtccttcaaatcgccggaaccgagattgttcactccagaagaattctttcggatcttcaaccgatcgatcgacgctttcaaggactttgtcgtcgcgtcagagacttcggactgcgtggtttctagcaccctctcgcccgaaaaggactcacgggtatccgtcactaagccattcatgctgcctcccgtggctgcatcgagccttcggaatgactcgtcaagctcaaatcggaaggccaagaatccgccgggcgattcatcgctgcattgggccgcaatggccctcccagccctgttcagcctgattatcggattcgccttcggagcactgtattggaagaagcggcagccgtccctcacgcgcgcagtggaaaacatccagatcaatgaggaggacaatgagatctcaatgctgcaggaaaaagaacgcgagttccaggaggtc

SEQ ID NO: 14871 - DNA, 819 bp, synthetic construct
  misc_feature 1..819: note = source = /note="Description of Artificial Sequence: Synthetic coding sequence"
  source 1..819: mol_type = other DNA
atgaaaaagactcagacgtggattctgacgtgtatataccttcaacttctccttttcaacccgcttgtcaagactgagggcatctgtcgcaatagggtgactaacaatgtcaaagatgtgaccaagctggtggcaaatctccctaaagactacatgatcacgttgaagtacgtgcctggaatggacgtgctgccatcccattgctggatatcagaaatggtcgtccagctctcggattcgcttactgatctgctggataagttctcgaatatctcggaaggtctgtcgaattactccatcattgataaacttgtcaacattgtcgacgatctggtggaatgcgtcaaggagaacagctccaaggatctgaagaaatcgtttaagtcgcctgaacccagactctttaccccagaggaattcttccgcattttcaatagatcgattgacgcattcaaagattttgtggtcgcgtccgaaacttcggattgtgtggtgtcctctaccctttcccccgaaaaggattcacgcgtgtcagtgactaagccgttcatgcttcctccggtggctgcctcgtcgttgagaaacgactcgtcgtcctccaatcgtaaagccaaaaatcccccaggggattcatcactccattgggcagcgatggcactgcccgcacttttctcactgattattggcttcgcctttggtgctctgtactggaagaagaggcaaccatcgctcaccagggcagtggaaaacattcagatcaacgaagaagataatgaaatctcgatgttgcaagaaaaagaacgggagttccaggaagtg

SEQ ID NO: 14872 - DNA, 819 bp, synthetic construct
  misc_feature 1..819: note = source = /note="Description of Artificial Sequence: Synthetic coding sequence"
  source 1..819: mol_type = other DNA
atgaaaaagacccaaacttggattctcacctgtatatacctccaactgcttttgtttaacccgctcgttaagacggagggtatttgtaggaaccgcgtgaccaacaatgtgaaggatgtgaccaagctggtggcaaatctcccaaaggactacatgattaccctgaaatatgtgcctggtatggatgtgctcccatcccattgttggatatcggaaatggtggtgcagctctcagatagccttactgatctgctggataagttcagcaacatttccgagggcttgagcaactactctatcattgataagttggtcaacatcgtggacgatctggtggaatgcgtgaaggaaaattcgtcaaaggatctgaagaaatcattcaagtcacccgaaccaaggctgtttactccagaggaattctttaggatctttaaccgatccattgacgcattcaaagattttgtggtcgcgtcagaaacttccgattgtgtcgtgtcatccacccttagtccagagaaggatagcagggtgtccgttacgaaaccatttatgctgccgcctgtggctgctagctccctcagaaacgactcatcgtcatcgaatagaaaggctaagaacccacctggtgactcctctctgcattgggcagcaatggccctgccggcgctgtttagccttatcatcggattcgcattcggagccctttactggaagaaaagacagccatcattgacccgtgcagtggagaatattcaaatcaacgaagaagataatgaaatttccatgctccaggagaaggaaagagaattccaagaggtc

SEQ ID NO: 14873 - DNA, 819 bp, synthetic construct
  misc_feature 1..819: note = source = /note="Description of Artificial Sequence: Synthetic coding sequence"
  source 1..819: mol_type = other DNA
atgaagaaaacgcagacttggatcctaacctgcatctacctgcaactcctgttgttcaatcccttagtgaaaacagaaggcatctgccgtaacagagttacaaacaacgttaaagatgtgacaaagttggtggctaatcttccgaaggattacatgattacactgaagtacgtgcccggcatggatgtgctcccatcgcattgctggatctcggagatggtggtgcagttgtctgactccttgacagatctgcttgataaattttcgaacatcagcgagggcctctccaactactccatcattgataagctggtcaacattgtggatgatttggttgagtgcgtgaaggagaacagtagcaaggacctgaagaagtcctttaaatcaccggaacccaggctgttcacccctgaagaattttttcggatttttaatcgctcgatcgacgcattcaaagactttgtcgtggcatccgagacttccgactgcgtggtgagtagcaccctttcgccggagaaggattcccgcgtgtcggtcactaaaccatttatgcttccgccggtggccgcttcttctctgagaaacgatagtagcagttccaatcgcaaagccaaaaacccccccggagattcttcgctgcactgggctgctatggctttgcccgcactgttcagcttgatcattggatttgcatttggcgcactgtattggaaaaaacgtcagccgtccctgacgcgcgccgtggagaatattcaaataaatgaggaagataacgagatttcgatgctgcaggaaaaagagcgggagtttcaagaagtc

SEQ ID NO: 14874 - DNA, 819 bp, synthetic construct
  misc_feature 1..819: note = source = /note="Description of Artificial Sequence: Synthetic coding sequence"
  source 1..819: mol_type = other DNA
atgaagaagacgcagacttggattcttacctgcatttatctacagctgctactatttaatccattggtgaagacagagggcatctgtagaaatcgagtaactaacaatgtcaaagatgttacaaaactagtcgccaacttaccaaaagattatatgataaccctcaagtatgttcccggtatggacgttctgccttcacactgttggatttccgagatggtagtgcagctttccgatagccttacagacctactcgacaaatttagcaatatcagtgaggggctgagtaattactcaattatagataagctcgttaacattgtggacgacctcgttgagtgtgtgaaagaaaactcctccaaggacctgaaaaagtcctttaaaagtcccgaacccaggttattcacgcctgaagagtttttcagaatcttcaacaggtcaatagacgccttcaaggatttcgtggttgcgtctgaaacctctgactgcgtggtgagttccaccctgagtcccgaaaaagactcgcgggtgtccgtgaccaaacccttcatgcttccccccgttgcggcctcctcattgcggaacgactctagtagttctaaccgcaaggctaagaacccgcccggagactcaagcctgcattgggctgccatggccctgcccgccctttttagcttgataatcggattcgcatttggcgctctttattggaagaagcggcagccatctctgacaagagccgttgaaaacatccaaatcaatgaggaggacaatgagatatccatgctacaggaaaaggagcgggaatttcaggaagta

SEQ ID NO: 14875 - DNA, 819 bp, synthetic construct
  misc_feature 1..819: note = source = /note="Description of Artificial Sequence: Synthetic coding sequence"
  source 1..819: mol_type = other DNA
atgaaaaagacccagacttggattctgacttgtatctacttgcaactattgctattcaatcccctggttaaaacagaaggtatctgcagaaaccgggtgactaataacgtgaaagacgtgactaaactcgtggccaacctgcccaaagattacatgatcaccttaaaatacgttccggggatggacgttctaccatctcattgttggattagtgagatggtggtgcagttgtctgattcgttgactgatctgctcgataagtttagtaacatctccgaaggtctctccaactattcgataatagacaagctagtcaacattgtagatgacctggtggaatgcgttaaggagaactcctcaaaagaccttaaaaagtccttcaaatctccagagccgcgactgtttacccctgaggaattcttcaggatcttcaacaggagtatcgatgcattcaaagattttgtcgttgcttcagaaaccagtgattgtgtggtcagctccacacttagccctgagaaggatagccgggtttccgtgaccaaacctttcatgcttcccccggtggctgctagcagtcttagaaacgactctagttccagtaaccgaaaggccaagaatccccccggcgatagcagtctgcactgggctgctatggcgcttccagcgttgttcagccttattatcggcttcgcattcggtgccctgtattggaaaaagcgccagccaagcctcactcgggctgtggagaacatacagataaatgaggaagataatgagataagtatgctccaagagaaagagcgggagttccaagaagtg

SEQ ID NO: 14876 - DNA, 819 bp, synthetic construct
  misc_feature 1..819: note = source = /note="Description of Artificial Sequence: Synthetic coding sequence"
  source 1..819: mol_type = other DNA
atgaaaaagacccaaacctggatcctgacctgcatctacctgcaactcttgctgtttaatcctctcgtcaagactgaaggtatctgcagaaatcgtgtcaccaacaacgtgaaggacgttactaagctggtcgctaacctgccgaaagactacatgatcactctgaagtacgtcccgggaatggatgtgttgccatcacattgttggatttccgaaatggtggttcagctgtccgactcgctgaccgacctcctggataagttctccaacatctcagaggggctgtcgaactactccatcatcgataagttggtgaacatcgtggacgatctggtggaatgtgtgaaggagaactcgtccaaggacctcaaaaaatcgttcaaaagcccagaaccgcggctcttcactcccgaggaattcttccgcattttcaacaggtctatcgatgcgtttaaggacttcgtcgtggcgtcggaaacctcagactgcgtggtgagctcaactctgtcacccgagaaggattcgcgcgtgagcgtcactaagccttttatgctcccgccagtcgctgccagcagccttcggaatgacagctcgtccagcaatcgcaaggctaagaaccctcctggcgactcgagcctgcattgggcagccatggcactccccgcgctgttctcccttataatcgggttcgcgttcggagccctgtactggaaaaagcgccagccgtccctcacccgcgctgtggaaaatatccagattaacgaggaagacaatgaaatctcaatgctccaggaaaaggaaagggaattccaggaagtg

SEQ ID NO: 14877 - DNA, 819 bp, synthetic construct
  misc_feature 1..819: note = source = /note="Description of Artificial Sequence: Synthetic coding sequence"
  source 1..819: mol_type = other DNA
atgaaaaaaacacaaacctggatcctaacgtgtatttatttgcagcttttgttgttcaacccgttggttaagacggagggcatatgtagaaacagagtgaccaataacgtgaaagatgtgactaagcttgtcgccaaccttcctaaggactatatgatcactttgaaatacgtccccggaatggacgtcttgccttcgcactgctggatttcggaaatggtcgtgcagctcagtgattcattaacagacttgttggataaattcagcaacatctcagaaggtttaagtaactattcaatcattgacaagctcgtgaatattgtcgacgatttggttgaatgtgtgaaggagaactcatcaaaggacctcaagaaatcgttcaaatcaccagagccgaggttgttcaccccagaggagttctttcgcattttcaacagatcgattgatgcctttaaggatttcgtggttgcatcggagacatccgactgtgttgtgtcttcgacactatcaccggaaaaagacagcagggtgagtgtgaccaagcccttcatgcttcctccagtcgcagcttcttccctaaggaatgattcttccagtagcaatcggaaagctaaaaacccaccaggagatagttcgctgcattgggcggcaatggcccttccagcccttttttcgttgatcattggatttgcattcggtgctctctactggaaaaagcggcaaccatctctcactcgtgctgttgaaaatatccaaataaacgaagaggacaatgagatctctatgttacaagaaaaagaacgggaatttcaagaagtt

SEQ ID NO: 14878 - DNA, 819 bp, synthetic construct
  misc_feature 1..819: note = source = /note="Description of Artificial Sequence: Synthetic coding sequence"
  source 1..819: mol_type = other DNA
atgaagaaaactcagacttggatactcacatgcatatatctgcagctcctgttgtttaacccacttgtaaaaaccgaaggaatctgccgaaatcgagtgaccaataacgtcaaggacgtgacgaagttggtcgccaacctacccaaagactatatgattacacttaagtacgtccccggcatggatgtcttgccaagccattgctggatctcagaaatggttgtgcaactcagtgacagtctgaccgatctgctggataaattctctaatattagtgaggggttgagcaactactctatcatcgataaattggtgaacattgtggacgacctcgtcgaatgtgtgaaggaaaattcctccaaagatctaaagaagtcttttaagtcccctgaaccaaggctgttcaccccagaggaattcttccggattttcaatagaagtattgatgcgttcaaggattttgtcgtagcaagcgagacaagtgattgcgtggtttcatctaccctgtctccagagaaagattcacgggtatctgtaactaaaccctttatgttgccaccggtggccgcctcatcacttagaaatgacagctcatcctcaaatcgaaaggcaaaaaatccccccggcgactcgtccctgcactgggctgcgatggcactccccgcgttgttctcacttatcataggcttcgctttcggtgccctttactggaaaaagcgacaacctagtctgactagggccgtggaaaatatacagatcaacgaggaggataatgagatctccatgttgcaagagaaggaaagagagtttcaggaagtc

SEQ ID NO: 14879 - DNA, 819 bp, synthetic construct
  misc_feature 1..819: note = source = /note="Description of Artificial Sequence: Synthetic coding sequence"
  source 1..819: mol_type = other DNA
atgaagaagacccagacttggattctgacttgtatttacctacagcttctgctctttaatcccctggtcaagaccgagggcatctgcagaaatcgggtaaccaacaacgtcaaagatgtcacaaaattggtggccaatctaccaaaggattacatgattaccctgaaatacgtccctggcatggatgttttaccaagtcattgctggatatccgaaatggtcgtgcagctgagcgactcattgactgacctgctggacaagtttagcaatatcagtgagggactctccaattactccataattgacaagctggtcaacattgtcgacgacttagttgagtgtgtgaaggagaacagttctaaggatctgaagaagtcttttaaatccccagaaccacggctgtttacccctgaagaattcttcaggatcttcaacagaagcattgatgccttcaaggacttcgtggtagcttccgagacttccgattgcgttgttagcagtactctgtccccagagaaggatagccgggttagcgttaccaagcctttcatgctgccaccagtggctgcctcctctttacgcaatgacagctcaagcagtaaccgcaaggccaagaatcctcccggtgatagtagtctacactgggccgctatggctctgcctgccctgttctcattaattatcgggttcgctttcggcgccttatattggaaaaaaagacagccatcattaactagagccgtggagaatatacagatcaatgaggaggataacgaaatatcaatgctgcaggaaaaggaacgagagttccaagaggtt

SEQ ID NO: 14880 - DNA, 819 bp, synthetic construct
  misc_feature 1..819: note = source = /note="Description of Artificial Sequence: Synthetic coding sequence"
  source 1..819: mol_type = other DNA
atgaaaaagacccaaacttggattcttacttgcatatacctccaactgcttctgtttaaccctcttgttaagaccgagggcatctgccgaaatagagtgactaataacgtgaaagatgtgaccaagctggtcgcaaacctgccgaaagactacatgattacgcttaagtacgtgccaggaatggacgtgttgccaagccactgctggatctcggaaatggtggtccaacttagcgattcgctcaccgatctccttgacaagtttagcaacatttccgagggattgtcaaactactcaatcattgacaaacttgtcaacattgtggacgatctggtggagtgcgtcaaggaaaactcgtcgaaggatcttaagaagtcattcaagtcgccagagcctagactgttcacccccgaggaattcttccgcatctttaacagatcaatcgacgcatttaaggatttcgtggtcgcgtccgaaacttccgattgcgtcgtgtcctccactctttcccctgaaaaggatagtcgggtttccgtgaccaagccattcatgctgcctcctgtcgccgcgtcgtcacttaggaacgactcctcgtccagcaataggaaagccaagaaccccccaggtgattcgtcgcttcattgggcagcaatggcgttgcctgcactgtttagcttgattataggatttgcatttggtgcactttactggaaaaagaggcaaccctccttgactagggccgtggagaatattcagatcaacgaggaagataacgaaattagcatgcttcaggaaaaagagcgcgagtttcaagaagtg

SEQ ID NO: 14881 - DNA, 819 bp, synthetic construct
  misc_feature 1..819: note = source = /note="Description of Artificial Sequence: Synthetic coding sequence"
  source 1..819: mol_type = other DNA
atgaagaaaacccagacctggatcctgacctgtatctacctgcagcttctgctgttcaatcctctggtcaagactgagggaatctgccgcaaccgggtcaccaataatgtcaaagatgtgaccaagctcgtcgccaaccttcctaaggactacatgattacgcttaagtatgtgcctggaatggacgtgctgccttcacactgctggatctccgaaatggtggtgcagttgtcggattcgctgaccgatctgctggacaagttctcgaatatctccgaaggactgtccaactattctatcatcgataagctcgtcaatatcgtcgatgatctggtggaatgtgtgaaggaaaactcgtccaaggatttgaaaaagagcttcaaatcgccggaaccccggctgttcactccggaagagttttttcggatcttcaaccggtccatcgatgccttcaaagacttcgtggtggcgagcgaaactagcgattgcgtggtgtcatcgaccctgtcaccggaaaaagactcacgagttagcgtgacgaagccttttatgctcccgcccgtggccgcatcgtccctcaggaacgactcgtcatcgtctaatagaaaggccaagaacccaccaggggacagcagcttgcactgggcggcgatggctcttccagctctttttagcctgatcatcggatttgccttcggagctctgtactggaagaaaagacagccttcgctcacccgggctgtggagaacatccagattaacgaagaggacaatgaaatctcgatgctccaagaaaaggagcgcgagttccaggaggtg

SEQ ID NO: 14882 - DNA, 819 bp, synthetic construct
  misc_feature 1..819: note = source = /note="Description of Artificial Sequence: Synthetic coding sequence"
  source 1..819: mol_type = other DNA
atgaaaaagacccagacttggattctcacctgcatttacctgcagctgctgctcttcaaccctctggtcaagactgagggcatatgccgtaaccgggtgactaacaatgtgaaggatgtgaccaagctggtcgccaatcttcctaaggattacatgataactttgaaatacgtgccagggatggacgtgcttccgtcccactgttggatttccgaaatggtcgtgcaactttctgactccctgacggatctccttgataagttttcgaacatttcggaaggcctttcaaactactccattatagataaacttgttaacatagtggacgatctggtggagtgtgtgaaggagaattcgtccaaggatctcaaaaagtccttcaagtcccccgagccgcgcctttttacccctgaggaattcttcagaatcttcaaccgtagcattgatgcttttaaggacttcgtggtcgcctcggagacttcggattgcgttgtctcgtcaaccctgtcccctgaaaaagactcgcgggtgagcgtgaccaagccatttatgcttcctcctgtggcagcctcgtccctgagaaacgattcctccagctcgaaccgaaaggctaagaacccacctggagattcgtcactgcattgggcagcgatggcgcttccagcactgttttcactgatcatcggttttgctttcggcgcgctttattggaagaagcggcaaccttcgcttactagagcagtcgaaaacatccagattaatgaagaggacaacgaaatctccatgctccaggaaaaggaacgggagttccaagaagtc

SEQ ID NO: 14883 - DNA, 819 bp, synthetic construct
  misc_feature 1..819: note = source = /note="Description of Artificial Sequence: Synthetic coding sequence"
  source 1..819: mol_type = other DNA
atgaaaaagacccagacctggatcctcacgtgcatctacttgcagctccttctttttaatccattagtaaagaccgagggcatctgccgtaatcgggtcaccaataatgtgaaggacgtgaccaaactggtggcaaaccttccaaaggactacatgatcacactaaaatacgtgccggggatggatgttctgccctctcactgctggataagcgagatggttgtacagctgtctgactcactgactgatctgttggataagttctccaatatcagcgaaggcttgagcaattacagcattattgacaagctcgtgaatattgtggatgatctagtggagtgtgtaaaagaaaactcaagtaaagacctgaagaagtccttcaagtcccctgaacccaggctgttcacccccgaggaattttttcggatcttcaatcggtccatagacgcatttaaggattttgtggtagcctccgagacatccgactgtgtggtaagcagtacgttgtctcctgaaaaagacagccgcgtgagtgtcacaaaaccgtttatgttacctcctgtggccgcctctagtctgcgcaacgattcttctagctcgaaccgaaaagccaaaaaccctccgggagacagcagcctgcactgggctgccatggccctgccggcgctgttcagcctgatcattgggttcgcgttcggtgccttatattggaagaaacgccagccatccctgacgcgcgcggttgaaaacatccagataaacgaggaagataacgagatttcaatgctgcaagaaaaagagcgggaattccaggaggtc

SEQ ID NO: 14884 - DNA, 819 bp, synthetic construct
  misc_feature 1..819: note = source = /note="Description of Artificial Sequence: Synthetic coding sequence"
  source 1..819: mol_type = other DNA
atgaaaaagacccaaacctggattcttacctgtatctacctccaactcttgcttttcaacccacttgtcaagaccgaaggaatttgccggaacagagtgaccaacaatgtcaaagatgtgactaagctcgtcgcaaaccttcctaaggattacatgattacccttaagtacgtccctggaatggacgtgctcccctcgcattgttggatctcggagatggtcgtgcagctcagtgattctctgaccgacctcttggataagttttccaacatttcggaaggcctgtcgaattactccatcattgacaaactggtgaatatcgtggacgaccttgtggaatgcgtgaaggagaactcctccaaagaccttaagaagtcgttcaaatctccagaaccccgcttgtttactcctgaggagttttttcgcattttcaatcggtcaatagatgcattcaaagattttgtcgttgcatctgaaacttcagactgcgtcgtctctagcactctttccccagaaaaggattccagagtgtccgtcaccaaaccctttatgctgccgcctgttgcggcgtcctcacttcgcaatgacagctcctcatcgaaccggaaggcaaaaaaccctccaggagactcgagcctgcattgggccgcaatggctctgcctgcccttttcagccttatcataggattcgcatttggagcactctactggaaaaagaggcaaccttcgctgacccgtgctgtggaaaacatacagatcaacgaggaagataacgaaatttccatgctccaagagaaggagagagaatttcaagaggtg

SEQ ID NO: 14885 - DNA, 819 bp, synthetic construct
  misc_feature 1..819: note = source = /note="Description of Artificial Sequence: Synthetic coding sequence"
  source 1..819: mol_type = other DNA
atgaaaaaaacccagacatggatcttaacatgcatctatctacagctgctgctgttcaatcccttggtgaagaccgaggggatatgccggaatcgagttaccaacaatgtgaaggacgtcacaaagttagtggctaacctccctaaagattacatgataacattaaaatacgtgcccgggatggatgtcctgccatcccactgttggatatccgaaatggtggtacaactgtctgactcactcacagacctcttggataaattctcaaatatatcagaaggtctctctaattatagtatcatcgataagctcgtgaatattgttgacgatctggtggaatgtgtgaaagaaaactcttctaaggaccttaagaaatcatttaagtctcccgagcccagactcttcactcctgaagagtttttccggattttcaaccggagcattgatgcgttcaaggacttcgtggtggcatccgaaacgtccgactgtgtggtatctagcacgttgtcaccagagaaggactccagagtttctgtgacaaagcctttcatgctgccgccggtcgcggcttcctcgctccgcaatgattcaagcagctccaatcgtaaagctaaaaatccacccggcgacagtagtctgcattgggctgctatggctctccctgctttgtttagcctcatcattgggttcgcattcggggccctgtactggaagaagcggcagccttccctgacccgcgccgtcgaaaatattcaaatcaacgaggaagacaacgagatttctatgcttcaggagaaggagcgagagtttcaggaagtg

SEQ ID NO: 14886 - DNA, 819 bp, synthetic construct
  misc_feature 1..819: note = source = /note="Description of Artificial Sequence: Synthetic coding sequence"
  source 1..819: mol_type = other DNA
atgaaaaagactcagacctggattctgacctgcatttatctgcagctccttcttttcaaccctctggtgaaaactgagggaatttgccggaacagagtgacgaataatgtgaaggatgtcactaagctggtggcaaatcttccaaaagattacatgatcactctgaagtacgtcccaggaatggacgtgttgccttcgcattgctggatctctgaaatggtggtccaattgagcgattcactgaccgatcttcttgataagttttcgaacatctccgaaggtctgtcgaattactccattattgacaaacttgtgaatattgtcgacgacctggtggaatgcgtgaaggaaaacagctcaaaggatctgaagaaatcgtttaagtcgcctgaacctcgcctctttacccctgaagagttttttcgtatctttaatcgttcgatcgatgcgttcaaggattttgtggtcgcatcggagacgtccgactgtgtggtgtcctccactctgtcccctgaaaaggattcaagagtgtcggtgactaagccattcatgctgccacccgtggcagccagctccctgcggaacgactctagctcgtcaaatcggaaagcaaagaaccccccaggagactcctctttgcattgggctgctatggcactgccagcactgttttcgcttatcattggatttgcgtttggcgcactttactggaagaagagacaaccctcactgactagagcagtggagaacatccagataaacgaggaagataacgaaatcagcatgcttcaagagaaggagagagagtttcaagaagtc

SEQ ID NO: 14887 - DNA, 819 bp, synthetic construct
  misc_feature 1..819: note = source = /note="Description of Artificial Sequence: Synthetic coding sequence"
  source 1..819: mol_type = other DNA
atgaagaaaactcaaacctggatcctgacttgcatatacttgcaactgcttctcttcaacccgctggtcaagacggagggaatctgtcgcaaccgggtgactaacaacgttaaagatgtgaccaagctcgtggccaatctgcccaaggactatatgattactctgaagtacgtcccaggaatggacgttcttccatcccactgctggatcagcgagatggtggtccagctgtccgactcacttaccgacctgctcgataagttctcgaacatttctgagggactctcgaactattcaatcatcgacaagctggtcaacatcgttgacgacttggtcgagtgcgtgaaagaaaattcatccaaggacctgaaaaagtcctttaagtcgcctgaaccgcgcctgttcaccccggaggaattcttccggattttcaaccgctcgatcgatgcgtttaaagacttcgtggtggcctccgagactagcgactgcgtggtgtcgtcaactttgtcgccggaaaaggatagcagagtgtcagtgactaagccatttatgctgccgccggtcgcggcgtcctcgctccgcaatgattcaagctcctccaaccgcaaagcgaagaaccctccgggtgattcctcgctgcactgggcagcgatggccctgccagctctgttttccctgatcatcggttttgcgttcggcgccctgtactggaagaaacgccaacccagcttgacgcgcgcggtggaaaacatccagattaatgaagaggacaacgaaatctccatgctccaggaaaaagagcgcgagttccaggaggtc

SEQ ID NO: 14888 - DNA, 819 bp, synthetic construct
  misc_feature 1..819: note = source = /note="Description of Artificial Sequence: Synthetic coding sequence"
  source 1..819: mol_type = other DNA
atgaagaaaacccagacttggattctcacctgtatctaccttcagctccttttgttcaaccctctggtgaaaaccgaaggaatttgtagaaaccgcgtaaccaataatgtgaaagatgtgactaaattggttgctaatctgcctaaggattacatgattactctcaaatacgtccctggaatggacgtcctcccgtcacactgctggatctcggaaatggtcgtccaactgagcgattctctcaccgaccttcttgacaagttttcgaacatttccgaaggcctgagcaactactcaatcatagacaaattggttaacatcgtggatgatcttgtggagtgtgtgaaggaaaacagcagcaaggatctcaagaagtcctttaagtccccggaaccccgtctgtttacccctgaagagttcttccggatctttaacagatcgatcgatgcatttaaggactttgttgtcgcatctgaaacttcggattgtgtggtgagctcaactctttcgcccgagaaagattctagggtgtcagtgactaaaccatttatgcttcctccagtggctgcatccagcctcagaaatgatagctcatcatcaaacagaaaggcgaaaaacccgccaggtgacagctccctgcattgggcagcgatggctcttcctgcgctcttctccttgattataggatttgcatttggagccctctactggaagaaacgacagccatccctcacccgagcagtcgaaaacattcaaatcaacgaggaagataacgagatctccatgttgcaggagaaggaaagagaattccaagaagtg

SEQ ID NO: 14889 - DNA, 819 bp, synthetic construct
  misc_feature 1..819: note = source = /note="Description of Artificial Sequence: Synthetic coding sequence"
  source 1..819: mol_type = other DNA
atgaaaaagacacaaacctggatactgacctgtatctacctccagctgttgctgttcaatcccctcgtgaaaacggaagggatatgccgcaaccgggtgacaaacaacgttaaggatgtcacaaagctggtggccaaccttcctaaggactatatgatcaccctgaagtacgtacccgggatggatgtgctaccctcacactgctggatcagtgagatggttgtgcagcttagcgactccctgacagatctgctggataaattctctaacatctcagagggactttccaattactccatcatagacaagctggtgaatattgtggatgaccttgtcgaatgcgtgaaagagaacagcagcaaggatctgaaaaaaagctttaaatcccctgaacctcggttgttcacccccgaagaattcttcagaatcttcaatagatcaatcgacgccttcaaagattttgtggtggcatcagagacttccgactgcgtggtctcttccactctgagtcccgaaaaagactcaagggtctcagtgacaaaacccttcatgctccctcccgtggcggcatcttctcttaggaacgacagctcctccagcaatcggaaagccaagaacccgcccggcgactcctctcttcactgggctgccatggctcttccggccctgttcagtctgataatcgggttcgcatttggggccctctattggaaaaagcgccagcccagccttaccagggccgtcgagaacatccagataaatgaggaggataatgaaatcagtatgctacaggaaaaagaaagggagtttcaggaggtg

SEQ ID NO: 14890 - DNA, 819 bp, synthetic construct
  misc_feature 1..819: note = source = /note="Description of Artificial Sequence: Synthetic coding sequence"
  source 1..819: mol_type = other DNA
atgaagaaaacccaaacctggatcttgacttgtatctaccttcagctgctgctgttcaacccgctggtcaagacggaaggaatttgccgcaatcgcgttaccaacaacgtcaaggacgtaaccaagctcgtggcgaacctccccaaggactacatgatcacgctcaagtacgtgccgggcatggacgtgttgccatcgcactgctggatttcggaaatggtggtgcagttgtcagacagccttactgatcttctggataagttctccaacatatcagaaggactgtctaattactcgatcatcgataaactggtgaacatcgtggacgacctggtggaatgcgtcaaggagaattcctctaaggacctgaagaagagtttcaaatcaccggaacctcggctgttcaccccggaggagtttttcagaatctttaaccgctcgatcgatgcctttaaagatttcgtcgtggcctccgagacttccgactgcgtggtatcgtcaaccctctcgccggagaaggactcgcgggtgtccgtgactaagccattcatgctgccaccagttgctgcaagctcactcaggaacgattccagctccagtaacagaaaagccaagaaccctccgggtgacagttctctccattgggcagcgatggccctccccgcgctgttctcacttatcatcggattcgcctttggggctctctattggaaaaagcggcaaccttcgcttactcgtgcagtcgagaatatccagattaatgaggaagataatgaaatctccatgctgcaagaaaaggagcgagaattccaggaagtg

SEQ ID NO: 14891 - DNA, 819 bp, synthetic construct
  misc_feature 1..819: note = source = /note="Description of Artificial Sequence: Synthetic coding sequence"
  source 1..819: mol_type = other DNA
atgaaaaaaacccagacatggatactgacctgtatttatctgcagttactgctgttcaaccccttggttaaaacggagggtatctgtcgcaatcgggtgaccaataatgtcaaggatgtgactaagctggtggcaaacctgcctaaggactacatgatcaccctgaaatatgtgcccggcatggatgtgctccctagtcactgctggatttcagaaatggtggttcagctaagcgactccttaacagacctgctggataagttctcgaacatatctgaagggctgtccaattacagtatcatagataagctagtaaatatcgtcgacgacttagtggagtgcgtcaaggaaaacagttctaaggatttgaaaaagagtttcaagtcacctgagccccggctgtttacaccagaggagttctttcggatattcaatcgcagcattgatgcattcaaggacttcgttgtcgctagtgagactagcgactgtgtggtgtccagcactctgtcaccggaaaaggactctcgggtttccgtaacaaagcccttcatgctgccgcccgttgccgcctcctcgctgagaaatgattcatcttcttcaaatcgcaaggccaagaaccctccgggcgacagcagcctacactgggcagcaatggcgctccccgctctattctctctgatcatcggatttgcctttggtgcgttatattggaaaaagcgccaacccagtctcactcgggcggtcgaaaacatccagattaatgaggaagataacgagatctcaatgcttcaggagaaagaacgggagttccaggaggtg

SEQ ID NO: 14892 - DNA, 819 bp, synthetic construct
  misc_feature 1..819: note = source = /note="Description of Artificial Sequence: Synthetic coding sequence"
  source 1..819: mol_type = other DNA
atgaaaaagactcagacctggatcctcacttgcatttatctccaactactgctgttcaatccgctggtcaaaacagagggcatctgtcggaaccgagtgacaaataatgtgaaggacgtgaccaagttggtagcaaatttgcctaaggattatatgattaccctcaaatacgtgccgggcatggatgttctgcctagccactgttggatttcagagatggtagtgcagctttccgatagcctgactgatctgctcgacaaattttcgaatatctctgaaggactcagcaactattccatcatcgacaagctcgtgaatatcgtggatgacctggtagagtgcgtgaaagaaaactcctcaaaggaccttaaaaagtcttttaaatctcctgagcctcgacttttcaccccagaagaattcttcagaatttttaacaggtccatcgacgccttcaaggactttgttgttgcgtcagagacaagcgactgtgtggtcagctccacactgagcccagagaaagactctcgtgtgtctgtcaccaaaccttttatgctcccacctgtggctgcaagcagtcttcgcaatgacagttctagctccaatcggaaggccaaaaacccacctggtgactcgtcactacattgggctgccatggcgttgcctgccctcttttctctaataatcgggtttgctttcggggcgctgtattggaaaaagaggcagccatccctgaccagagctgtggagaatatccagataaatgaggaggacaatgagatatctatgctgcaagagaaagaacgagagtttcaagaagtc

SEQ ID NO: 14893 - DNA, 819 bp, synthetic construct
  misc_feature 1..819: note = source = /note="Description of Artificial Sequence: Synthetic coding sequence"
  source 1..819: mol_type = other DNA
atgaaaaaaactcagacctggattcttacctgtatatatctgcagcttctcttgttcaaccccctcgtgaaaacagaaggcatctgtcgcaaccgtgtgactaacaatgtgaaagatgtgaccaagctcgtagcgaatctgcctaaggactacatgataacactcaaatatgttcctggcatggacgtcctgccgagccactgctggatctcagagatggttgtccagctgagcgattctttgaccgatctattggataagttctcgaacatcagtgagggactttcaaattacagcattattgataagctcgtgaacattgtcgacgacttagtggaatgcgtcaaggaaaactcaagcaaagatctcaaaaagtcatttaaatcgccggagcccagattgtttacccctgaagaattcttccgcatctttaaccggagcatcgatgcctttaaggacttcgtcgtggcatcagagacgtcagattgtgtggtttcatccactctgtcgccagaaaaagattcaagagtctcagtgaccaaacctttcatgctcccaccagtcgccgccagttctttgcgaaacgattcttcgagtagtaaccgtaaggcgaagaacccgcccggcgactcgtccctccattgggccgcaatggcactgccagctctgttcagtctaattattgggtttgcctttggggcgctatactggaaaaaaaggcagcctagcttaacccgcgctgtggaaaatattcagattaatgaggaggataatgagatctcgatgctacaagaaaaggaacgtgagttccaagaagtc

SEQ ID NO: 14894 - DNA, 819 bp, synthetic construct
  misc_feature 1..819: note = source = /note="Description of Artificial Sequence: Synthetic coding sequence"
  source 1..819: mol_type = other DNA
atgaaaaagacccagacctggattctgacctgtatctacctgcaactgcttttgtttaatcctcttgtgaaaaccgaagggatttgcagaaatcgcgtgaccaataacgtgaaggacgtgaccaagctggtggctaacctgcccaaggactacatgattactcttaagtatgtccccggaatggacgtgctgccttcgcattgttggatctccgagatggtcgtgcaactctccgactcgctgactgaccttttggataagttttcaaacatttcggagggactctccaactacagcataatcgataagctggtgaatatcgtggatgatctggtggagtgtgtgaaagaaaacagctcgaaggatttgaaaaagtccttcaaatcaccagaaccccgactttttactcctgaggaattctttcgaatattcaatcgatccatcgatgcattcaaggatttcgtggtggcctcagaaacttccgattgcgtggtatcttccacgttgagccccgaaaaggactcccgcgtgagcgtgactaaacctttcatgctgccacctgtcgcagcgagttctctgcggaacgattcctcatcctccaacagaaaggcaaagaaccctccaggcgactcctcgttgcactgggccgcaatggcacttcccgcacttttttcactcattattggtttcgcatttggtgcactgtactggaagaaaagacagccatccctgacccgcgctgtcgagaatatccagatcaacgaagaggataacgaaatctcgatgctgcaagaaaaggagcgcgaattccaagaagtg

SEQ ID NO: 14895 - DNA, 819 bp, synthetic construct
  misc_feature 1..819: note = source = /note="Description of Artificial Sequence: Synthetic coding sequence"
  source 1..819: mol_type = other DNA
atgaaaaaaacacagacatggatcctcacatgtatatatctgcagctgttactatttaatcctttagtgaaaacagaagggatctgtcgtaaccgggtaactaacaatgtgaaggatgtcacaaaactcgtggccaatttacccaaagattatatgataacgttaaaatatgtacccgggatggatgttcttcccagtcattgctggatctctgaaatggtggtgcagctatcggattcactcactgatctcctcgacaaattttccaacatttctgaggggctttcaaactatagtataatcgataaacttgtaaatattgtggatgatctcgtcgaatgtgtgaaagagaattcctcgaaagatctgaagaaatctttcaaaagtcctgagcctaggctgttcacacccgaagaatttttcaggatctttaaccggtcaatcgatgcattcaaggattttgtcgtagcttcagaaacaagtgattgcgtagtgtcctccactctctcaccagagaaagactctagggtgtccgtaactaaacccttcatgcttcctcccgttgctgcatcctcactacggaatgattccagttcctctaacagaaaagcaaaaaacccccctggggattcaagtctgcattgggctgctatggctctaccagctctgttctctctgataattggatttgccttcggagctctctactggaaaaaacggcaaccctccttgacaagggccgtcgaaaacatacagattaatgaagaagataacgaaatatccatgctccaggaaaaagaacgggaattccaggaagtc

SEQ ID NO: 14896 - DNA, 819 bp, synthetic construct
  misc_feature 1..819: note = source = /note="Description of Artificial Sequence: Synthetic coding sequence"
  source 1..819: mol_type = other DNA
atgaaaaagacccaaacttggatcttgacttgtatttacctgcagctgctgcttttcaacccgctggttaagactgagggaatctgtcggaacagagtcaccaacaatgtgaaagatgtcactaagctcgtcgctaacctcccaaaggactatatgattaccctcaaatacgtacctggaatggatgtgctgccgtcacactgctggatatccgagatggtggtgcaactgtccgacagccttaccgatctcctcgacaaattctcaaatatcagcgagggtttgagtaactactcgatcattgataagctggtgaacatcgtggacgatttggtcgaatgcgtaaaggagaactcgtcgaaggatttgaaaaagtcgtttaagtcgcccgagccgcggctgtttacgccggaagaattctttcggatcttcaatcgatcaatcgacgcattcaaagatttcgtggtggcctctgaaacgtccgactgcgtcgtctcctcaactctgtccccagagaaggattccagagtctccgtgactaagcctttcatgctccctccggtggctgcctccagccttcgcaacgactcgtcgagctccaaccgcaaggccaaaaatccgccgggggactcatctctgcattgggctgcaatggcactgccggcacttttctcactgatcatcggattcgccttcggcgcgctgtactggaagaagcggcagccgtccctgacccgcgccgtggaaaacatccagataaatgaagaggacaatgagatcagcatgctgcaagagaaagagagagaatttcaggaagtg

SEQ ID NO: 14897 - DNA, 819 bp, synthetic construct
  misc_feature 1..819: note = source = /note="Description of Artificial Sequence: Synthetic coding sequence"
  source 1..819: mol_type = other DNA
atgaagaagactcagacatggattctgacctgcatctatctccagttgttgctgtttaaccctctagtgaagacagagggcatatgtcgcaaccgcgtgaccaacaacgtcaaggacgtcactaagctggtggccaacctacccaaagattacatgatcactctcaagtatgtgcccgggatggatgtgctaccaagtcactgctggatcagcgagatggttgtgcaactgtccgatagcttgactgacttgctggataaattctctaatatttccgaagggttaagcaattattcgattattgataagctcgtgaacatcgtcgatgatctggttgaatgtgttaaggagaattcaagcaaagatcttaagaagtcatttaagagtcccgagcctcgattgtttacccccgaggagttcttcaggatcttcaatcgctcaatcgatgctttcaaggacttcgtggtggcctctgaaacatctgattgcgtggtctcctccacactgtccccagagaaggatagtagggtaagtgtcaccaagccgttcatgctgccacctgtggctgcttcctcccttagaaatgacagttcttccagcaatcggaaggccaagaatccccctggtgacagcagcctacactgggccgccatggcattgcctgctttgttttcgctgataatagggttcgcattcggagctttgtattggaagaaaaggcaaccgtcattgaccagggccgtcgagaatatccagatcaatgaagaggacaatgagatcagtatgctccaggaaaaagagcgcgagttccaggaagtg

SEQ ID NO: 14898 - DNA, 819 bp, synthetic construct
  misc_feature 1..819: note = source = /note="Description of Artificial Sequence: Synthetic coding sequence"
  source 1..819: mol_type = other DNA
atgaagaaaactcaaacctggatcctgacgtgcatctatttacagttgctcctgtttaatccccttgttaagaccgaaggcatatgtcgcaaccgcgtcactaataatgtaaaggatgtgaccaagctggtagccaacctacctaaagattacatgataactctgaagtacgtgcccggtatggatgtcctgccaagtcattgttggatttcagagatggtagttcagctgtccgattcactcacagatctgcttgacaaattctccaatatcagtgaaggcctttcaaactatagcataatcgacaagttggtgaatattgtcgacgatctcgtcgaatgcgtgaaggaaaattccagtaaggaccttaagaaaagttttaaaagcccagagcctaggctgttcactcccgaggagttttttaggatcttcaaccgttcaatcgatgcttttaaggatttcgtggtagctagtgagacctcagactgcgtggtgtccagtacgctctccccagaaaaagattctagggtttccgttactaagccatttatgttgcccccagtcgccgcttcttccctacgcaatgactccagctccagtaatcgcaaggcaaagaacccaccaggcgacagctctttgcactgggctgcaatggccctgcctgcgctgttcagcctgattataggttttgccttcggggccctgtattggaagaaacgccagccgtctttgacacgtgctgtggaaaatattcagatcaatgaggaagacaatgaaattagcatgctccaggagaaggagcgagaattccaggaggtg

SEQ ID NO: 14899 - DNA, 819 bp, synthetic construct
  misc_feature 1..819: note = source = /note="Description of Artificial Sequence: Synthetic coding sequence"
  source 1..819: mol_type = other DNA
atgaagaaaacccagacgtggattctgacctgcatctacctgcaattactgctgtttaaccctctggtgaaaaccgagggaatctgtcgaaacagggttaccaataacgttaaagatgttactaagctggtggccaatttacctaaggactatatgatcacacttaaatatgtcccaggcatggatgttctccctagccactgctggatctctgagatggtagtgcaacttagtgactccctgacagacttactcgacaaatttagcaatatttctgagggtttgagcaattacagcatcatagataaacttgttaacatagttgacgacttagtggagtgcgtaaaggagaattctagtaaggacctgaaaaagtccttcaagtcccctgagccccgcctgttcacgcctgaggagttcttcaggatatttaatcggtcgatcgatgcatttaaagactttgtggtcgcctcggaaacctctgactgcgtggtaagttctaccctgtcccctgagaaggattccagagtgtctgtcaccaagccattcatgctaccgcctgttgcggccagctccctgaggaatgactcctctagcagcaatcggaaggcaaagaatccgccaggggactcttccctacattgggctgctatggcactgcccgccttgttctcacttatcatcggctttgccttcggagccctttactggaagaagcggcagccttcgctgacgcgtgccgtcgaaaacatccagataaatgaggaagacaatgaaatatcaatgttgcaggagaaggagagagagtttcaggaagtg

SEQ ID NO: 14900 - DNA, 819 bp, synthetic construct
  misc_feature 1..819: note = source = /note="Description of Artificial Sequence: Synthetic coding sequence"
  source 1..819: mol_type = other DNA
atgaagaagacacagacatggattctgacttgtatctacctgcagctgcttcttttcaaccccctggtgaagaccgaaggaatttgccggaatagagtcaccaacaacgtaaaggatgtgacaaaactggtcgccaacctcccaaaagactatatgatcacacttaaatatgtcccgggaatggacgttctcccttcccattgttggatctccgagatggtagttcagctgtcagattctttgacagacctcctggataaattctctaacattagcgagggcctgagcaactactctattattgacaagcttgtgaatattgtagatgatcttgttgagtgtgtcaaggagaattcctctaaggatctcaaaaagagctttaagagtcctgagcctcgccttttcactcctgaggagtttttccgaatcttcaacaggtccattgatgcctttaaagactttgtggttgcctccgaaacatccgactgcgtggtgtctagcacactgtctccagagaaggacagccgggtgagcgtcaccaagccctttatgttgccgcctgtcgcggcaagctctctgaggaatgattcctcctcctctaacaggaaagctaaaaacccaccgggcgattcctctctgcactgggcagccatggctcttcccgctctgtttagtctgatcatcggattcgcctttggagccctgtactggaagaaacgccagccaagtttgacgcgcgctgttgaaaacatacagattaatgaggaggacaacgagatttccatgctgcaggaaaaggagagagagttccaggaggta

SEQ ID NO: 14901 - DNA, 819 bp, synthetic construct
  misc_feature 1..819: note = source = /note="Description of Artificial Sequence: Synthetic coding sequence"
  source 1..819: mol_type = other DNA
atgaagaaaacccagacctggattctgacctgcatctacctgcagcttctgctgttcaacccgctggtgaaaaccgaaggaatctgccggaatcgggtgaccaataatgtgaaagatgtgaccaagctcgtcgctaacctcccgaaggactacatgattaccctcaagtacgtgccgggcatggacgtgctgccttcccattgctggatttcggaaatggtggtgcaactgtcggattccctgactgaccttttggacaaattctccaacatctctgaagggctctcgaactactcgattatcgacaagctcgtcaatatcgtcgatgatctggttgagtgcgtcaaggaaaactccagcaaagatttgaagaagtctttcaagtccccggagccgcgcctgttcacgcctgaagagttcttccgaatctttaaccggtccatcgacgcctttaaggatttcgtggtagcctcagaaacctcagattgcgtggtgagctccaccttgtcacctgagaaggattcgcgagtgtccgtcactaagcctttcatgctgccaccggtcgcagcaagttctctcagaaacgattcaagctcatcgaacagaaaggcgaagaaccccccgggtgactcgtccttgcactgggctgcgatggccttgccggcgctcttctccctcatcatcggattcgcctttggagcactctactggaagaagcgccagccctcgctgactcgcgcggtcgagaatatccagattaatgaggaagataacgagatctccatgctgcaggaaaaggagcgcgaattccaggaagtg

SEQ ID NO: 14902 - DNA, 819 bp, synthetic construct
  misc_feature 1..819: note = source = /note="Description of Artificial Sequence: Synthetic coding sequence"
  source 1..819: mol_type = other DNA
atgaagaagactcaaacctggattctgacctgtatttacttgcaattgctattattcaaccctctggtgaagacggaggggatttgtagaaacagagttacaaacaacgttaaagacgtgactaagctcgttgctaatcttccaaaagactatatgattactctcaaatacgtcccaggcatggacgtacttccatcccattgttggatatcagaaatggtggtacagctatccgattcactgactgatctactggataaattcagcaacatttccgagggcttgagcaactactccataattgacaagttggtaaacatagtggatgatctagtcgaatgtgtgaaggaaaattcctccaaggacctgaaaaagtcctttaaaagccctgagccaagattgttcactcccgaggagttctttaggatcttcaaccggtccattgacgctttcaaggactttgttgtggcttctgagaccagtgattgcgttgtgtcctcaacactcagccccgagaaggactctcgtgtgtcagtgactaagccctttatgctgccaccagtggccgcttcaagcctgcggaacgacagtagctcctccaatagaaaagctaaaaatcccccaggcgactcaagccttcactgggcagcaatggctcttccagcgctattctcccttatcatagggtttgcatttggcgccctgtattggaagaagcggcagccaagtctgacccgagctgtcgagaatatacagatcaacgaagaagacaatgaaattagcatgctgcaagaaaaggaacgggaatttcaggaagta

SEQ ID NO: 14903 - DNA, 819 bp, synthetic construct
  misc_feature 1..819: note = source = /note="Description of Artificial Sequence: Synthetic coding sequence"
  source 1..819: mol_type = other DNA
atgaagaaaactcaaacgtggatcttgacctgtatctaccttcagcttctgcttttcaatccacttgtaaagaccgagggaatttgcagaaatcgcgtgactaataacgtgaaagatgtgaccaaacttgtggcaaatctgcctaaggattacatgataactctcaaatacgtgcccgggatggatgtcctgccctctcactgttggattagcgaaatggtcgtgcaactctcggatagcttgactgaccttctcgataagttttcaaacatcagcgagggactgagcaattactcgattattgataagctcgtgaacatcgtggatgaccttgtggagtgtgtgaaggaaaattcatcgaaggacctcaagaagtccttcaagtcccccgagccacgtctgttcacgccagaagagtttttcagaatctttaacagatcgattgacgcctttaaggactttgtggtggcaagcgagactagcgactgtgtggtgtccagcactctgtcgcccgagaaagactcccgcgtgtcggtcaccaagccttttatgcttcctccggtggcggcatcctcgcttaggaatgatagctcgtcgtccaacagaaaggctaagaaccctccaggtgatagctctctgcactgggccgcaatggcactgcctgcgctgttctcattgatcattggatttgcatttggagcactgtactggaaaaagagacagccgagcttgactcgagccgtggagaacattcaaatcaacgaagaagataatgaaatcagcatgctccaagaaaaggaaagagaatttcaggaagtg

SEQ ID NO: 14904 - DNA, 819 bp, synthetic construct
  misc_feature 1..819: note = source = /note="Description of Artificial Sequence: Synthetic coding sequence"
  source 1..819: mol_type = other DNA
atgaagaagacacagacttggattcttacgtgcatctatttgcagctgttgttattcaaccctctcgtgaaaacggaggggatatgtcgcaatagagtaacaaacaatgttaaagacgtgaccaaactggtggccaacctgcccaaagactatatgattactctgaaatacgtgccaggaatggacgttctgcctagtcactgttggatatcagaaatggtcgtccagttgtctgactcacttaccgatctccttgataaattctccaatatctctgaaggactttccaattactccattatcgacaagcttgtgaacatcgtcgatgacttagtggaatgtgttaaagagaacagctcaaaggaccttaagaaaagttttaagtcaccagagccccgtctgtttactcccgaagagttttttcgtatcttcaatagatctattgacgccttcaaagactttgtggtcgcttcagagacctcagactgcgtcgtctcatctactttatcaccagaaaaggatagccgcgtcagcgtcacaaaacctttcatgttgccaccagtcgctgcttcttcgctaaggaacgattcgagctcttccaataggaaggccaaaaatccccccggggattcaagcctacactgggctgctatggcgctaccagcgttattttctctgatcatcggctttgcattcggcgccttgtattggaaaaagcgccaaccctctctgacccgagccgtggaaaatatacagatcaatgaagaagacaacgagatctcaatgttgcaggagaaggaaagggagttccaggaagtc

SEQ ID NO: 14905 - DNA, 819 bp, synthetic construct
  misc_feature 1..819: note = source = /note="Description of Artificial Sequence: Synthetic coding sequence"
  source 1..819: mol_type = other DNA
atgaaaaagacacagacgtggattttgacctgtatctatctgcagttactgctgtttaatccactcgtcaagacagaggggatctgtaggaaccgagttaccaacaacgtgaaggacgtcaccaagttggttgccaatctgcctaaggactatatgatcaccttgaaatatgtccccggcatggacgtactgccctcacattgctggatcagtgaaatggtcgtacagttgtctgatagtctcacagacctcctggacaaatttagtaatatctcagaagggctgtccaattactctattattgataaattggtaaacatcgtggatgacctagtagaatgcgtaaaggaaaatagctcaaaagatcttaaaaaatcattcaagtccccagagccgagactttttacaccagaagagtttttccgcatatttaaccggtccatcgatgcattcaaagatttcgtcgtggcgtctgagacatccgactgtgtcgtatccagcacactttccccggaaaaagatagtcgcgtgtccgtgaccaaaccctttatgcttcctcccgtcgctgcatcttctttgcgcaatgactccagttcatccaaccggaaggcaaaaaatccaccaggagactcctccctgcactgggcggccatggcccttcctgcccttttctccctgataatcgggttcgcgtttggcgcactgtactggaaaaagcgccaacctagcctgactcgcgcagtggaaaatatacagatcaatgaggaagacaatgagataagtatgctgcaggaaaaagagagggaattccaggaggtg

SEQ ID NO: 14906 - DNA, 819 bp, synthetic construct
  misc_feature 1..819: note = source = /note="Description of Artificial Sequence: Synthetic coding sequence"
  source 1..819: mol_type = other DNA
atgaagaaaacgcaaacttggatccttacctgtatttacctgcagcttctgctctttaacccactcgtcaaaacggagggcatttgcagaaatcgggtcactaacaacgtcaaagatgttactaagctggtcgcaaatcttcccaaggattacatgatcactcttaagtatgtgccgggaatggatgtgcttccgtcgcattgttggattagcgaaatggtggtccaactttcggactccttgaccgatctcctcgataagttttccaacatttcggaaggactcagcaactactccatcatcgataagctggtgaacattgtggatgacctggtcgaatgtgtgaaggagaattcctcgaaggatctgaaaaagtcattcaaatcgcccgagccacgtctgttcacgccggaagagttttttcggatcttcaaccgctcgatcgatgcgttcaaagatttcgtcgtggcatccgaaacttcggattgcgtggtgagctctaccctgagcccagagaaggattcaagagtgtctgtgaccaagccttttatgcttcctccagtggcagcgtcgtctctgagaaacgattcctccagctcgaatagaaaagccaagaatcctcctggtgactcatccttgcactgggcggctatggctctgcctgcactttttagcctcataattggatttgcgtttggcgctttgtactggaagaagcgacagccatcactgaccagggcagtggagaatattcaaatcaatgaggaagataatgagatctcgatgctccaggaaaaagaaagggagtttcaagaagtc

SEQ ID NO: 14907 - DNA, 819 bp, synthetic construct
  misc_feature 1..819: note = source = /note="Description of Artificial Sequence: Synthetic coding sequence"
  source 1..819: mol_type = other DNA
atgaaaaagacccagacatggatcttaacgtgtatatatctccaactgctgctgtttaacccccttgttaaaaccgaaggcatttgtcggaacagggtaacaaataatgtcaaggacgtgactaaactagtagccaatctgcctaaggattatatgatcacgctcaagtacgtgccaggcatggatgtcctaccgagtcactgttggatcagcgaaatggtggtgcagttatcagacagtcttactgacctgctggacaagtttagtaacatcagtgagggtctctctaactactcaattatcgataagctggtaaacatcgtcgatgacttagtggagtgcgtaaaagaaaattccagcaaggatctcaaaaagtccttcaagagtcctgagccacggctctttacccctgaggaatttttccgtatcttcaatcggtccatagatgcctttaaggactttgtggtcgcctccgaaactagcgattgcgtggtgtcatccaccctttccccagaaaaggattccagggtgtcagtgacgaagcctttcatgttaccccctgttgccgcgagtagcctccgtaatgacagctcttctagtaatagaaaggctaagaatcccccaggcgattcctcccttcattgggctgccatggcgcttcccgcattatttagcctcataatcggttttgccttcggggctctgtactggaaaaagcggcagccttctctgactcgagcagttgaaaacatccagatcaacgaggaggacaacgaaatctccatgttgcaggagaaagaacgcgagttccaggaagtg

SEQ ID NO: 14908 - DNA, 819 bp, synthetic construct
  misc_feature 1..819: note = source = /note="Description of Artificial Sequence: Synthetic coding sequence"
  source 1..819: mol_type = other DNA
atgaagaagacccagacttggattctgacctgcatctacctgcaacttctcctgttcaacccattggtcaagacggagggcatctgccggaaccgtgttactaacaacgttaaggatgttacaaaactagtcgcaaatctgcccaaggactatatgatcactcttaaatatgtgcccggtatggacgtcctgcctagtcattgctggatttccgagatggtggtacagctgtcagacagtctgacggatctgctggacaaattctctaacatcagtgaggggctgagtaactattccattattgataagctagtaaacatcgttgatgacctagtagaatgcgtgaaagaaaattcttccaaggacctcaaaaaaagcttcaagtctcctgagccaagattatttacacccgaggagtttttcaggatttttaatcgttcgatcgatgccttcaaagactttgtcgtcgcctcagagacgagtgattgtgtcgtgtcctctaccctctcccccgagaaagacagtagagtttctgtcacgaaaccctttatgcttccacccgtggccgcttcatccctgcggaacgactcaagctcctcgaatcgtaaagccaaaaatccccccggagatagcagtttacattgggcagccatggccttgcccgcgctgttttcactaattatcggatttgcgtttggcgctttgtactggaagaaaaggcagccatctctcacgcgcgcagttgagaatattcagatcaacgaggaagacaatgagataagcatgctgcaagaaaaggagagggaattccaggaagtc

SEQ ID NO: 14909 - DNA, 819 bp, synthetic construct
  misc_feature 1..819: note = source = /note="Description of Artificial Sequence: Synthetic coding sequence"
  source 1..819: mol_type = other DNA
atgaaaaaaactcagacttggattctcacatgtatctatctccagcttctactctttaatcccctcgtgaaaactgaaggaatatgccgaaaccgggttacgaacaatgtaaaggacgtcactaaactggttgcaaacctgcccaaggattacatgataacactcaaatatgtgccagggatggacgtacttccttcgcattgttggataagtgaaatggtggtccagctgtctgactccctaacagatctattggataagtttagtaacatatcagaagggctatcaaactactctataatcgataaacttgtcaatatcgttgatgatttggtggaatgtgtcaaagaaaattcctcaaaagatctgaaaaagagtttcaaatcacctgaaccacggctgttcactcctgaagagttctttagaatctttaatagatctatcgatgcctttaaagacttcgttgtggcctctgaaacttccgactgtgttgtctcgtctactctctcgcctgaaaaagattctagagtgtctgtaactaaaccttttatgttacctcccgtagcagcaagttctttacgcaatgattcttcatcaagtaaccgaaaagccaaaaacccaccaggggattcttcattgcattgggctgcaatggctttaccagcccttttttcactcatcattgggtttgccttcggagccctctattggaaaaaaagacagccttcactcacacgggctgtggaaaatatccaaataaacgaggaagataacgaaatatcaatgctacaggagaaagagcgagaattccaggaagtg

SEQ ID NO: 14910 - DNA, 819 bp, synthetic construct
  misc_feature 1..819: note = source = /note="Description of Artificial Sequence: Synthetic coding sequence"
  source 1..819: mol_type = other DNA
atgaagaaaacgcaaacctggatactcacttgtatctacctgcaactgctgttgtttaacccactggtgaaaactgaaggaatctgcaggaatcgggtgactaacaacgtgaaagatgtcactaagctggtggcgaatctccctaaggactacatgattacgctgaagtacgtgcccgggatggatgtgctcccatcccattgttggatctcagaaatggtggtgcagctttcggacagcctgactgacctgcttgataagttctcaaacatctcggaagggctctcgaactactctattatcgacaagctggtcaatattgtggacgatctggtggaatgcgtgaaggaaaactcctcaaaggatctcaagaagagctttaagtccccggaaccccggctctttacccctgaggaattctttcgtatcttcaatagatccattgatgcattcaaagattttgtcgtggcgtcggagactagcgattgcgtcgtgtcgagcacgctgtcgcccgaaaaggactccagagtgtccgtgactaaaccattcatgctgcctcccgtggctgcctcgtcccttcgaaacgactcgagctcgtccaaccgaaaggcgaagaacccacctggtgattcctcgcttcactgggcagctatggcactgcccgcgctcttctcactgatcatcggatttgcatttggagccctttactggaagaagagacagccttcgcttacccgggcggtggaaaacatccagatcaacgaagaagataatgagatttcgatgctccaagaaaaagagagagaatttcaagaggtg

SEQ ID NO: 14911 - DNA, 819 bp, synthetic construct
  misc_feature 1..819: note = source = /note="Description of Artificial Sequence: Synthetic coding sequence"
  source 1..819: mol_type = other DNA
atgaagaaaacccaaacctggattcttacttgtatttacctgcagcttcttcttttcaatccgctcgtcaaaactgaaggaatttgtcggaatcgggtcacgaataatgtcaaggacgtcactaagctggtcgcgaacctgcctaaggactacatgattactctcaaatacgtgcccggaatggatgtgctgccttcgcattgttggatcagcgaaatggtggtccagctttcggactccctcacggatttgctggataagtttagcaatatctccgaaggtctgtcgaattactcgattatcgataagctggtcaatatcgtggacgacctggtcgaatgcgttaaagaaaactctagtaaggatcttaagaagtcgtttaagtcgccggagcctcgcttgttcaccccggaggagttctttagaattttcaacagaagcattgatgcgtttaaagactttgtcgtggcatcagagacttcggattgtgtggtgagctcaacgctctcgcccgaaaaggattcaagagtgtcggtgaccaaaccatttatgctccctcctgtggctgcatcatcgctgcggaacgacagctcctcgtccaaccgaaaggcgaaaaacccaccgggtgactcttccctccactgggcggccatggcgcttcccgccctgttctcgctgatcatcggctttgcatttggtgcactgtactggaaaaagcgacaacctagcttgaccagggccgtggagaatattcaaatcaatgaggaggataacgaaatctccatgcttcaagaaaaggaaagagagtttcaagaagtg

SEQ ID NO: 14912 - DNA, 819 bp, synthetic construct
  misc_feature 1..819: note = source = /note="Description of Artificial Sequence: Synthetic coding sequence"
  source 1..819: mol_type = other DNA
atgaaaaagacccagacctggattctgacttgtatatacctgcagctcctgctgtttaatcctctcgtgaaaaccgaaggaatctgtcgcaatagagtgaccaacaacgtcaaggatgtcactaagctggttgcaaaccttcccaaggattacatgattactctcaagtacgtgccagggatggacgtccttccttctcattgctggatctcggaaatggtggtgcaactctccgacagcctgaccgatcttcttgacaaattctccaatatctcggaaggcctgagcaactactcgataattgataaactggtgaatattgtggatgatctcgtcgaatgtgtcaaggaaaacagctcaaaggacttgaagaaatcatttaagtcgcctgaacctcggctgtttaccccggaggaattcttccgcatctttaatcgatcaatcgatgcatttaaggattttgtggtggcgtcggaaacttcggattgcgtggtcagttcgaccctgagcccggagaaggattcccgggtatcagtcaccaaacccttcatgcttcctcctgtggcagcatcgagcctgagaaatgattcctcatcatccaacaggaaagccaagaatcctcctggagattccagccttcactgggcggccatggcactgccggcgttgttttcactcatcattggttttgcatttggtgcactgtactggaaaaagcggcagccttcgctgacccgggccgtcgagaatattcaaatcaatgaagaggataacgagatcagcatgttgcaggagaaggaacgggaatttcaagaggtc

SEQ ID NO: 14913 - DNA, 819 bp, synthetic construct
  misc_feature 1..819: note = source = /note="Description of Artificial Sequence: Synthetic coding sequence"
  source 1..819: mol_type = other DNA
atgaagaagacacagacctggattctgacttgtatctacctccagctgctgctgttcaaccctctcgtgaagacagagggaatctgccggaacagggtcacaaacaacgtgaaagacgttaccaagttagtagcaaatctgccgaaagactacatgatcaccttaaaatacgtaccgggtatggacgtactgccttctcattgctggatttcagaaatggtagtgcaactgtccgatagcctcactgacctgctggacaaattctcgaacatcagcgaagggctgtcaaattacagcattattgataagttggtgaatattgtcgatgatctcgtggagtgtgtaaaggaaaacagtagtaaagatttgaagaagagcttcaagtcaccagagcccagactctttactcctgaagaattcttccgaatattcaataggagcatcgatgcctttaaggacttcgtcgttgcttcggagacctccgactgtgtcgtctcttccacgttgtccccggagaaagatagtagggttagtgtcactaagccgttcatgctccctcccgttgctgcctcctccctgagaaacgattcttcttcttcaaatagaaaggctaaaaacccccctggggattcatcccttcactgggctgccatggctcttcctgccctgttttccctgatcatcgggttcgctttcggcgccctctattggaagaagcgacagccatcactgacccgcgccgtggaaaacatccagatcaatgaggaggataatgaaatctcaatgttgcaggagaaggagagggagttccaggaagtg

SEQ ID NO: 14914 - DNA, 819 bp, synthetic construct
  misc_feature 1..819: note = source = /note="Description of Artificial Sequence: Synthetic coding sequence"
  source 1..819: mol_type = other DNA
atgaagaaaacccagacctggatcttgacctgtatttacctgcagctgctgctgtttaacccgttggtcaaaaccgagggtatctgccgcaatcgcgtgaccaacaacgtgaaagacgtcactaaactggttgcgaacctccctaaggactacatgatcacgttgaagtacgtgcccggaatggatgtgctgccttcgcattgctggatctccgaaatggtggtgcagctttcagactctctgactgacctgctggacaaattcagcaacatctccgagggactttcaaactactcaatcattgacaagctcgtgaatattgtagacgatctcgtggagtgcgtgaaggagaactctagcaaggatctgaagaagtccttcaagagcccggaacccagactgtttactccagaggagttttttcggatcttcaaccggtcaatcgatgcatttaaggattttgtggtcgcttcagaaacctccgactgtgtcgtctcaagcactctcagcccggagaaagactcgagagtgtcagtgactaaacctttcatgttgccgccggtggctgcgtcctcgctgagaaatgactcgtcctccagcaaccggaaggccaaaaacccgccaggagactcgtccctgcactgggccgccatggcgctgccggccctgttctccctgatcatcggctttgcgttcggggccctgtactggaagaagcgccagcccagcctgaccagagcagtagaaaacatccaaatcaacgaggaagataacgaaatctccatgcttcaagaaaaggaacgcgagttccaagaggtg

SEQ ID NO: 14915 - DNA, 819 bp, synthetic construct
  misc_feature 1..819: note = source = /note="Description of Artificial Sequence: Synthetic coding sequence"
  source 1..819: mol_type = other DNA
atgaaaaagacccagacctggatcctgacgtgcatctatctgcagctgctgctattcaatccactggtgaaaaccgagggaatttgccgcaatagggttactaacaatgtcaaggacgttactaaactggttgcgaatctgcctaaagattatatgatcaccctgaagtacgttccaggaatggatgtgctgccatcccactgttggatctcggagatggtagtgcagctgagcgatagtttgacagatctcttggataagtttagcaacatctcggagggcctaagcaattactccattattgataagctggtgaacatcgtcgatgacttggtggaatgtgtgaaagaaaacagctccaaagacctgaaaaaaagctttaagagcccggagccgcgcctgtttactccagaggaattttttcgcatcttcaatcgctctatcgacgcgtttaaagactttgttgtcgcttcggaaacgtccgactgcgtggtgagctcaacgctaagccccgagaaagacagccgcgtgagcgtcacgaagccatttatgttgcccccagttgcggcgagcagcctcaggaatgacagttcaagctcgaatcgcaaagcgaagaatccaccgggggacagcagcctgcattgggcggctatggccttacccgctctgtttagcctgatcatcgggtttgcttttggcgctctgtactggaagaagcgccagccctccctgacccgtgccgttgagaacattcaaatcaacgaggaggataacgaaattagtatgctgcaggagaaggagcgggagtttcaagaggtg

SEQ ID NO: 14916 - DNA, 819 bp, synthetic construct
  misc_feature 1..819: note = source = /note="Description of Artificial Sequence: Synthetic coding sequence"
  source 1..819: mol_type = other DNA
atgaagaagacacagacatggatcttgacctgcatctatttgcagttacttctgttcaacccgttggtgaagacagagggtatctgcaggaacagagttactaacaacgtaaaggacgtgaccaaactggtggcgaacctccctaaagactatatgatcactttgaagtacgtccctgggatggacgttctgcctagccactgttggatttccgaaatggtcgtgcagctctccgatagcctgacagatttgctcgataaatttagtaacatcagcgaggggctttcaaattactctatcattgataagttggttaatattgtcgatgacctcgtggaatgtgttaaggagaatagcagtaaggatctgaagaaaagtttcaagtctcctgagccgaggctgttcacaccagaggagttttttagaatcttcaaccgctctatcgacgcattcaaggactttgtggtcgccagtgagacaagcgactgcgttgttagttcgactctgtcaccggagaaggattctagagtaagcgtgaccaagccattcatgttgcctcctgtggcagccagctccctgagaaacgactcatctagctctaacagaaaggccaaaaacccgccaggcgattcttctctgcactgggctgccatggcactgcccgctctgttcagcctcatcattgggtttgcttttggtgccctgtactggaagaagagacagcccagcctgacccgagccgtggaaaatatacagatcaacgaagaagacaatgagatcagcatgctgcaggagaaggagcgcgagttccaggaggtt

SEQ ID NO: 14917 - DNA, 819 bp, synthetic construct
  misc_feature 1..819: note = source = /note="Description of Artificial Sequence: Synthetic coding sequence"
  source 1..819: mol_type = other DNA
atgaagaaaacccagacttggattttgacctgcatctatctccaactgctgctgttcaatcctctcgtcaaaaccgaggggatctgccggaaccgggtgactaacaacgtaaaggacgttactaagctggtcgctaacctgccgaaagattacatgatcactctcaaatacgtaccgggaatggatgttctcccatctcattgttggatttcggaaatggtggtgcagctttccgacagcctgacggacttgttggacaagttctcaaatatctcggagggtctgagcaattactccatcatcgataagctggtgaacatcgtcgatgatttggtggaatgcgtgaaggaaaattcgtctaaggacctgaaaaagtccttcaagtcgccggaaccacgcctcttcaccccggaagagttctttagaatctttaatcgtagcatcgacgccttcaaggattttgtggtggcgtctgaaacctcagactgcgtggtgagctcaaccctgtccccggaaaaagactcccgcgtgtcagtcactaagcctttcatgctgcctccggtcgccgccagctcccttaggaacgacagttcatcttccaaccgcaaggcaaagaatccacccggagacagttcgttgcactgggctgccatggcgctcccagcgcttttttcgctgatcattggcttcgcattcggagccctctactggaagaagcgccagccctctctgactagagcagtcgaaaacattcaaatcaacgaggaagataacgagatcagcatgctccaagagaaagagcgggagttccaggaagtg

SEQ ID NO: 14918 - DNA, 819 bp, synthetic construct
  misc_feature 1..819: note = source = /note="Description of Artificial Sequence: Synthetic coding sequence"
  source 1..819: mol_type = other DNA
atgaaaaagacgcagacatggattcttacttgtatatatctgcagctcttactctttaatcccttagtcaagacggaagggatttgccggaacagagtaaccaacaacgttaaggatgtcaccaagctagttgccaaccttccaaaggactatatgattacactgaaatatgtgcccggcatggatgtgctcccaagccactgttggatatctgagatggtggttcaacttagtgactctctcaccgacctgctagacaaatttagtaacatctcagagggcctgagtaactatagcattatcgacaagttagtgaatatcgtggatgacttagtggagtgtgtgaaggagaattcatccaaagacctgaaaaaaagctttaaatcccccgaaccacgcctgttcacccctgaagagttttttagaatattcaatcgctccattgatgcttttaaagacttcgtggtggccagcgagaccagcgactgtgtagtttcatctaccctcagcccagagaaggactcccgagtgtcagtgacaaaaccattcatgctgcctccagtggctgcctctagtctccggaatgactcctcttccagtaaccgcaaggctaagaacccgccgggcgacagtagccttcactgggcggcaatggctcttcccgcactcttctctcttattatcgggttcgcctttggggctctatattggaaaaagcgccagccatcacttacccgcgccgtggagaatatccaaattaatgaagaagataacgagataagcatgctgcaggagaaggaacgcgagtttcaggaggtg

SEQ ID NO: 14919 - DNA, 819 bp, synthetic construct
  misc_feature 1..819: note = source = /note="Description of Artificial Sequence: Synthetic coding sequence"
  source 1..819: mol_type = other DNA
atgaagaaaactcaaacttggatcctgacttgcatttatctgcaactcctcctgtttaatcctcttgtaaaaaccgaagggatctgcaggaaccgggtgaccaacaatgtgaaggatgtgacgaagctggtggccaacctcccgaaggactatatgatcaccttgaagtacgtcccggggatggacgtgctcccttcacactgctggataagcgagatggtggtgcagctgtcggattcgctgaccgacctgctcgacaaattctcgaatatcagcgaaggcctgagtaactactccatcatcgacaagctggtgaacattgtggatgacctggtcgaatgtgtcaaagagaactcctctaaagatctcaaaaagtcgttcaaatcgccggaacctaggctgttcactccagaagagtttttccggatattcaacagatcaatcgacgcttttaaggacttcgtcgtcgcaagcgaaaccagcgattgcgttgtgtcctccacgctctccccagaaaaagatagccgggtttcggttaccaagcccttcatgttgcctcctgtggctgcgtcatccctgcgtaacgatagctctagctcaaatagaaaggccaagaatcccccaggcgattcgtccctccattgggcagctatggcccttccagcacttttttcgttgatcattggattcgctttcggagccctctactggaagaaacgccagccgtcactcactcgcgcggtggaaaacatccaaatcaatgaggaggacaacgaaatcagtatgctgcaggaaaaggaaagagagttccaggaagtg

SEQ ID NO: 14920 - DNA, 819 bp, synthetic construct
  misc_feature 1..819: note = source = /note="Description of Artificial Sequence: Synthetic coding sequence"
  source 1..819: mol_type = other DNA
atgaagaagacacaaacctggattctgacctgtatctacctgcaactcctgttattcaatcccctagtcaaaactgaagggatttgtaggaacagggtgacaaacaacgtcaaggatgttactaaactggtggcgaacctacctaaggactatatgatcacattgaagtatgtcccaggtatggatgtacttccatcacattgctggatttcggagatggtcgtgcagctatcagattctctcactgacctcttggataagttcagtaacatctctgagggactgtcgaactactcgattattgataagcttgtcaatatcgtggatgatctcgtcgaatgtgtcaaagagaacagtagtaaggacctcaagaaatctttcaaatctcctgagccgcgccttttcacaccggaggagttctttcgcatcttcaaccgttcaattgatgcgttcaaggatttcgtcgtcgcctctgagacatctgactgcgtcgtcagtagtacactgtcccccgaaaaggactcccgagtaagtgtcaccaaacctttcatgctacctcccgtggctgcttcctcgctgaggaacgattctagctcatccaacaggaaggccaagaatcccccgggggatagttcccttcattgggctgccatggcgctacctgccctgttcagcttaatcatcggcttcgcgtttggggcgttgtattggaagaagaggcagccatcgctaacgagagccgtagaaaacatccagatcaacgaggaggacaatgaaatttcgatgcttcaggaaaaggaacgcgaattccaggaggtc

SEQ ID NO: 14921 - DNA, 819 bp, synthetic construct
  misc_feature 1..819: note = source = /note="Description of Artificial Sequence: Synthetic coding sequence"
  source 1..819: mol_type = other DNA
atgaaaaagactcaaacctggatccttacttgtatatacctgcaacttctgctctttaatcctttggtaaagaccgaaggaatctgtcgcaacagagtgactaataacgtgaaggacgttaccaagctcgtcgcgaaccttccaaaagactatatgatcacccttaagtacgtgccgggaatggacgtcttgccctcgcattgctggatctcagagatggtggtgcagctgtccgacagcctgacggatcttctcgacaagttctccaacatctccgaagggttgagtaactactctattatcgacaaactcgtgaacatcgtggacgatctggtcgaatgcgtgaaggaaaacagcagcaaagatctgaagaagagcttcaaatccccggagccgaggttgttcactcctgaggagtttttccgcatcttcaacagatcaatcgacgcgtttaaggattttgtggtggcgtccgaaacctcagactgcgttgtgagcagtaccctctcacctgaaaaggactcccgggtgtcagtcactaagcctttcatgctcccacctgtagctgcctcgtctctgcgcaatgattcctcatcctcgaatagaaaggccaagaatccgccaggggattcgagcctccactgggctgcaatggctctgccagccctgttcagcctgatcattggtttcgccttcggcgcactctactggaaaaagaggcaaccctcactcacccgggctgtcgagaacatccagatcaacgaggaggataatgaaattagcatgctgcaggaaaaggaacgagaattccaggaagtg

SEQ ID NO: 14922 - DNA, 819 bp, synthetic construct
  misc_feature 1..819: note = source = /note="Description of Artificial Sequence: Synthetic coding sequence"
  source 1..819: mol_type = other DNA
atgaaaaagactcagacatggatcttgacctgcatctacctgcagctgctgctgttcaatccattggtcaaaaccgagggtatatgcagaaatagagtaacaaataatgtgaaagacgtgacaaaactcgttgccaatctgcccaaggactatatgattacactcaaatacgtgccaggcatggacgtattgccatctcactgctggatatctgagatggtggtgcaactatctgactcgctcacggacctccttgacaagtttagtaacatttcagaagggctgagtaactattccattatcgacaaactggtcaacatcgtagacgacctggtagaatgtgtgaaagagaattcatccaaagacctgaaaaagtcctttaaaagcccagagcctagactttttaccccagaggagttttttagaatctttaaccgttccattgacgctttcaaggattttgttgtggccagtgaaaccagcgattgcgtcgtgtctagtactctgagccccgagaaggattccagggttagcgtcactaagcccttcatgctgccccctgtggctgcctcaagcctgagaaacgattccagttcatctaaccggaaggcaaagaacccccccggtgactctagcctgcactgggccgccatggctctccccgctctcttttccctcatcatagggttcgcattcggggcactatattggaaaaagcgccaaccatccctgacacgcgccgtcgaaaatattcagataaatgaggaagataacgagatttccatgttgcaggagaaggaaagagagttccaggaagtg

SEQ ID NO: 14923 - DNA, 819 bp, synthetic construct
  misc_feature 1..819: note = source = /note="Description of Artificial Sequence: Synthetic coding sequence"
  source 1..819: mol_type = other DNA
atgaaaaagactcagacttggattctgacatgcatatacctccagctgctgctgtttaaccccctcgttaaaactgagggtatatgcaggaaccgtgtgaccaacaatgtgaaggatgtaactaaactcgtggctaacttgccaaaggattatatgattaccctgaaatatgtgcccggtatggacgtcttgccaagccactgttggatatctgaaatggtggtgcagctttctgactcccttaccgatttgctggacaagttttccaacatttccgagggcctctccaactatagtatcattgacaagctggtgaacatcgtcgacgatctcgttgaatgcgttaaagagaattcaagcaaggatttgaagaagagcttcaagtcccccgaacccagattgttcacccccgaggagtttttcaggatttttaaccgctccatcgacgcatttaaggactttgtagtggcttccgagactagtgactgtgttgtgtccagcaccctgtctcccgaaaaggactctcgcgtttctgttacaaagcctttcatgctcccccctgtagccgcttccagtcttaggaatgacagttctagctccaaccgcaaggctaagaacccccctggcgattcctctttgcattgggctgcaatggcattgcccgctcttttcagcctgatcatcggattcgctttcggagccctctactggaaaaaacgccagcccagtctcactcgcgctgttgaaaatatccagatcaacgaggaggataatgaaatatctatgctgcaggaaaaagagagggaattccaggaagta

SEQ ID NO: 14924 - DNA, 819 bp, synthetic construct
  misc_feature 1..819: note = source = /note="Description of Artificial Sequence: Synthetic coding sequence"
  source 1..819: mol_type = other DNA
atgaagaaaacacagacttggatccttacatgtatttacctgcaactgttactgttcaatcctcttgtaaagacagaagggatatgcagaaaccgtgttacgaataacgttaaagacgtaacaaaactggtcgccaacctgccgaaagattatatgatcactcttaagtatgttccgggaatggatgtacttccgagccattgctggatttccgagatggtagtccagttatcggactcactaacagacctcctagacaaattttcaaatattagcgaaggacttagtaattactcaattatcgataagcttgtaaatatcgtagacgatttggtagagtgcgtcaaagagaatagttcaaaagatcttaaaaaatcattcaaatctccagaacctaggttgttcacaccggaagaattttttcgcattttcaatcgctcaatcgatgcgtttaaagactttgtggtggcgtccgaaacgagcgattgtgtcgtcagcagtacgctttctccggaaaaagattctagagtatctgtaaccaagccgtttatgctaccgccggtggcggcttccagtttacggaacgatagctcaagctcaaacaggaaagccaaaaacccgccgggtgattctagtttacattgggctgcgatggcacttccggctttgtttagtttgatcattggttttgcgtttggcgcactttattggaagaagcgacaaccctctctaacacgtgccgtagagaatattcagattaatgaggaagacaacgaaatctctatgcttcaagaaaaagaaagagaatttcaagaagtc

SEQ ID NO: 14925 - DNA, 819 bp, synthetic construct
  misc_feature 1..819: note = source = /note="Description of Artificial Sequence: Synthetic coding sequence"
  source 1..819: mol_type = other DNA
atgaagaaaactcagacctggatcctgacctgtatttacttgcaactgcttctctttaaccctctggtcaagactgaaggaatttgccgcaatcgagtcactaataacgtcaaggacgtcaccaagctcgtggccaacctgcccaaagactatatgattaccctcaagtacgtgccgggaatggacgtgctcccgtctcattgttggatatccgaaatggtggtgcagctgtcagactccctcacggatctgctcgacaaattctccaatatctcggaaggactttccaattacagcattattgataagttggtgaacattgtggatgatcttgtcgaatgtgtgaaggagaactccagcaaggatctgaagaagagcttcaaatccccagagccccgtcttttcacccccgaagagtttttcagaatctttaatcgcagcatcgacgcatttaaggattttgtggtggccagcgagacgtcagattgcgtggtttcatcaactctgtcaccagaaaaggattcacgggtttcggtgaccaaaccttttatgcttcctccggtggccgcgtcatcgcttagaaacgatagctcatcatcgaatcggaaggcaaagaaccctcccggcgactctagcctgcactgggcagcaatggcactcccggctcttttttctcttatcatcggctttgccttcggtgcattgtactggaagaaaagacagccatcccttaccagagcagtcgaaaacatacagattaacgaagaagataacgaaatttccatgcttcaggaaaaagagcgcgagttccaagaagtg

SEQ ID NO: 14926 - DNA, 819 bp, synthetic construct
  misc_feature 1..819: note = source = /note="Description of Artificial Sequence: Synthetic coding sequence"
  source 1..819: mol_type = other DNA
atgaaaaaaacgcaaacgtggatattaacgtgtatatatttacaattattattatttaatccgctagttaaaacggaaggtatatgtcgtaatcgagtaacgaataatgtaaaagatgttacgaaactagtagcgaatttaccgaaagattatatgataacgttaaaatatgtaccgggtatggatgttttaccgtcgcattgttggatatcggaaatggtagttcaattatcggattcgctaacggatttactagataaattttcgaatatatcggaaggtctatcgaattattcgataatagataaattagtaaatatagtagatgatttagttgaatgtgtaaaagaaaattcgtcgaaagatctaaaaaaatcgtttaaatcgccggaaccgcgattatttacgccggaagaattttttcgtatatttaatcgatcgatagatgcgtttaaagattttgtagtagcgtcggaaacgtcggattgtgttgtttcgtcgacgttatcgccggaaaaagattcgcgtgtatcggttacgaaaccgtttatgctaccgccggttgcggcgtcgtcgttacgtaatgattcgtcgtcgtcgaatcgtaaagcgaaaaatccgccgggtgattcgtcgttacattgggcggcgatggcgttaccggcgctattttcgctaataataggttttgcgtttggtgcgctatattggaaaaaacgtcaaccgtcgttaacgcgagcggtagaaaatatacaaataaatgaagaagataatgaaatatcgatgctacaagaaaaagaacgagaatttcaagaagta

SEQ ID NO: 14927 - DNA, 819 bp, synthetic construct
  misc_feature 1..819: note = source = /note="Description of Artificial Sequence: Synthetic coding sequence"
  source 1..819: mol_type = other DNA
atgaagaaaacccaaacctggatccttacctgtatatacctccaactgctcctctttaacccgctcgtgaaaactgaaggaatctgtagaaacagagtcactaataacgtgaaggatgtgaccaagctcgtggctaacctgccaaaggattacatgattaccctcaagtacgtgccaggaatggatgtgcttccttcccactgttggatctccgaaatggtggtccagcttagcgattctcttacggatctgcttgataagttctcgaacattagtgaaggtctttccaattacagcatcatcgacaagctggtcaatatcgtggatgatctggtggagtgtgtcaaagaaaactcatcgaaagatctgaaaaagtcctttaagtccccagagccgagactgttcacccctgaggaattcttccggatattcaacaggtcgattgacgcatttaaggattttgtcgtcgcttcggagacttcagattgcgtggtgtcctcgactttgtcaccagagaaggatagcagagtgtccgtgaccaagcctttcatgcttcccccagttgccgcatcctcacttcgaaacgatagctcaagcagcaatcggaaagcaaagaatcctccaggtgattcttccctgcactgggccgcaatggcacttccagctcttttttcgctgattatcggatttgcgtttggggccctgtactggaagaagagacaaccttctctcaccagagcagtggagaacattcagataaatgaggaggacaatgaaatttccatgcttcaagagaaagaaagagaatttcaagaagtg

SEQ ID NO: 14928 - DNA, 819 bp, synthetic construct
  misc_feature 1..819: note = source = /note="Description of Artificial Sequence: Synthetic coding sequence"
  source 1..819: mol_type = other DNA
atgaagaagactcaaacgtggatactcacatgtatataccttcagttgctgctatttaacccgctggtaaaaaccgagggtatttgtaggaatcgagtcacaaataatgtcaaggatgtcaccaaattggtagccaatctcccaaaggactacatgatcacactcaaatacgtgcccggcatggacgtgctgcccagccattgctggatttctgaaatggtggttcagctttccgactctctgaccgacctgctcgataaattttctaacatatctgaagggctgagtaactacagcatcatcgacaaactggtcaatatagtggacgatctggtcgagtgtgtgaaagaaaactcctcgaaagatctgaagaagtcctttaagagccccgagcctcgcctgttcaccccggaggagttcttccggattttcaaccgctccattgatgcattcaaggacttcgttgttgcgtctgagacttccgactgtgtagtgtcgagcacactcagcccagaaaaagatagcagagtgagtgtcaccaagccctttatgctgccccccgtggctgccagtagcctgcgaaatgatagctcaagtagcaatcgaaaggctaagaatcctcctggtgacagcagcttacactgggccgctatggccttgcccgccttgttttctttgatcatcggattcgctttcggggctctgtactggaagaaaagacagccctcactgacgagagctgtggagaatattcagattaatgaggaagacaatgagatctcaatgctgcaggagaaagaaagagaatttcaggaagtg

SEQ ID NO: 14929 - DNA, 819 bp, synthetic construct
  misc_feature 1..819: note = source = /note="Description of Artificial Sequence: Synthetic coding sequence"
  source 1..819: mol_type = other DNA
atgaagaagacccaaacgtggattctcacttgcatctacctccagttacttttgttcaacccgctggtgaagactgagggtatatgccgtaacagagtcacgaacaacgtcaaggacgttactaagctcgtcgctaacttgcccaaggattacatgatcaccttgaagtatgttcccggcatggacgtgcttccctcccactgctggatttcggagatggtcgtgcagctgagcgactcgctaactgacctgcttgataagttcagcaatatctcagaaggcctctccaactattctatcatcgacaagctggtgaacattgtcgatgatttggtcgagtgtgtgaaggagaactcatccaaggacttgaagaagtcttttaagagtcctgagcctcggctgttcacgccggaggagttcttccgaattttcaatagatccatcgacgcctttaaggacttcgtcgttgcatcagagacctcggattgcgtcgtgtcttccaccctgtccccggagaaagactcccgagtgtcggtcactaagccctttatgcttccgcctgttgccgccagcagtctccgtaacgattccagcagttcgaatcgtaaggcgaagaacccccccggtgatagcagcctgcactgggccgcaatggcactgcctgcccttttcagccttatcattggattcgcctttggtgcgctgtactggaagaaacgacagccaagcctaacgagggcggtcgaaaacatccaaataaacgaggaagacaacgagatcagtatgctgcaggagaaggagcgcgaattccaggaggtg

SEQ ID NO: 14930 - DNA, 819 bp, synthetic construct
  misc_feature 1..819: note = source = /note="Description of Artificial Sequence: Synthetic coding sequence"
  source 1..819: mol_type = other DNA
atgaagaaaacccagacttggatcctcacttgcatctacttgcaactgttgctgttcaacccgctggtcaagaccgagggaatctgccggaacagggtgaccaacaacgtgaaagatgtgactaagctcgtcgccaacctgccgaaggactacatgatcactctgaagtacgtgcctggaatggatgtgcttcctagccactgttggatctcggaaatggtcgtgcagctgtcggactcgctgaccgatctcctggataagttttcaaatatctcagagggactgagcaattactcaatcatcgacaagctggtcaatattgttgacgacctcgtggaatgcgttaaggaaaactcctccaaggatctgaaaaagagcttcaaatcaccagagcctcggctcttcactccggaagagttcttccggatctttaatcgttcgatcgacgccttcaaagatttcgtggtggcctccgagacttcagattgcgtggtcagctcaaccctgtccccggaaaaggacagccgcgtgagcgtgaccaagccatttatgctccccccggtggcggcttcctcgctcagaaatgactcctcgtcgtccaaccggaaggcaaagaacccgccgggagattcatcactgcactgggccgcaatggcactgccagccctttttagccttatcattggattcgcgttcggggcgctgtactggaaaaagcgccagcccagcttgactcgggcagtggagaatatacagatcaacgaggaggacaacgaaatctcgatgctccaagagaaagagagagagttccaggaggtg

SEQ ID NO: 14931 - DNA, 819 bp, synthetic construct
  misc_feature 1..819: note = source = /note="Description of Artificial Sequence: Synthetic coding sequence"
  source 1..819: mol_type = other DNA
atgaagaaaacacagacctggatccttacatgtatctacctgcagctcctcctgtttaacccgctggttaaaacagaaggtatatgtaggaacagggtaacaaacaacgttaaagatgttaccaaactggtggctaacttgcccaaggactatatgataactctgaagtacgtccccggaatggacgtgttgccgtcacactgttggattagcgagatggtggtgcagcttagcgattctctgacagacctgttggacaaattcagcaatatttcagagggcctgtccaactattctatcatcgataaattggtcaatatcgttgacgatctggtcgagtgcgtcaaagagaacagcagcaaagatcttaagaagtcctttaagagccctgagccgagactgttcacccctgaagagtttttccgcatctttaaccgcagcatcgacgcctttaaagatttcgttgtagccagtgagacctctgattgcgtggtgagttctactctgagtcctgaaaaagactccagagttagcgtgaccaaaccatttatgctgccccctgtggccgcatctagtctgaggaatgattcctcatcttccaacagaaaggctaaaaaccctcccggtgattctagcctgcattgggctgcaatggctcttcctgctttattcagcctcatcatcggcttcgcatttggtgcattgtattggaaaaagcggcagccgtcccttacaagagcggtggagaatatccagatcaacgaagaagacaacgagatatcaatgctgcaagaaaaggaacgagagttccaagaagtt

SEQ ID NO: 14932 - DNA, 819 bp, synthetic construct
  misc_feature 1..819: note = source = /note="Description of Artificial Sequence: Synthetic coding sequence"
  source 1..819: mol_type = other DNA
atgaagaagactcagacctggatcctcacctgtatttacctgcaacttttgctttttaatcccctcgtgaaaacggagggcatatgcaggaaccgggtgactaacaatgttaaggatgtgacgaaactggtggccaatctgcccaaggactacatgatcactctgaagtacgtgcctgggatggatgtgcttccctcacactgttggatatctgaaatggtggtacagctctctgattccctgaccgacctcctcgacaaattttccaacatctctgaaggcctgtcaaattattctatcatcgataagcttgtcaacatcgtggatgacctggtcgaatgcgtaaaggagaatagttcaaaagaccttaagaagagctttaagagcccagaaccccgattgtttacccctgaggaatttttcaggatctttaatcggtccattgatgcttttaaggattttgtcgtcgcctctgagaccagcgactgcgttgtgtccagcacactctctcctgaaaaggactctagagtgagtgtgacgaagccctttatgcttcccccagtggctgccagctccctgaggaatgacagttcatcatctaaccgcaaagccaaaaaccccccgggcgacagctctctgcattgggccgccatggccctgcccgcactgttttccttgatcatcgggttcgcttttggcgccttgtattggaaaaagagacagccgagccttacacgcgccgtagagaatatacagatcaatgaagaggataacgagatctcaatgcttcaggagaaggaaagagagtttcaggaggta

SEQ ID NO: 14933 - DNA, 819 bp, synthetic construct
  misc_feature 1..819: note = source = /note="Description of Artificial Sequence: Synthetic coding sequence"
  source 1..819: mol_type = other DNA
atgaagaaaactcagacctggattctcacctgcatctacttgcaacttctgctgtttaaccctctggttaaaacggaaggtatatgccgcaatcgagtcacgaacaatgtgaaagatgtaaccaaactggtggcaaatcttccgaaggattacatgatcactctgaagtacgtccctggaatggacgtgctgccatcccattgctggatctccgaaatggtggtacagctttcggacagcctcaccgatctgctggacaagttctctaacatctcggagggcttgtcgaactactcaatcatagacaaactcgtgaatatcgtggatgatttggtcgagtgcgtcaaggagaattcctccaaggacctcaaaaagtccttcaagtcaccggaacctcggctcttcaccccggaggagttcttcagaatcttcaaccggagcattgacgcttttaaggattttgtggtggcctctgagacttccgactgtgtggtgtcctcgactctgtcgcccgaaaaggactcacgggtgtcggttactaagccgtttatgctgcccccggtggccgccagctccctcagaaacgacagttcaagctcaaaccgcaaggcgaaaaacccaccaggcgactcaagcctccactgggccgcgatggcgctgccagccctgttctctctgattattggattcgcattcggggctctttattggaagaaaaggcaaccgtcactcacccgcgcagtggaaaacatccagatcaatgaagaagataacgagatctccatgctgcaggagaaggagcgcgaattccaagaagtc

SEQ ID NO: 14934 - DNA, 819 bp, synthetic construct
  misc_feature 1..819: note = source = /note="Description of Artificial Sequence: Synthetic coding sequence"
  source 1..819: mol_type = other DNA
atgaagaaaactcagacttggattcttacctgtatctacctccagctgctacttttcaatccactcgtcaaaactgaagggatctgcaggaatcgcgtcacgaacaacgtgaaggatgtgaccaagctcgtggctaatctcccgaaagattacatgataacccttaagtacgtgccaggcatggatgttctcccaagccattgttggatctctgagatggtcgtgcagttgagcgactctctgaccgacctattggataagttttcaaatatctccgaggggctgagcaactattcaattattgataagcttgtcaacatcgtggacgatctggtcgagtgcgtaaaagaaaattcctctaaagacctaaaaaaatcctttaaatctcctgagcctcggctattcaccccagaggagttctttcgaatattcaacagatccatcgacgcttttaaagattttgtggtagcttcagagactagcgactgtgtggtgagctcgacactgtcccctgagaaggatagcagagtgagcgtcaccaagcccttcatgctcccgccagtggctgcatccagtctccggaacgatagcagctcttccaatcgcaaagcgaagaacccaccaggggacagcagtttacactgggccgctatggcgctaccagctctgtttagcctaatcataggatttgcgtttggagcactgtactggaagaagcgtcaaccatcgctcactagagctgtcgagaacatacagattaatgaggaggacaacgagatcagcatgttgcaggagaaggagcgcgagtttcaggaagta

SEQ ID NO: 14935 - DNA, 819 bp, synthetic construct
  misc_feature 1..819: note = source = /note="Description of Artificial Sequence: Synthetic coding sequence"
  source 1..819: mol_type = other DNA
atgaagaaaacccagacttggattctgacttgtatctaccttcagcttcttctcttcaacccgttggtcaaaacggaaggaatttgtaggaacagagtgactaacaacgtgaaggatgtgacgaagctcgtggcaaacctcccgaaagactacatgattacccttaagtacgtgccaggaatggatgtgctccccagccactgctggatttcagagatggttgtgcagctcagcgactcgttgaccgatctgttggacaaattcagcaacatttccgagggactctcgaactacagcatcattgataagctcgtcaatattgtcgacgatctggtcgagtgtgtcaaggaaaattcctcgaaagacctgaagaagtcctttaagtcacccgaaccacgcctgtttacccccgaggaattctttaggatcttcaaccgctcgattgatgcctttaaagattttgtcgtcgcatcagagacttcagattgtgtggtgtcgtcaaccctctcacctgagaaggatagtagagtctccgtgacgaagcctttcatgcttcctcctgtggcagcatcgtcgcttcgcaacgacagctcgtcctcgaaccgaaaagcaaagaaccctccaggcgactcttccctgcattgggcagccatggccctgcccgccctgtttagcctcatcattgggtttgcgttcggcgcgctttactggaagaagaggcagccatctctcactcgtgctgttgaaaacatacaaatcaacgaagaggataacgaaatttccatgctgcaggaaaaggaaagagaattccaagaagtc

SEQ ID NO: 14936 - DNA, 819 bp, synthetic construct
  misc_feature 1..819: note = source = /note="Description of Artificial Sequence: Synthetic coding sequence"
  source 1..819: mol_type = other DNA
atgaaaaagacccagacttggattttgacttgtatttacttgcagttgctgttgtttaacccactcgtgaaaaccgaaggcatctgcaggaatagggtgaccaataacgttaaggatgtgaccaagctggtcgccaatctcccgaaggactacatgatcacgctgaaatatgttccaggtatggacgtgcttccgtcgcactgctggatctcggaaatggtcgttcagctgtccgactcactcactgatttgctggataagttcagcaacatttcagaaggactgtcaaactactcaatcatcgacaagctggtcaatatcgtcgacgacctggtggaatgcgtcaaagagaattccagcaaggacctgaagaagtcgtttaagtccccagaacctagactgtttactcctgaagagttcttccgcattttcaaccgctcaatcgatgcatttaaggacttcgtggtggcttcggaaacctcagattgcgtggtcagctctactctctcgccggagaaggattcccgcgtgtcagtgaccaagccgtttatgcttccacccgtcgctgcgagttccctgcggaatgactcatcgtcgtcgaaccggaaggcaaaaaacccgccaggagattcgtcactgcactgggccgcaatggccctgccagccttgttttcgctgatcatcgggttcgctttcggtgcactgtactggaagaagcgccaaccgtctctgacccgcgccgtcgagaatatccagatcaacgaagaagataatgaaatctcgatgcttcaagagaaggagagggagtttcaggaagtg

SEQ ID NO: 14937 - DNA, 819 bp, synthetic construct
  misc_feature 1..819: note = source = /note="Description of Artificial Sequence: Synthetic coding sequence"
  source 1..819: mol_type = other DNA
atgaagaaaacgcaaacttggattttgacatgcatttatctgcaacttttgctttttaatccacttgttaaaacagaaggaatttgtagaaacagagtcactaataatgttaaagatgttacaaaattagtcgctaatctgcctaaagattatatgatcaccttgaagtatgtccctgggatggatgttctgccttcacattgctggattagcgaaatggtcgtccagctgtcggactcattgacagatcttcttgataaattttctaacatttctgaggggctatcgaattacagtataatcgacaaactcgttaatattgttgatgaccttgtggaatgtgttaaagagaattcgtccaaagatttgaaaaagagttttaaaagcccagagccacgattgttcacaccagaagagttttttagaatttttaatcgttcaattgatgccttcaaagacttcgtcgtggcgtcggaaacatctgactgcgtcgttagttcaactctttccccagaaaaggatagtcgagttagcgttactaaaccatttatgttgccacctgtggcagctagttcactcaggaacgatagttcctcttctaatcgtaaagccaagaacccccctggagattcttcattacattgggcagctatggccctcccggctcttttctctttgatcatcggattcgcatttggggcactctactggaaaaagagacagccaagtttgactagagcggtcgaaaacattcagatcaatgaagaggataacgagatctctatgttgcaagaaaaggaacgggaattccaagaagta

SEQ ID NO: 14938 - DNA, 819 bp, synthetic construct
  misc_feature 1..819: note = source = /note="Description of Artificial Sequence: Synthetic coding sequence"
  source 1..819: mol_type = other DNA
atgaaaaagacacaaacatggatccttacttgcatctatttgcagttgctcctgttcaatccactcgtaaaaaccgaaggcatatgtagaaaccgagtgacaaataacgtgaaagatgtgaccaaattggtcgccaacctgccaaaagactacatgattaccctgaagtacgtccccggaatggatgtgttacccagccattgttggattagcgaaatggtggttcagctctctgactctttgaccgaccttctggacaaattctctaacatatcagaaggtctgagcaactactcaatcatcgacaagctggttaacatcgttgacgaccttgttgaatgtgtgaaagagaatagcagcaaggatctgaaaaagagcttcaaatcacctgaaccaaggctgtttacgcctgaagagttctttagaatcttcaaccggagcattgatgcctttaaagacttcgtggtcgcctctgagacttcagactgcgtagtgtcatctaccctgagcccagaaaaggactctcgcgtgtcagtgacaaagccatttatgttgcctcctgtggcggctagctccctgaggaacgatagtagcagctcaaataggaaagcaaaaaatccgcccggagatagctccttgcattgggcagccatggcacttccagctctttttagccttattataggctttgctttcggcgcactgtactggaagaaaaggcagcctagcctgacacgtgctgtcgagaatatccaaattaacgaggaggataacgagatctctatgctgcaggaaaaagagagagaatttcaggaagtg

SEQ ID NO: 14939 - DNA, 819 bp, synthetic construct
  misc_feature 1..819: note = source = /note="Description of Artificial Sequence: Synthetic coding sequence"
  source 1..819: mol_type = other DNA
atgaaaaaaacacaaacatggattttaacatgtatctatttacaattattattatttaacccacttgttaaaacagaaggaatttgtcgtaatagagttacaaacaacgttaaagatgttactaaacttgttgctaatttaccaaaggattatatgattactcttaagtatgtcccagggatggatgttttaccaagtcactgctggatctcagaaatggttgtacaattgtctgattctcttacagaccttttagataaattttcaaatatctcagagggactttcaaattattcaattattgataaattggttaacattgtagatgatttagttgaatgtgttaaggaaaatagttctaaggatttaaaaaaatcattcaagtcacctgaaccaagattatttactccagaagaattttttagaatctttaatcgttcaattgatgcatttaaagattttgttgttgcttctgaaacttcagactgtgttgtttcgagtacactatcgcctgaaaaagattcacgtgtttcagttactaagccatttatgttaccaccagtagcagctagtagtttaagaaatgactcatcatcatcaaatcgaaaagccaaaaatccaccaggagattcatcattacattgggctgcaatggcattaccagctttgttttctttaattataggatttgcatttggagcattatattggaagaaaagacaaccaagtcttacacgtgctgtagaaaatattcaaattaatgaagaagataatgaaatttcaatgttacaagaaaaggaaagagaattccaagaagtt

SEQ ID NO: 14940 - DNA, 819 bp, synthetic construct
  misc_feature 1..819: note = source = /note="Description of Artificial Sequence: Synthetic coding sequence"
  source 1..819: mol_type = other DNA
atgaaaaagactcaaacgtggatcctaacttgtatttacctccaattgttactctttaatccgctggtaaaaaccgagggcatttgccgcaatagagtgaccaataatgtgaaggacgtgacaaagctggttgccaacctgcctaaagattacatgataacactgaagtatgtgccgggtatggatgtccttccatcacattgctggataagtgaaatggttgtccagctctccgactccttgactgatctgttggataagttctcgaacattagcgaagggctttccaactacagcattatcgataagctggtcaatatagtggacgacttagtcgaatgcgttaaggagaacagtagcaaagatctgaagaaatctttcaagtcacctgagcctcgcctgtttactccagaggagttttttagaattttcaatcgcagtatcgatgccttcaaagatttcgtggttgcaagtgaaaccagtgattgcgtggtgtcatccacgctttccccggaaaaggactctagggtgtccgtgacaaaaccctttatgctgcccccggtggctgctagtagtctccggaatgattcatctagctccaatcgtaaggcgaaaaatccgcccggcgattcctcgctgcactgggccgccatggcactgccggcgctcttcagcttgatcatcggtttcgcgttcggagccctttactggaagaagaggcagccctctctgacacgcgcagtcgaaaacatccagattaatgaggaggacaacgagataagtatgctgcaagagaaggagcgagaattccaggaggtc

SEQ ID NO: 14941 - DNA, 819 bp, synthetic construct
  misc_feature 1..819: note = source = /note="Description of Artificial Sequence: Synthetic coding sequence"
  source 1..819: mol_type = other DNA
atgaaaaagactcaaacctggatcctcacttgcatctacttgcagctgctgctgttcaaccctctggtcaagactgagggcatctgtaggaatcgtgtgaccaataacgtgaaggatgtgactaaactggttgcgaacctgccgaaggactacatgatcactctgaagtacgtcccagggatggacgtgctcccctcccactgctggatcagtgagatggtcgtgcagctgagcgactccctcaccgatctcctcgacaagttttctaacatttccgaaggcctgtccaactactcgatcatcgataagctggtgaatatcgtggatgaccttgtggaatgtgtgaaggagaattcgagcaaagatctgaaaaagtctttcaagtcgccggagcctcgactctttaccccagaagagttcttccggatcttcaacagatctattgacgccttcaaagattttgtggtggcgtccgaaacgtcggactgcgtggtgtcatccacgctttcacccgagaaggactccagggtcagtgtcaccaagccgttcatgctcccgccagtcgctgcttctagcctccgcaatgacagctccagctcaaatcgcaaggcaaagaatccacctggtgactccagccttcactgggcagccatggcgcttccagctttgttctccctgatcatcgggttcgcttttggagcactgtactggaagaaacggcaaccatcgctgacccgcgcggtcgaaaacatccagatcaacgaagaagataacgaaatctcaatgctccaggaaaaggaaagggaattccaggaggtc

SEQ ID NO: 14942 - DNA, 819 bp, synthetic construct
  misc_feature 1..819: note = source = /note="Description of Artificial Sequence: Synthetic coding sequence"
  source 1..819: mol_type = other DNA
atgaagaaaacccagacctggattctgacatgtatatatttacagctgttgctgttcaaccccctcgtgaaaacagagggtatttgccgaaatagggtgacaaataacgtgaaggatgtgaccaaacttgtggcaaacttgcctaaggactacatgattactctgaagtacgtgcccgggatggatgttctaccttcccactgttggatttcagagatggtggtgcaattatctgatagtctcaccgacttgctggacaagttctccaatataagcgagggactatctaactactcaatcattgataaactcgttaatatcgttgatgatctggtcgaatgtgtcaaggagaattcatccaaggacctgaagaaatcatttaaaagcccagaaccacgactcttcacccccgaagagttcttccgaatttttaaccgaagcatcgatgcattcaaagacttcgtggttgcaagtgaaacctccgactgcgtcgtgtccagtacgctatctcccgagaaggactccagggtgagcgtgaccaagccttttatgcttcctccagtcgctgccagcagcctgcgaaacgattcgagttcttctaatcgcaaggcaaaaaatcctccaggtgactctagtctgcattgggctgccatggctctgccagcactgttctccttgatcattggatttgcgttcggcgctctgtactggaagaaaagacagccgagtctgacacgcgccgtggagaacattcaaatcaacgaggaagataacgagatctccatgctgcaggaaaaggagcgtgagttccaagaagta

SEQ ID NO: 14943 - DNA, 819 bp, synthetic construct
  misc_feature 1..819: note = source = /note="Description of Artificial Sequence: Synthetic coding sequence"
  source 1..819: mol_type = other DNA
atgaagaaaactcaaacttggatcctcacttgcatttacttgcaacttctgctcttcaatccgcttgtcaaaaccgaaggaatctgccgtaaccgagtcactaacaacgtgaaggacgtgaccaagctggtcgcgaatttgccaaaggactatatgattaccctgaagtacgtgccgggcatggacgtgctcccgagccactgttggatttctgaaatggtggtgcagctgtcagactcactgacggacctgctggacaaattcagcaatatctccgaagggctgagcaactactccatcatcgacaagctggtgaatatcgtggacgatctcgtggagtgcgtcaaggagaactcctcgaaggatttgaagaagagcttcaagagcccggaacctcggctcttcacccccgaggagttctttagaatcttcaacaggtccatcgacgcatttaaggactttgtggttgccagcgaaaccagcgattgtgtggtgtcctcaaccctgtcccccgagaaagactcgcgcgtctcggtcaccaagccattcatgctgccacctgtcgcggcctcgtcactgaggaatgattcctcatcatcaaatcggaaagccaaaaatccaccgggagattcgtcgctccactgggccgcaatggcgctcccggcccttttctccctgatcatcggattcgccttcggggccctgtactggaaaaagagacaaccatcactgacccgggcagtggaaaacattcaaatcaacgaggaagataacgaaatcagcatgctccaggagaaggagagagaatttcaggaagtc

SEQ ID NO: 14944 - DNA, 819 bp, synthetic construct
  misc_feature 1..819: note = source = /note="Description of Artificial Sequence: Synthetic coding sequence"
  source 1..819: mol_type = other DNA
atgaaaaagacccaaacttggatcctgacttgcatctacttgcagctcctgctcttcaacccgctggtcaagaccgagggaatctgccggaaccgcgtcaccaataacgtcaaggacgtgactaagctggttgccaatctgccgaaagactacatgatcacgctgaagtatgtcccaggtatggatgtattgccgtcgcattgctggatctcggaaatggtggtccagctctccgactcgcttaccgatctgttggataaattctcgaatatctcagaaggactgagcaactacagcattatcgacaagctcgtgaacatcgtggacgatctcgtggagtgcgtgaaagaaaattcgtcaaaagatctgaagaagtcattcaagtctccggaaccacggctgttcaccccagaggaatttttccgcatcttcaaccgatctattgatgcgtttaaggattttgttgtggcctccgagacgtcagactgtgtcgtgtcgtccactctttcacccgagaaggactcgcgcgtgagcgtgaccaaaccgttcatgctccctccggtggccgctagctccctgagaaacgacagttcctccagcaacagaaaggctaagaatcctcccggagacagctccctgcactgggccgcaatggcgctcccagcactcttcagcctgatcatcgggttcgcgtttggcgccctctactggaagaagcgccagccttcgctgactcgggcagtggaaaacatacagatcaacgaagaggacaatgaaatttccatgcttcaagagaaagaaagggaattccaagaggtg

SEQ ID NO: 14945 - DNA, 819 bp, synthetic construct
  misc_feature 1..819: note = source = /note="Description of Artificial Sequence: Synthetic coding sequence"
  source 1..819: mol_type = other DNA
atgaagaagacccaaacctggatattgacctgtatctacctgcagcttcttttgtttaatccccttgtcaaaactgaggggatatgccgcaatagagtcaccaacaatgtcaaggatgtgactaaattagtggccaacctaccgaaggattatatgatcacactgaagtatgttcctggaatggacgtacttcccagccattgttggatttcagagatggtcgtgcagttatccgacagtttaactgacctcctcgataagttcagcaacatatcggaaggcctgtccaactattcaattattgataagctggtgaacatagtggatgacctcgtcgaatgcgtgaaagagaactcatccaaggatctcaagaagagctttaagagtcccgagccccggctgttcaccccagaagagttctttcgtatctttaacagatcgatcgatgcattcaaggattttgtcgtagctagcgagacatccgattgtgtcgtgtcttcaacactatcccctgaaaaggactcacgggtgagcgttactaagcctttcatgcttcccccagtagctgcaagctcactgcggaatgatagctcatcctctaacagaaaagccaaaaaccctcccggagactcatccctgcattgggctgccatggctttaccggcactgttttctctgataattggattcgccttcggcgcgctttattggaaaaagcgacaaccgtccttaacgcgcgccgttgagaacatccagatcaacgaggaggacaacgaaatctctatgctgcaagagaaagaaagggaattccaggaggtt

SEQ ID NO: 14946 - DNA, 819 bp, synthetic construct
  misc_feature 1..819: note = source = /note="Description of Artificial Sequence: Synthetic coding sequence"
  source 1..819: mol_type = other DNA
atgaagaagacgcagacttggattctcacttgcatttacttgcagctgctgctgttcaacccgttagtgaagacagaaggaatttgtcgaaacagagtgacgaataacgtgaaagacgtgacgaagctggtggccaatctgcccaaagattacatgattaccctgaagtacgtacctggcatggatgttttgccctctcactgttggatttctgagatggtggttcagcttagtgattctttaaccgatctgctcgataaattcagcaatatttccgagggtctctctaactatagtattatcgataaattggtcaacatcgtcgacgacctcgtcgagtgtgtcaaggagaattccagcaaagatctgaaaaaaagctttaaaagccccgagccaagactgttcactcccgaggaattcttcaggatctttaatcgaagtattgatgcctttaaagatttcgtggtggcctccgagacaagtgattgcgttgtctcctcaacactgagccctgaaaaggactctcgtgtcagtgtcacaaagccgttcatgcttccccccgtcgccgctagctcactaaggaatgactcgtcctcttccaacaggaaggccaaaaaccctccaggtgattctagcctgcattgggctgccatggccctgcccgcactgtttagcctaattatcggctttgcctttggtgctctatactggaagaagcggcagccgagcctcactcgagccgtcgagaacatccagatcaatgaggaggacaacgaaatcagcatgctgcaagaaaaggagagagaattccaggaagtg

SEQ ID NO: 14947 - DNA, 819 bp, synthetic construct
  misc_feature 1..819: note = source = /note="Description of Artificial Sequence: Synthetic coding sequence"
  source 1..819: mol_type = other DNA
atgaaaaagacgcaaacgtggatcctcacgtgtatttacctgcagcttcttctgttcaacccactcgtgaaaactgagggaatctgtcggaaccgggtcacgaataacgtcaaggatgtgactaaactggtcgcaaacttgcctaaggactacatgatcaccctcaaatacgtaccaggcatggatgtcctgccgtcccattgctggatctccgagatggtcgtccagctctcggactcgctcactgatctgttggataagttctccaacatatcagagggactgtccaactactcaatcatcgacaagctggtgaacatcgtcgacgacctggtcgaatgcgtgaaggagaattcgagcaaagatttgaagaagtcctttaagagcccagaaccgagattgttcaccccggaggaattcttccgaatcttcaatcggtccatcgacgccttcaaagacttcgtggtggcctcagaaacctcagactgcgtggtgtcatcgactctgtctccggagaaagactcaagagttagtgtgaccaagccgttcatgctgccgcctgtggcggcctcgtccctgaggaatgactcttcgagcagcaataggaaagctaaaaacccgccgggagattcgtcgctgcactgggccgcaatggcactgcccgcccttttctcgctgatcatcggttttgcttttggagctctctactggaaaaagagacaaccgagcctgacccgcgcagtcgaaaacatacagatcaatgaggaggacaacgaaatctcaatgctccaagaaaaagagcgcgaattccaggaagtg

SEQ ID NO: 14948 - DNA, 3036 bp, synthetic construct
  misc_feature 1..3036: note = source = /note="Description of Artificial Sequence: Synthetic coding sequence"
  source 1..3036: mol_type = other DNA
atgccggcgtcggcgccgccgcgtcgaccgcgtccgccgccgccgtcgctatcgctattattagtactactaggtctaggtggtcgtcgtctacgtgcggaaccgggtgatggtgcgcaaacgtgggcgcgattttcgcgaccgccggcgccggaagcggcgggtttatttcaaggtacgtttccggatggttttttatgggcggtaggttcggcggcgtatcaaacggaaggtggttggcaacaacatggtaaaggtgcgtcgatatgggatacgtttacgcatcatccgttagcgccgccgggtgattcgcgaaatgcgtcgctaccgctaggtgcgccgtcgccgttacaaccggcgacgggtgatgttgcgtcggattcgtataataatgtatttcgtgatacggaagcgctacgtgaactaggtgttacgcattatcgtttttcgatatcgtgggcgcgtgtattaccgaatggttcggcgggtgtaccgaatcgtgaaggtttacgatattatcgacgtttattagaacgtctacgtgaactaggtgttcaaccggtagttacgctatatcattgggatctaccgcaacgtttacaagatgcgtatggtggttgggcgaatcgagcgctagcggatcattttcgtgattatgcggaactatgttttcgacattttggtggtcaagtaaaatattggataacgatagataatccgtatgttgtagcgtggcatggttatgcgacgggtcgtctagcgccgggtatacgtggttcgccgcgattaggttatttagtagcgcataatctattattagcgcatgcgaaagtttggcatctatataatacgtcgtttcgtccgacgcaaggtggtcaagtttcgatagcgttatcgtcgcattggataaatccgcgtcgtatgacggatcattcgataaaagaatgtcaaaaatcgctagattttgtactaggttggtttgcgaaaccggtttttatagatggtgattatccggaatcgatgaaaaataatctatcgtcgatattaccggattttacggaatcggaaaaaaaatttataaaaggtacggcggatttttttgcgttatgttttggtccgacgttatcgtttcaactattagatccgcatatgaaatttcgacaattagaatcgccgaatttacgtcaactattatcgtggatagatttagaatttaatcatccgcaaatatttatagtagaaaatggttggtttgtttcgggtacgacgaaacgtgatgatgcgaaatatatgtattatttaaaaaaatttataatggaaacgttaaaagcgataaaattagatggtgtagatgtaataggttatacggcgtggtcgttaatggatggttttgaatggcatcgaggttattcgatacgtcgtggtctattttatgttgattttctatcgcaagataaaatgttattaccgaaatcgtcggcgttattttatcaaaaattaatagaaaaaaatggttttccgccgctaccggaaaatcaaccgttagaaggtacgtttccgtgtgattttgcgtggggtgtagtagataattatatacaagtagatacgacgttatcgcaatttacggatctaaatgtatatctatgggatgttcatcattcgaaacgtttaataaaagtagatggtgttgtaacgaaaaaacgtaaatcgtattgtgtagattttgcggcgatacaaccgcaaatagcgctattacaagaaatgcatgtaacgcattttcgtttttcgttagattgggcgttaatactaccgttaggtaatcaatcgcaagttaatcatacgatattacaatattatcgttgtatggcgtcggaattagttcgagttaatataacgccggtagttgcgttatggcaaccgatggcgccgaatcaaggtttaccgcgattactagcgcgacaaggtgcgtgggaaaatccgtatacggcgttagcgtttgcggaatatgcgcgattatgttttcaagaattaggtcatcatgtaaaattatggataacgatgaatgaaccgtatacgcgaaatatgacgtattcggcgggtcataatctattaaaagcgcatgcgctagcgtggcatgtatataatgaaaaatttcgacatgcgcaaaatggtaaaatatcgatagcgttacaagcggattggatagaaccggcgtgtccgttttcgcaaaaagataaagaagtagcggaacgtgtattagaatttgatataggttggctagcggaaccgatatttggttcgggtgattatccgtgggtaatgcgtgattggttaaatcaacgtaataattttttattaccgtattttacggaagatgaaaaaaaattaatacaaggtacgtttgattttctagcgttatcgcattatacgacgatactagttgattcggaaaaagaagatccgataaaatataatgattatttagaagtacaagaaatgacggatataacgtggctaaattcgccgtcgcaagtagcggttgttccgtggggtttacgaaaagtattaaattggctaaaatttaaatatggtgatttaccgatgtatataatatcgaatggtatagatgatggtttacatgcggaagatgatcaattacgagtatattatatgcaaaattatataaatgaagcgctaaaagcgcatatattagatggtataaatctatgtggttattttgcgtattcgtttaatgatcgaacggcgccgcgttttggtttatatcgatatgcggcggatcaatttgaaccgaaagcgtcgatgaaacattatcgaaaaataatagattcgaatggttttccgggtccggaaacgttagaacgtttttgtccggaagaatttacggtatgtacggaatgttcgttttttcatacgcgaaaatcgctattagcgtttatagcgtttttattttttgcgtcgataatatcgttatcgttaatattttattattcgaaaaaaggtcgtcgatcgtataaa

SEQ ID NO: 14949 - DNA, 3036 bp, synthetic construct; identical to SEQ ID NO: 14948
  misc_feature 1..3036: note = source = /note="Description of Artificial Sequence: Synthetic coding sequence"
  source 1..3036: mol_type = other DNA

SEQ ID NO: 14950 - DNA, 3036 bp, synthetic construct
  misc_feature 1..3036: note = source = /note="Description of Artificial Sequence: Synthetic coding sequence"
  source 1..3036: mol_type = other DNA
atgcccgcctcagcgccacccaggcggccacggcccccaccacctagtctctccctcctgttagtgttactcgggcttgggggacggcgccttagagccgaacctggagatggggctcagacttgggctaggtttagtcggccccctgctcccgaagcagccggactcttccagggaacttttcccgatgggttcctttgggccgttgggtctgccgcctaccagacagagggagggtggcagcagcatgggaagggggcctctatctgggatactttcactcatcatcccctggccccacccggagattctcggaacgcatcactgccactcggagccccctcaccattgcagcctgccacaggagatgtggcatcagacagttataacaacgtattccgcgatacagaagccctccgagagctgggagttacacattaccgcttcagtataagttgggcccgagtactccctaatgggtccgccggagtacccaaccgagagggactgcgatattatcggcgcctgctcgaaagacttcgggaactcggggtccagcctgtggtcacactttatcactgggatctgcctcagaggctccaagacgcatatggagggtgggcgaatcgagctttagccgatcactttcgcgattacgcagaactatgttttcggcacttcgggggacaggttaaatattggattactatcgataacccttatgtcgtggcctggcacggatacgccacaggaaggctcgctcctgggatccgggggtccccaaggttagggtatctggtggcacacaatctgcttcttgcgcatgctaaagtctggcatttatataacacatcattccgaccaacacaagggggacaggtgtctatagctctcagttcccactggataaatcctcgccgaatgactgatcactctataaaagagtgccagaaatctctagactttgtgcttggatggtttgctaaacccgttttcatagatggagactaccctgaaagtatgaaaaataacctgagttctatactaccagatttcacggaatcagaaaagaagttcatcaaagggactgctgatttctttgctctttgtttcgggcctacgctttcttttcagctactagatcctcatatgaagtttcgacagttggaatctcccaacttgagacagctcctcagttggatcgatcttgaattcaaccaccctcagatttttatagtggaaaacggatggttcgtttctggaacaactaaaagagatgatgctaaatacatgtattacctcaaaaaattcatcatggaaactctgaaggccatcaaactggatggggtggatgtgatcgggtacacggcatggtcacttatggatggattcgaatggcaccgagggtactcaatccgcagagggcttttttacgtcgacttcctaagtcaggacaagatgctcctaccaaaaagttctgcacttttttatcagaaactcattgaaaaaaacggattccctccactgcccgaaaaccagccattggaggggacatttccatgtgactttgcatggggggtcgtagataattatatacaggtagatactactctatctcagtttacagatcttaacgtgtatctttgggatgtccatcatagtaagagactgataaaggtggatggagtcgtaacaaaaaaaagaaaatcctactgtgtagattttgccgcaatccagcctcagatagccctgctgcaggaaatgcatgtaacacattttcggttctcactcgattgggccttaatactgcccttagggaatcagtctcaagtcaatcacactattcttcagtactaccgatgcatggccagtgagcttgtacgggtgaacatcacaccagtggtcgccctatggcagccaatggcacccaatcagggactaccaagacttttggcaaggcagggggcatgggagaacccctatacagcactagctttcgccgaatacgctcgactttgtttccaggaacttggacatcatgttaaattgtggattacaatgaatgaaccatatacacggaatatgacatattccgctggacacaacttgctaaaggcacacgcactagcatggcacgtatacaatgaaaagtttaggcatgctcagaacgggaaaatctcaatcgctctccaagctgattggatcgagcctgcttgtcctttttctcagaaagataaagaagtggccgaacgggtacttgagttcgatattgggtggcttgccgaacccattttcggatctggggattatccatgggttatgagagattggctcaatcagcggaacaactttctcttaccctatttcactgaggatgaaaaaaaattaatacagggaacatttgacttcctagcacttagtcactacacaactatcctcgtggattctgaaaaagaagaccctataaaatataatgactatctagaagtccaggaaatgacagatatcacatggctgaattcaccatcacaggttgccgttgtgccatggggactaagaaaagtactgaactggcttaaattcaaatatggggacctccctatgtacataatatcgaacggaatcgatgatgggttacatgcagaagatgaccagctaagagtgtactacatgcagaactacatcaatgaagccctgaaagcccacattctagatggaatcaacttgtgtggatacttcgcatatagttttaacgatcgtacagcccctaggttcggactttaccggtatgcagctgatcagttcgaacccaaagcctccatgaaacattataggaagatcatcgactccaacgggtttcccgggcccgagactctcgaaaggttttgccctgaagagtttacagtgtgcacagaatgctccttcttccatactagaaaatcacttctggctttcatagctttccttttcttcgcttccatcatcagtcttagtttgattttttattattctaaaaaaggacgccggtcttataag

SEQ ID NO: 14951 - DNA, 3036 bp, synthetic construct; identical to SEQ ID NO: 14950
  misc_feature 1..3036: note = source = /note="Description of Artificial Sequence: Synthetic coding sequence"
  source 1..3036: mol_type = other DNA

SEQ ID NO: 14952 - DNA, 3036 bp, synthetic construct
  misc_feature 1..3036: note = source = /note="Description of Artificial Sequence: Synthetic coding sequence"
  source 1..3036: mol_type = other DNA
atgccagcgtctgcaccccctaggcgccctcgtcctccacctccctcgctgtccctcctccttgtccttttgggacttggaggacggagactgcgggcagagcccggtgatggagcgcagacctgggcccgcttttcaagaccaccagcccctgaggcagccggtctgtttcaaggaaccttccccgatggattcctctgggcagtcggatccgctgcctaccaaaccgaaggggggtggcagcaacacggaaaaggtgcttcaatttgggacacttttacccatcacccgctcgcacctcctggagattcccgtaatgcctcgctgcctcttggtgcgccgtcgcctcttcagcctgcgaccggagatgtggcgagcgattcgtacaataacgtgtttagagatactgaagcactccgagagcttggcgtcacccattacagattttccatctcatgggcacgggtgttgccaaatggatccgcaggagttcctaaccgtgaagggctgagatactaccgaaggctcttggaaagactccgcgaactgggagtgcaaccagtggtcaccctgtatcactgggatctgcctcagagactgcaagacgcttacgggggttgggcaaatagagcactggccgatcactttcgagattatgcagaactctgttttcgacatttcggaggccaggtgaagtactggatcactattgataacccctacgtggtggcatggcacggttatgcaactggtagactcgcacccggaattcggggatcgccaaggcttggttacttggtcgcacataacctcctgcttgcacatgccaaggtgtggcatctgtacaacacctcgtttcgacctacccaaggtggacaagtgtcgatcgcgctctcctcacattggattaacccacggaggatgaccgatcatagcattaaggaatgtcagaaatcgcttgattttgtgctgggatggttcgccaaacctgtctttatagacggggattaccccgagtccatgaaaaacaacctgagcagcatcctgcccgattttaccgagagcgagaaaaagttcattaagggaacggcagactttttcgcgctctgtttcggccctacgctttcattccagctgcttgaccctcatatgaagttccgccaactggaaagccctaatctgcgtcaattgctgagctggatagacctggaattcaaccatccacagatattcattgtggaaaatggttggtttgtctcaggcacgaccaagcgcgatgatgcaaagtatatgtattacctcaagaagttcattatggagacgctgaaggccattaagctggatggggtcgatgtcataggttacaccgcctggtcgctgatggacgggttcgaatggcaccggggttactcaattcggaggggcctgttttacgtggactttctgagccaagacaagatgctgcttccaaagtctagcgcactgttctaccagaaactgattgagaagaatggttttccgcctctcccagagaaccagcccctggaaggtactttcccttgtgatttcgcatggggtgtggtggataactacatccaagtcgatactaccctctctcaattcacggatttgaacgtgtacctgtgggatgtccaccactcgaagagactcatcaaggtggatggagtggtgaccaaaaagaggaaatcgtactgcgtcgattttgcagccatccaaccacaaatcgccctccttcaagaaatgcatgtcacccattttaggttctcgctcgattgggcgttgatccttcctctggggaaccagtcgcaagtgaatcataccatccttcagtactacagatgcatggcaagcgagctcgtgagagtgaatatcaccccagtggttgcactctggcagccaatggcgcccaatcaaggccttccacgccttttggcaaggcaaggggcctgggaaaacccatacaccgctcttgctttcgcagagtacgcaaggttgtgctttcaggagctggggcaccatgtgaaactttggatcaccatgaacgaaccatacactcgcaatatgacttactcggcaggtcataatctgctgaaagcacacgcgttggcgtggcatgtgtacaatgaaaagtttagacatgcacaaaacggcaagatttcaattgcgcttcaagcagactggatcgaacccgcatgcccattctctcagaaagataaggaggtcgcagaacgcgtgctggaatttgacattggatggctggcagaaccgattttcggatccggcgattacccttgggtgatgagagactggttgaaccagcgcaacaacttcctgctcccctacttcaccgaagatgaaaagaagctgatacaaggcactttcgatttcctcgcgctgtcccattacaccaccatcctggtcgattcggaaaaagaggaccctattaagtacaacgattacttggaggtgcaggagatgactgacatcacctggctcaattcgccttcccaagtcgccgtcgtgccgtggggacttagaaaggtgctgaattggctgaagttcaagtacggtgacctgcccatgtacattatctcgaacggaattgacgacgggcttcacgcggaagatgaccagcttagagtctactacatgcaaaactacattaatgaggctttgaaggcacacatcctggatggaatcaacctctgtggttactttgcgtattcctttaacgatcgcaccgcgcctcgttttggactctaccgctatgctgcggaccaatttgagccaaaagccagtatgaagcactaccgcaagatcattgacagcaatggcttcccaggaccggagactttggaacgcttttgtccggaagaattcaccgtgtgtactgaatgctcattctttcacactagaaagtcccttctcgcgtttatagcttttctgttctttgcatcgatcatctcgctgtccttgattttctattactcgaagaaagggcgaaggtcatacaag

SEQ ID NO: 14953 - DNA, 3036 bp, synthetic construct; identical to SEQ ID NO: 14952
  misc_feature 1..3036: note = source = /note="Description of Artificial Sequence: Synthetic coding sequence"
  source 1..3036: mol_type = other DNA

SEQ ID NO: 14954 - DNA, 3036 bp, synthetic construct
  misc_feature 1..3036: note = source = /note="Description of Artificial Sequence: Synthetic coding sequence"
  source 1..3036: mol_type = other DNA
atgccagcctcagcaccaccgagacgcccacgaccgccacctccctcgctctccctgcttctggtcctcctgggacttgggggacggcgactgcgagctgagccaggtgatggagcacagacctgggcaagattctcaagaccacctgcaccggaggccgccgggttgtttcaaggcaccttccctgatggtttcctttgggcagtgggaagcgcagcttatcaaactgaaggaggatggcagcagcacggtaagggcgcatccatttgggatacctttacccatcatcccctcgcacctcccggtgattccagaaacgcaagcctcccactgggcgcaccaagccctcttcagcccgccactggggatgtcgcatcggactcgtacaataatgtttttcgcgacaccgaggcattgcgtgaactcggtgtcactcactacagatttagcatctcctgggcccgcgtgctcccaaatggtagcgcaggagttcccaaccgggaggggctgcgctactacaggaggcttcttgagcgtctccgcgaactcggggtgcagccagtggtcactctgtaccattgggatctgccccagcgacttcaagatgcatacggcgggtgggcgaatagggccctggccgatcatttcagggattacgccgaattgtgctttaggcacttcggcggacaagtaaagtactggataaccattgataatccctatgtggttgcatggcacggttacgcaaccggacggctcgcccctggcataaggggatcccccagacttggttacctggtggcgcataatctgcttcttgcgcatgccaaggtgtggcacctctacaatactagctttcgtcctacccagggaggacaggtgtcgatcgctctttcatcccactggatcaaccccagacgcatgaccgaccattccattaaggaatgtcagaagtcccttgactttgtgctgggatggttcgcaaagccggtctttatagatggagactaccctgagtcaatgaaaaacaatttgtcctcaatactccctgattttactgaatccgaaaagaagttcatcaaagggaccgcggactttttcgcactgtgctttggacccaccctgtcctttcagctgctggatccccatatgaaattccgccaactcgaatcgccaaatctgagacagcttctgtcctggatagaccttgaattcaaccatcctcagattttcatcgtggaaaatggatggttcgtgagcggcaccactaaaagagacgatgccaagtacatgtattatctgaagaagttcattatggaaactctgaaggccatcaagctcgacggtgtggacgtcattgggtacaccgcatggtcgctcatggatggattcgagtggcatagggggtacagcattcgacggggcctgttctacgttgatttcctctcacaggacaagatgcttcttcctaaatcatcagccctgttttaccagaagctcattgaaaagaacggattccctccactcccagagaaccagccactcgagggaacctttccctgtgactttgcctggggagtggtggacaattacatccaagtcgataccactctgtcacaattcaccgatctcaacgtgtacctttgggatgtccatcattcgaagcgcttgattaaggtggatggcgttgtgaccaagaagagaaagtcgtactgtgtggatttcgccgcaatacaaccacaaatcgcactcctgcaggaaatgcatgtgacccatttccgattttcactggactgggctcttattcttccgttgggcaaccagtcccaagtgaaccataccattctgcaatactaccgctgtatggcatcggagctcgtcagagtgaacattactcctgtggtcgcgctctggcaaccaatggcaccaaatcaaggcctgccgaggctgcttgcgagacaaggagcatgggaaaatccttacactgctctggcatttgccgagtacgcaagactttgctttcaggagctgggacatcacgtcaaactttggattactatgaacgagccatatactcgcaacatgacttactccgcaggacacaatcttctgaaagcgcatgccctggcatggcatgtgtacaatgagaagtttagacatgcgcaaaacggcaagatcagcattgccctgcaagcagattggattgagccggcgtgtcctttctcgcagaaggataaggaagtggcagagcgagtcctcgagttcgatatcgggtggctggccgaaccgatatttggttcgggtgactacccatgggtgatgagggattggcttaatcaacgcaacaactttttgctgccatacttcactgaggatgagaaaaaactgattcagggaacttttgattttctcgcactgtcccactataccaccatacttgtggacagcgaaaaagaggacccaatcaagtacaacgattacctggaagtgcaagaaatgactgatatcacgtggctgaactccccatcccaagtggcagtggtgccttggggtctgcggaaagtccttaactggctgaaattcaagtatggagatctgccaatgtacattatctctaatggtatcgatgatggactgcatgctgaggatgatcaactccgcgtgtactatatgcaaaactacattaatgaagcgctgaaggcccatattcttgacggaataaacctctgtggctactttgcctattcgttcaatgatagaacggcgcctagatttggcctttaccggtacgcggctgatcagtttgagccgaaggcctccatgaagcactacagaaagattatagatagcaatggattcccaggccctgagactcttgaacggttctgccctgaagagtttaccgtgtgtactgaatgctcctttttccatacccgaaaatcgctgctcgcattcattgcatttcttttcttcgcatccataatcagtcttagcctgattttctactactcaaagaaagggcggaggtcatacaag

SEQ ID NO: 14955 - DNA, 3036 bp, synthetic construct; identical to SEQ ID NO: 14954
  misc_feature 1..3036: note = source = /note="Description of Artificial Sequence: Synthetic coding sequence"
  source 1..3036: mol_type = other DNA
